United States Patent Application Publication US 2026/0265736 A1 - sequence listing, part 2

SEQ ID NO: 1082 - protein, 2094 aa, synthetic construct
MPAAKRVKLDGGDKKYSIGLDIGTNSVGWAVITDEYKVPSKKFKVLGNTDRHSIKKNLIGALLFDSGETAEATRLKRTARRRYTRRKNRICYLQEIFSNEMAKVDDSFFHRLEESFLVEEDKKHERHPIFGNIVDEVAYHEKYPTIYHLRKKLVDSTDKADLRLIYLALAHMIKFRGHFLIEGDLNPDNSDVDKLFIQLVQTYNQLFEENPINASGVDAKAILSARLSKSRRLENLIAQLPGEKKNGLFGNLIALSLGLTPNFKSNFDLAEDAKLQLSKDTYDDDLDNLLAQIGDQYADLFLAAKNLSDAILLSDILRVNTEITKAPLSASMIKRYDEHHQDLTLLKALVRQQLPEKYKEIFFDQSKNGYAGYIDGGASQEEFYKFIKPILEKMDGTEELLVKLNREDLLRKQRTFDNGSIPHQIHLGELHAILRRQEDFYPFLKDNREKIEKILTFRIPYYVGPLARGNSRFAWMTRKSEETITPWNFEEVVDKGASAQSFIERMTNFDKNLPNEKVLPKHSLLYEYFTVYNELTKVKYVTEGMRKPAFLSGEQKKAIVDLLFKTNRKVTVKQLKEDYFKKIECFDSVEISGVEDRFNASLGTYHDLLKIIKDKDFLDNEENEDILEDIVLTLTLFEDREMIEERLKTYAHLFDDKVMKQLKRRRYTGWGRLSRKLINGIRDKQSGKTILDFLKSDGFANRNFMQLIHDDSLTFKEDIQKAQVSGQGDSLHEHIANLAGSPAIKKGILQTVKVVDELVKVMGRHKPENIVIEMARENQTTQKGQKNSRERMKRIEEGIKELGSQILKEHPVENTQLQNEKLYLYYLQNGRDMYVDQELDINRLSDYDVDHIVPQSFLKDDSIDNKVLTRSDKARGKSDNVPSEEVVKKMKNYWRQLLNAKLITQRKFDNLTKAERGGLSELDKAGFIKRQLVETRQITKHVAQILDSRMNTKYDENDKLIREVKVITLKSKLVSDFRKDFQFYKVREINNYHHAHDAYLNAVVGTALIKKYPKLESEFVYGDYKVYDVRKMIAKSEQEIGKATAKYFFYSNIMNFFKTEITLANGEIRKRPLIETNGETGEIVWDKGRDFATVRKVLSMPQVNIVKKTEVQTGGFSKESILPKRNSDKLIARKKDWDPKKYGGFDSPTVAYSVLVVAKVEKGKSKKLKSVKELLGITIMERSSFEKNPIDFLEAKGYKEVKKDLIIKLPKYSLFELENGRKRMLASAGELQKGNELALPSKYVNFLYLASHYEKLKGSPEDNEQKQLFVEQHKHYLDEIIEQISEFSKRVILADANLDKVLSAYNKHRDKPIREQAENIIHLFTLTNLGAPAAFKYFDTTIDRKRYTSTKEVLDATLIHQSITGLYETRIDLSQLGGDGGGSSGGSGGGGGTLNIEDEYRLHETSKEPDVPLGSTWLSDFPQAWAETGGMGLAVRQAPLIIPLKATSTPVSIKQYPMSQEARLGIKPHIQRLLDQGILVPCQSPWNTPLLPVKKPGTNDYRPVQDLREVNKRVEDIHPTVPNPYNLLSGLPPSHQWYTVLDLKDAFFCLRLHPTSQPLFAFEWRDPEMGISGQLTWTRLPQGFKNSPTLFNEALHRDLADFRIQHPDLILLQYVDDLLLAATSEQDCQRGTRALLQTLGNLGYRASAKKAQICQKQVKYLGYLLKEGQRWLTEARKETVMGQPTPKTPRQLREFLGKAGFCRLFIPGFAEMAAPLYPLTKPGTLFNWGPDQQKAYQEIKQALLTAPALGLPDLTKPFELFVDEKQGYAKGVLTQKLGPWRRPVAYLSKKLDPVAAGWPPCLRMVAAIAVLTKDAGKLTMGQPLVILAPHAVEALVKQPPDRWLSNARMTHYQAMLLDTDRVQFGPVVALNPATLLPLPEKEAPHDCLEILAETHGTRPDLTDQPIPDADYTWYTDGSSFLQEGQRRAGAAVTTETEVIWARALPAGTSAQRAELIALTQALKMAEGKKLNVYTDSRYAFATAHVHGEIYRRRGWLTSEGREIKNKNEILALLKALFLPKRLSIIHCPGHQKGNSAEARGNRMADQAAREAAMKAVLETSTLLAGKRTADGSEFEKRTADGSEFESPKKKAKVE

SEQ ID NO: 1083 - protein, 2093 aa, synthetic construct
MPAAKRVKLDGGDKKYSIGLDIGTNSVGWAVITDEYKVPSKKFKVLGNTDRHSIKKNLIGALLFDSGETAEATRLKRTARRRYTRRKNRICYLQEIFSNEMAKVDDSFFHRLEESFLVEEDKKHERHPIFGNIVDEVAYHEKYPTIYHLRKKLVDSTDKADLRLIYLALAHMIKFRGHFLIEGDLNPDNSDVDKLFIQLVQTYNQLFEENPINASGVDAKAILSARLSKSRRLENLIAQLPGEKKNGLFGNLIALSLGLTPNFKSNFDLAEDAKLQLSKDTYDDDLDNLLAQIGDQYADLFLAAKNLSDAILLSDILRVNTEITKAPLSASMIKRYDEHHQDLTLLKALVRQQLPEKYKEIFFDQSKNGYAGYIDGGASQEEFYKFIKPILEKMDGTEELLVKLNREDLLRKQRTFDNGSIPHQIHLGELHAILRRQEDFYPFLKDNREKIEKILTFRIPYYVGPLARGNSRFAWMTRKSEETITPWNFEEVVDKGASAQSFIERMTNFDKNLPNEKVLPKHSLLYEYFTVYNELTKVKYVTEGMRKPAFLSGEQKKAIVDLLFKTNRKVTVKQLKEDYFKKIECFDSVEISGVEDRFNASLGTYHDLLKIIKDKDFLDNEENEDILEDIVLTLTLFEDREMIEERLKTYAHLFDDKVMKQLKRRRYTGWGRLSRKLINGIRDKQSGKTILDFLKSDGFANRNFMQLIHDDSLTFKEDIQKAQVSGQGDSLHEHIANLAGSPAIKKGILQTVKVVDELVKVMGRHKPENIVIEMARENQTTQKGQKNSRERMKRIEEGIKELGSQILKEHPVENTQLQNEKLYLYYLQNGRDMYVDQELDINRLSDYDVDHIVPQSFLKDDSIDNKVLTRSDKARGKSDNVPSEEVVKKMKNYWRQLLNAKLITQRKFDNLTKAERGGLSELDKAGFIKRQLVETRQITKHVAQILDSRMNTKYDENDKLIREVKVITLKSKLVSDFRKDFQFYKVREINNYHHAHDAYLNAVVGTALIKKYPKLESEFVYGDYKVYDVRKMIAKSEQEIGKATAKYFFYSNIMNFFKTEITLANGEIRKRPLIETNGETGEIVWDKGRDFATVRKVLSMPQVNIVKKTEVQTGGFSKESILPKRNSDKLIARKKDWDPKKYGGFDSPTVAYSVLVVAKVEKGKSKKLKSVKELLGITIMERSSFEKNPIDFLEAKGYKEVKKDLIIKLPKYSLFELENGRKRMLASAGELQKGNELALPSKYVNFLYLASHYEKLKGSPEDNEQKQLFVEQHKHYLDEIIEQISEFSKRVILADANLDKVLSAYNKHRDKPIREQAENIIHLFTLTNLGAPAAFKYFDTTIDRKRYTSTKEVLDATLIHQSITGLYETRIDLSQLGGDGGGGSEAAAKGGTLNIEDEYRLHETSKEPDVPLGSTWLSDFPQAWAETGGMGLAVRQAPLIIPLKATSTPVSIKQYPMSQEARLGIKPHIQRLLDQGILVPCQSPWNTPLLPVKKPGTNDYRPVQDLREVNKRVEDIHPTVPNPYNLLSGLPPSHQWYTVLDLKDAFFCLRLHPTSQPLFAFEWRDPEMGISGQLTWTRLPQGFKNSPTLFNEALHRDLADFRIQHPDLILLQYVDDLLLAATSEQDCQRGTRALLQTLGNLGYRASAKKAQICQKQVKYLGYLLKEGQRWLTEARKETVMGQPTPKTPRQLREFLGKAGFCRLFIPGFAEMAAPLYPLTKPGTLFNWGPDQQKAYQEIKQALLTAPALGLPDLTKPFELFVDEKQGYAKGVLTQKLGPWRRPVAYLSKKLDPVAAGWPPCLRMVAAIAVLTKDAGKLTMGQPLVILAPHAVEALVKQPPDRWLSNARMTHYQAMLLDTDRVQFGPVVALNPATLLPLPEKEAPHDCLEILAETHGTRPDLTDQPIPDADYTWYTDGSSFLQEGQRRAGAAVTTETEVIWARALPAGTSAQRAELIALTQALKMAEGKKLNVYTDSRYAFATAHVHGEIYRRRGWLTSEGREIKNKNEILALLKALFLPKRLSIIHCPGHQKGNSAEARGNRMADQAAREAAMKAVLETSTLLAGKRTADGSEFEKRTADGSEFESPKKKAKVE

SEQ ID NO: 1084 - protein, 2094 aa, synthetic construct
MPAAKRVKLDGGDKKYSIGLDIGTNSVGWAVITDEYKVPSKKFKVLGNTDRHSIKKNLIGALLFDSGETAEATRLKRTARRRYTRRKNRICYLQEIFSNEMAKVDDSFFHRLEESFLVEEDKKHERHPIFGNIVDEVAYHEKYPTIYHLRKKLVDSTDKADLRLIYLALAHMIKFRGHFLIEGDLNPDNSDVDKLFIQLVQTYNQLFEENPINASGVDAKAILSARLSKSRRLENLIAQLPGEKKNGLFGNLIALSLGLTPNFKSNFDLAEDAKLQLSKDTYDDDLDNLLAQIGDQYADLFLAAKNLSDAILLSDILRVNTEITKAPLSASMIKRYDEHHQDLTLLKALVRQQLPEKYKEIFFDQSKNGYAGYIDGGASQEEFYKFIKPILEKMDGTEELLVKLNREDLLRKQRTFDNGSIPHQIHLGELHAILRRQEDFYPFLKDNREKIEKILTFRIPYYVGPLARGNSRFAWMTRKSEETITPWNFEEVVDKGASAQSFIERMTNFDKNLPNEKVLPKHSLLYEYFTVYNELTKVKYVTEGMRKPAFLSGEQKKAIVDLLFKTNRKVTVKQLKEDYFKKIECFDSVEISGVEDRFNASLGTYHDLLKIIKDKDFLDNEENEDILEDIVLTLTLFEDREMIEERLKTYAHLFDDKVMKQLKRRRYTGWGRLSRKLINGIRDKQSGKTILDFLKSDGFANRNFMQLIHDDSLTFKEDIQKAQVSGQGDSLHEHIANLAGSPAIKKGILQTVKVVDELVKVMGRHKPENIVIEMARENQTTQKGQKNSRERMKRIEEGIKELGSQILKEHPVENTQLQNEKLYLYYLQNGRDMYVDQELDINRLSDYDVDHIVPQSFLKDDSIDNKVLTRSDKARGKSDNVPSEEVVKKMKNYWRQLLNAKLITQRKFDNLTKAERGGLSELDKAGFIKRQLVETRQITKHVAQILDSRMNTKYDENDKLIREVKVITLKSKLVSDFRKDFQFYKVREINNYHHAHDAYLNAVVGTALIKKYPKLESEFVYGDYKVYDVRKMIAKSEQEIGKATAKYFFYSNIMNFFKTEITLANGEIRKRPLIETNGETGEIVWDKGRDFATVRKVLSMPQVNIVKKTEVQTGGFSKESILPKRNSDKLIARKKDWDPKKYGGFDSPTVAYSVLVVAKVEKGKSKKLKSVKELLGITIMERSSFEKNPIDFLEAKGYKEVKKDLIIKLPKYSLFELENGRKRMLASAGELQKGNELALPSKYVNFLYLASHYEKLKGSPEDNEQKQLFVEQHKHYLDEIIEQISEFSKRVILADANLDKVLSAYNKHRDKPIREQAENIIHLFTLTNLGAPAAFKYFDTTIDRKRYTSTKEVLDATLIHQSITGLYETRIDLSQLGGDGGGSSGGGPAPGGTLNIEDEYRLHETSKEPDVPLGSTWLSDFPQAWAETGGMGLAVRQAPLIIPLKATSTPVSIKQYPMSQEARLGIKPHIQRLLDQGILVPCQSPWNTPLLPVKKPGTNDYRPVQDLREVNKRVEDIHPTVPNPYNLLSGLPPSHQWYTVLDLKDAFFCLRLHPTSQPLFAFEWRDPEMGISGQLTWTRLPQGFKNSPTLFNEALHRDLADFRIQHPDLILLQYVDDLLLAATSEQDCQRGTRALLQTLGNLGYRASAKKAQICQKQVKYLGYLLKEGQRWLTEARKETVMGQPTPKTPRQLREFLGKAGFCRLFIPGFAEMAAPLYPLTKPGTLFNWGPDQQKAYQEIKQALLTAPALGLPDLTKPFELFVDEKQGYAKGVLTQKLGPWRRPVAYLSKKLDPVAAGWPPCLRMVAAIAVLTKDAGKLTMGQPLVILAPHAVEALVKQPPDRWLSNARMTHYQAMLLDTDRVQFGPVVALNPATLLPLPEKEAPHDCLEILAETHGTRPDLTDQPIPDADYTWYTDGSSFLQEGQRRAGAAVTTETEVIWARALPAGTSAQRAELIALTQALKMAEGKKLNVYTDSRYAFATAHVHGEIYRRRGWLTSEGREIKNKNEILALLKALFLPKRLSIIHCPGHQKGNSAEARGNRMADQAAREAAMKAVLETSTLLAGKRTADGSEFEKRTADGSEFESPKKKAKVE

SEQ ID NO: 1085 - protein, 2094 aa, synthetic construct
MPAAKRVKLDGGDKKYSIGLDIGTNSVGWAVITDEYKVPSKKFKVLGNTDRHSIKKNLIGALLFDSGETAEATRLKRTARRRYTRRKNRICYLQEIFSNEMAKVDDSFFHRLEESFLVEEDKKHERHPIFGNIVDEVAYHEKYPTIYHLRKKLVDSTDKADLRLIYLALAHMIKFRGHFLIEGDLNPDNSDVDKLFIQLVQTYNQLFEENPINASGVDAKAILSARLSKSRRLENLIAQLPGEKKNGLFGNLIALSLGLTPNFKSNFDLAEDAKLQLSKDTYDDDLDNLLAQIGDQYADLFLAAKNLSDAILLSDILRVNTEITKAPLSASMIKRYDEHHQDLTLLKALVRQQLPEKYKEIFFDQSKNGYAGYIDGGASQEEFYKFIKPILEKMDGTEELLVKLNREDLLRKQRTFDNGSIPHQIHLGELHAILRRQEDFYPFLKDNREKIEKILTFRIPYYVGPLARGNSRFAWMTRKSEETITPWNFEEVVDKGASAQSFIERMTNFDKNLPNEKVLPKHSLLYEYFTVYNELTKVKYVTEGMRKPAFLSGEQKKAIVDLLFKTNRKVTVKQLKEDYFKKIECFDSVEISGVEDRFNASLGTYHDLLKIIKDKDFLDNEENEDILEDIVLTLTLFEDREMIEERLKTYAHLFDDKVMKQLKRRRYTGWGRLSRKLINGIRDKQSGKTILDFLKSDGFANRNFMQLIHDDSLTFKEDIQKAQVSGQGDSLHEHIANLAGSPAIKKGILQTVKVVDELVKVMGRHKPENIVIEMARENQTTQKGQKNSRERMKRIEEGIKELGSQILKEHPVENTQLQNEKLYLYYLQNGRDMYVDQELDINRLSDYDVDHIVPQSFLKDDSIDNKVLTRSDKARGKSDNVPSEEVVKKMKNYWRQLLNAKLITQRKFDNLTKAERGGLSELDKAGFIKRQLVETRQITKHVAQILDSRMNTKYDENDKLIREVKVITLKSKLVSDFRKDFQFYKVREINNYHHAHDAYLNAVVGTALIKKYPKLESEFVYGDYKVYDVRKMIAKSEQEIGKATAKYFFYSNIMNFFKTEITLANGEIRKRPLIETNGETGEIVWDKGRDFATVRKVLSMPQVNIVKKTEVQTGGFSKESILPKRNSDKLIARKKDWDPKKYGGFDSPTVAYSVLVVAKVEKGKSKKLKSVKELLGITIMERSSFEKNPIDFLEAKGYKEVKKDLIIKLPKYSLFELENGRKRMLASAGELQKGNELALPSKYVNFLYLASHYEKLKGSPEDNEQKQLFVEQHKHYLDEIIEQISEFSKRVILADANLDKVLSAYNKHRDKPIREQAENIIHLFTLTNLGAPAAFKYFDTTIDRKRYTSTKEVLDATLIHQSITGLYETRIDLSQLGGDGGGGSGGGPAPGGTLNIEDEYRLHETSKEPDVPLGSTWLSDFPQAWAETGGMGLAVRQAPLIIPLKATSTPVSIKQYPMSQEARLGIKPHIQRLLDQGILVPCQSPWNTPLLPVKKPGTNDYRPVQDLREVNKRVEDIHPTVPNPYNLLSGLPPSHQWYTVLDLKDAFFCLRLHPTSQPLFAFEWRDPEMGISGQLTWTRLPQGFKNSPTLFNEALHRDLADFRIQHPDLILLQYVDDLLLAATSEQDCQRGTRALLQTLGNLGYRASAKKAQICQKQVKYLGYLLKEGQRWLTEARKETVMGQPTPKTPRQLREFLGKAGFCRLFIPGFAEMAAPLYPLTKPGTLFNWGPDQQKAYQEIKQALLTAPALGLPDLTKPFELFVDEKQGYAKGVLTQKLGPWRRPVAYLSKKLDPVAAGWPPCLRMVAAIAVLTKDAGKLTMGQPLVILAPHAVEALVKQPPDRWLSNARMTHYQAMLLDTDRVQFGPVVALNPATLLPLPEKEAPHDCLEILAETHGTRPDLTDQPIPDADYTWYTDGSSFLQEGQRRAGAAVTTETEVIWARALPAGTSAQRAELIALTQALKMAEGKKLNVYTDSRYAFATAHVHGEIYRRRGWLTSEGREIKNKNEILALLKALFLPKRLSIIHCPGHQKGNSAEARGNRMADQAAREAAMKAVLETSTLLAGKRTADGSEFEKRTADGSEFESPKKKAKVE

SEQ ID NO: 1086 - protein, 2091 aa, synthetic construct
MPAAKRVKLDGGDKKYSIGLDIGTNSVGWAVITDEYKVPSKKFKVLGNTDRHSIKKNLIGALLFDSGETAEATRLKRTARRRYTRRKNRICYLQEIFSNEMAKVDDSFFHRLEESFLVEEDKKHERHPIFGNIVDEVAYHEKYPTIYHLRKKLVDSTDKADLRLIYLALAHMIKFRGHFLIEGDLNPDNSDVDKLFIQLVQTYNQLFEENPINASGVDAKAILSARLSKSRRLENLIAQLPGEKKNGLFGNLIALSLGLTPNFKSNFDLAEDAKLQLSKDTYDDDLDNLLAQIGDQYADLFLAAKNLSDAILLSDILRVNTEITKAPLSASMIKRYDEHHQDLTLLKALVRQQLPEKYKEIFFDQSKNGYAGYIDGGASQEEFYKFIKPILEKMDGTEELLVKLNREDLLRKQRTFDNGSIPHQIHLGELHAILRRQEDFYPFLKDNREKIEKILTFRIPYYVGPLARGNSRFAWMTRKSEETITPWNFEEVVDKGASAQSFIERMTNFDKNLPNEKVLPKHSLLYEYFTVYNELTKVKYVTEGMRKPAFLSGEQKKAIVDLLFKTNRKVTVKQLKEDYFKKIECFDSVEISGVEDRFNASLGTYHDLLKIIKDKDFLDNEENEDILEDIVLTLTLFEDREMIEERLKTYAHLFDDKVMKQLKRRRYTGWGRLSRKLINGIRDKQSGKTILDFLKSDGFANRNFMQLIHDDSLTFKEDIQKAQVSGQGDSLHEHIANLAGSPAIKKGILQTVKVVDELVKVMGRHKPENIVIEMARENQTTQKGQKNSRERMKRIEEGIKELGSQILKEHPVENTQLQNEKLYLYYLQNGRDMYVDQELDINRLSDYDVDHIVPQSFLKDDSIDNKVLTRSDKARGKSDNVPSEEVVKKMKNYWRQLLNAKLITQRKFDNLTKAERGGLSELDKAGFIKRQLVETRQITKHVAQILDSRMNTKYDENDKLIREVKVITLKSKLVSDFRKDFQFYKVREINNYHHAHDAYLNAVVGTALIKKYPKLESEFVYGDYKVYDVRKMIAKSEQEIGKATAKYFFYSNIMNFFKTEITLANGEIRKRPLIETNGETGEIVWDKGRDFATVRKVLSMPQVNIVKKTEVQTGGFSKESILPKRNSDKLIARKKDWDPKKYGGFDSPTVAYSVLVVAKVEKGKSKKLKSVKELLGITIMERSSFEKNPIDFLEAKGYKEVKKDLIIKLPKYSLFELENGRKRMLASAGELQKGNELALPSKYVNFLYLASHYEKLKGSPEDNEQKQLFVEQHKHYLDEIIEQISEFSKRVILADANLDKVLSAYNKHRDKPIREQAENIIHLFTLTNLGAPAAFKYFDTTIDRKRYTSTKEVLDATLIHQSITGLYETRIDLSQLGGDGGGSSPAPGGTLNIEDEYRLHETSKEPDVPLGSTWLSDFPQAWAETGGMGLAVRQAPLIIPLKATSTPVSIKQYPMSQEARLGIKPHIQRLLDQGILVPCQSPWNTPLLPVKKPGTNDYRPVQDLREVNKRVEDIHPTVPNPYNLLSGLPPSHQWYTVLDLKDAFFCLRLHPTSQPLFAFEWRDPEMGISGQLTWTRLPQGFKNSPTLFNEALHRDLADFRIQHPDLILLQYVDDLLLAATSEQDCQRGTRALLQTLGNLGYRASAKKAQICQKQVKYLGYLLKEGQRWLTEARKETVMGQPTPKTPRQLREFLGKAGFCRLFIPGFAEMAAPLYPLTKPGTLFNWGPDQQKAYQEIKQALLTAPALGLPDLTKPFELFVDEKQGYAKGVLTQKLGPWRRPVAYLSKKLDPVAAGWPPCLRMVAAIAVLTKDAGKLTMGQPLVILAPHAVEALVKQPPDRWLSNARMTHYQAMLLDTDRVQFGPVVALNPATLLPLPEKEAPHDCLEILAETHGTRPDLTDQPIPDADYTWYTDGSSFLQEGQRRAGAAVTTETEVIWARALPAGTSAQRAELIALTQALKMAEGKKLNVYTDSRYAFATAHVHGEIYRRRGWLTSEGREIKNKNEILALLKALFLPKRLSIIHCPGHQKGNSAEARGNRMADQAAREAAMKAVLETSTLLAGKRTADGSEFEKRTADGSEFESPKKKAKVE

SEQ ID NO: 1087 - protein, 2094 aa, synthetic construct
MPAAKRVKLDGGDKKYSIGLDIGTNSVGWAVITDEYKVPSKKFKVLGNTDRHSIKKNLIGALLFDSGETAEATRLKRTARRRYTRRKNRICYLQEIFSNEMAKVDDSFFHRLEESFLVEEDKKHERHPIFGNIVDEVAYHEKYPTIYHLRKKLVDSTDKADLRLIYLALAHMIKFRGHFLIEGDLNPDNSDVDKLFIQLVQTYNQLFEENPINASGVDAKAILSARLSKSRRLENLIAQLPGEKKNGLFGNLIALSLGLTPNFKSNFDLAEDAKLQLSKDTYDDDLDNLLAQIGDQYADLFLAAKNLSDAILLSDILRVNTEITKAPLSASMIKRYDEHHQDLTLLKALVRQQLPEKYKEIFFDQSKNGYAGYIDGGASQEEFYKFIKPILEKMDGTEELLVKLNREDLLRKQRTFDNGSIPHQIHLGELHAILRRQEDFYPFLKDNREKIEKILTFRIPYYVGPLARGNSRFAWMTRKSEETITPWNFEEVVDKGASAQSFIERMTNFDKNLPNEKVLPKHSLLYEYFTVYNELTKVKYVTEGMRKPAFLSGEQKKAIVDLLFKTNRKVTVKQLKEDYFKKIECFDSVEISGVEDRFNASLGTYHDLLKIIKDKDFLDNEENEDILEDIVLTLTLFEDREMIEERLKTYAHLFDDKVMKQLKRRRYTGWGRLSRKLINGIRDKQSGKTILDFLKSDGFANRNFMQLIHDDSLTFKEDIQKAQVSGQGDSLHEHIANLAGSPAIKKGILQTVKVVDELVKVMGRHKPENIVIEMARENQTTQKGQKNSRERMKRIEEGIKELGSQILKEHPVENTQLQNEKLYLYYLQNGRDMYVDQELDINRLSDYDVDHIVPQSFLKDDSIDNKVLTRSDKARGKSDNVPSEEVVKKMKNYWRQLLNAKLITQRKFDNLTKAERGGLSELDKAGFIKRQLVETRQITKHVAQILDSRMNTKYDENDKLIREVKVITLKSKLVSDFRKDFQFYKVREINNYHHAHDAYLNAVVGTALIKKYPKLESEFVYGDYKVYDVRKMIAKSEQEIGKATAKYFFYSNIMNFFKTEITLANGEIRKRPLIETNGETGEIVWDKGRDFATVRKVLSMPQVNIVKKTEVQTGGFSKESILPKRNSDKLIARKKDWDPKKYGGFDSPTVAYSVLVVAKVEKGKSKKLKSVKELLGITIMERSSFEKNPIDFLEAKGYKEVKKDLIIKLPKYSLFELENGRKRMLASAGELQKGNELALPSKYVNFLYLASHYEKLKGSPEDNEQKQLFVEQHKHYLDEIIEQISEFSKRVILADANLDKVLSAYNKHRDKPIREQAENIIHLFTLTNLGAPAAFKYFDTTIDRKRYTSTKEVLDATLIHQSITGLYETRIDLSQLGGDGGGGGGSSGGSGGTLNIEDEYRLHETSKEPDVPLGSTWLSDFPQAWAETGGMGLAVRQAPLIIPLKATSTPVSIKQYPMSQEARLGIKPHIQRLLDQGILVPCQSPWNTPLLPVKKPGTNDYRPVQDLREVNKRVEDIHPTVPNPYNLLSGLPPSHQWYTVLDLKDAFFCLRLHPTSQPLFAFEWRDPEMGISGQLTWTRLPQGFKNSPTLFNEALHRDLADFRIQHPDLILLQYVDDLLLAATSEQDCQRGTRALLQTLGNLGYRASAKKAQICQKQVKYLGYLLKEGQRWLTEARKETVMGQPTPKTPRQLREFLGKAGFCRLFIPGFAEMAAPLYPLTKPGTLFNWGPDQQKAYQEIKQALLTAPALGLPDLTKPFELFVDEKQGYAKGVLTQKLGPWRRPVAYLSKKLDPVAAGWPPCLRMVAAIAVLTKDAGKLTMGQPLVILAPHAVEALVKQPPDRWLSNARMTHYQAMLLDTDRVQFGPVVALNPATLLPLPEKEAPHDCLEILAETHGTRPDLTDQPIPDADYTWYTDGSSFLQEGQRRAGAAVTTETEVIWARALPAGTSAQRAELIALTQALKMAEGKKLNVYTDSRYAFATAHVHGEIYRRRGWLTSEGREIKNKNEILALLKALFLPKRLSIIHCPGHQKGNSAEARGNRMADQAAREAAMKAVLETSTLLAGKRTADGSEFEKRTADGSEFESPKKKAKVE

SEQ ID NO: 1088 - protein, 2096 aa, synthetic construct
MPAAKRVKLDGGDKKYSIGLDIGTNSVGWAVITDEYKVPSKKFKVLGNTDRHSIKKNLIGALLFDSGETAEATRLKRTARRRYTRRKNRICYLQEIFSNEMAKVDDSFFHRLEESFLVEEDKKHERHPIFGNIVDEVAYHEKYPTIYHLRKKLVDSTDKADLRLIYLALAHMIKFRGHFLIEGDLNPDNSDVDKLFIQLVQTYNQLFEENPINASGVDAKAILSARLSKSRRLENLIAQLPGEKKNGLFGNLIALSLGLTPNFKSNFDLAEDAKLQLSKDTYDDDLDNLLAQIGDQYADLFLAAKNLSDAILLSDILRVNTEITKAPLSASMIKRYDEHHQDLTLLKALVRQQLPEKYKEIFFDQSKNGYAGYIDGGASQEEFYKFIKPILEKMDGTEELLVKLNREDLLRKQRTFDNGSIPHQIHLGELHAILRRQEDFYPFLKDNREKIEKILTFRIPYYVGPLARGNSRFAWMTRKSEETITPWNFEEVVDKGASAQSFIERMTNFDKNLPNEKVLPKHSLLYEYFTVYNELTKVKYVTEGMRKPAFLSGEQKKAIVDLLFKTNRKVTVKQLKEDYFKKIECFDSVEISGVEDRFNASLGTYHDLLKIIKDKDFLDNEENEDILEDIVLTLTLFEDREMIEERLKTYAHLFDDKVMKQLKRRRYTGWGRLSRKLINGIRDKQSGKTILDFLKSDGFANRNFMQLIHDDSLTFKEDIQKAQVSGQGDSLHEHIANLAGSPAIKKGILQTVKVVDELVKVMGRHKPENIVIEMARENQTTQKGQKNSRERMKRIEEGIKELGSQILKEHPVENTQLQNEKLYLYYLQNGRDMYVDQELDINRLSDYDVDHIVPQSFLKDDSIDNKVLTRSDKARGKSDNVPSEEVVKKMKNYWRQLLNAKLITQRKFDNLTKAERGGLSELDKAGFIKRQLVETRQITKHVAQILDSRMNTKYDENDKLIREVKVITLKSKLVSDFRKDFQFYKVREINNYHHAHDAYLNAVVGTALIKKYPKLESEFVYGDYKVYDVRKMIAKSEQEIGKATAKYFFYSNIMNFFKTEITLANGEIRKRPLIETNGETGEIVWDKGRDFATVRKVLSMPQVNIVKKTEVQTGGFSKESILPKRNSDKLIARKKDWDPKKYGGFDSPTVAYSVLVVAKVEKGKSKKLKSVKELLGITIMERSSFEKNPIDFLEAKGYKEVKKDLIIKLPKYSLFELENGRKRMLASAGELQKGNELALPSKYVNFLYLASHYEKLKGSPEDNEQKQLFVEQHKHYLDEIIEQISEFSKRVILADANLDKVLSAYNKHRDKPIREQAENIIHLFTLTNLGAPAAFKYFDTTIDRKRYTSTKEVLDATLIHQSITGLYETRIDLSQLGGDGGGGGEAAAKGSSGGTLNIEDEYRLHETSKEPDVPLGSTWLSDFPQAWAETGGMGLAVRQAPLIIPLKATSTPVSIKQYPMSQEARLGIKPHIQRLLDQGILVPCQSPWNTPLLPVKKPGTNDYRPVQDLREVNKRVEDIHPTVPNPYNLLSGLPPSHQWYTVLDLKDAFFCLRLHPTSQPLFAFEWRDPEMGISGQLTWTRLPQGFKNSPTLFNEALHRDLADFRIQHPDLILLQYVDDLLLAATSEQDCQRGTRALLQTLGNLGYRASAKKAQICQKQVKYLGYLLKEGQRWLTEARKETVMGQPTPKTPRQLREFLGKAGFCRLFIPGFAEMAAPLYPLTKPGTLFNWGPDQQKAYQEIKQALLTAPALGLPDLTKPFELFVDEKQGYAKGVLTQKLGPWRRPVAYLSKKLDPVAAGWPPCLRMVAAIAVLTKDAGKLTMGQPLVILAPHAVEALVKQPPDRWLSNARMTHYQAMLLDTDRVQFGPVVALNPATLLPLPEKEAPHDCLEILAETHGTRPDLTDQPIPDADYTWYTDGSSFLQEGQRRAGAAVTTETEVIWARALPAGTSAQRAELIALTQALKMAEGKKLNVYTDSRYAFATAHVHGEIYRRRGWLTSEGREIKNKNEILALLKALFLPKRLSIIHCPGHQKGNSAEARGNRMADQAAREAAMKAVLETSTLLAGKRTADGSEFEKRTADGSEFESPKKKAKVE

SEQ ID NO: 1089 - protein, 2094 aa, synthetic construct
MPAAKRVKLDGGDKKYSIGLDIGTNSVGWAVITDEYKVPSKKFKVLGNTDRHSIKKNLIGALLFDSGETAEATRLKRTARRRYTRRKNRICYLQEIFSNEMAKVDDSFFHRLEESFLVEEDKKHERHPIFGNIVDEVAYHEKYPTIYHLRKKLVDSTDKADLRLIYLALAHMIKFRGHFLIEGDLNPDNSDVDKLFIQLVQTYNQLFEENPINASGVDAKAILSARLSKSRRLENLIAQLPGEKKNGLFGNLIALSLGLTPNFKSNFDLAEDAKLQLSKDTYDDDLDNLLAQIGDQYADLFLAAKNLSDAILLSDILRVNTEITKAPLSASMIKRYDEHHQDLTLLKALVRQQLPEKYKEIFFDQSKNGYAGYIDGGASQEEFYKFIKPILEKMDGTEELLVKLNREDLLRKQRTFDNGSIPHQIHLGELHAILRRQEDFYPFLKDNREKIEKILTFRIPYYVGPLARGNSRFAWMTRKSEETITPWNFEEVVDKGASAQSFIERMTNFDKNLPNEKVLPKHSLLYEYFTVYNELTKVKYVTEGMRKPAFLSGEQKKAIVDLLFKTNRKVTVKQLKEDYFKKIECFDSVEISGVEDRFNASLGTYHDLLKIIKDKDFLDNEENEDILEDIVLTLTLFEDREMIEERLKTYAHLFDDKVMKQLKRRRYTGWGRLSRKLINGIRDKQSGKTILDFLKSDGFANRNFMQLIHDDSLTFKEDIQKAQVSGQGDSLHEHIANLAGSPAIKKGILQTVKVVDELVKVMGRHKPENIVIEMARENQTTQKGQKNSRERMKRIEEGIKELGSQILKEHPVENTQLQNEKLYLYYLQNGRDMYVDQELDINRLSDYDVDHIVPQSFLKDDSIDNKVLTRSDKARGKSDNVPSEEVVKKMKNYWRQLLNAKLITQRKFDNLTKAERGGLSELDKAGFIKRQLVETRQITKHVAQILDSRMNTKYDENDKLIREVKVITLKSKLVSDFRKDFQFYKVREINNYHHAHDAYLNAVVGTALIKKYPKLESEFVYGDYKVYDVRKMIAKSEQEIGKATAKYFFYSNIMNFFKTEITLANGEIRKRPLIETNGETGEIVWDKGRDFATVRKVLSMPQVNIVKKTEVQTGGFSKESILPKRNSDKLIARKKDWDPKKYGGFDSPTVAYSVLVVAKVEKGKSKKLKSVKELLGITIMERSSFEKNPIDFLEAKGYKEVKKDLIIKLPKYSLFELENGRKRMLASAGELQKGNELALPSKYVNFLYLASHYEKLKGSPEDNEQKQLFVEQHKHYLDEIIEQISEFSKRVILADANLDKVLSAYNKHRDKPIREQAENIIHLFTLTNLGAPAAFKYFDTTIDRKRYTSTKEVLDATLIHQSITGLYETRIDLSQLGGDGGGSSGSSGSSGGTLNIEDEYRLHETSKEPDVPLGSTWLSDFPQAWAETGGMGLAVRQAPLIIPLKATSTPVSIKQYPMSQEARLGIKPHIQRLLDQGILVPCQSPWNTPLLPVKKPGTNDYRPVQDLREVNKRVEDIHPTVPNPYNLLSGLPPSHQWYTVLDLKDAFFCLRLHPTSQPLFAFEWRDPEMGISGQLTWTRLPQGFKNSPTLFNEALHRDLADFRIQHPDLILLQYVDDLLLAATSEQDCQRGTRALLQTLGNLGYRASAKKAQICQKQVKYLGYLLKEGQRWLTEARKETVMGQPTPKTPRQLREFLGKAGFCRLFIPGFAEMAAPLYPLTKPGTLFNWGPDQQKAYQEIKQALLTAPALGLPDLTKPFELFVDEKQGYAKGVLTQKLGPWRRPVAYLSKKLDPVAAGWPPCLRMVAAIAVLTKDAGKLTMGQPLVILAPHAVEALVKQPPDRWLSNARMTHYQAMLLDTDRVQFGPVVALNPATLLPLPEKEAPHDCLEILAETHGTRPDLTDQPIPDADYTWYTDGSSFLQEGQRRAGAAVTTETEVIWARALPAGTSAQRAELIALTQALKMAEGKKLNVYTDSRYAFATAHVHGEIYRRRGWLTSEGREIKNKNEILALLKALFLPKRLSIIHCPGHQKGNSAEARGNRMADQAAREAAMKAVLETSTLLAGKRTADGSEFEKRTADGSEFESPKKKAKVE

SEQ ID NO: 1090 - protein, 2096 aa, synthetic construct
MPAAKRVKLDGGDKKYSIGLDIGTNSVGWAVITDEYKVPSKKFKVLGNTDRHSIKKNLIGALLFDSGETAEATRLKRTARRRYTRRKNRICYLQEIFSNEMAKVDDSFFHRLEESFLVEEDKKHERHPIFGNIVDEVAYHEKYPTIYHLRKKLVDSTDKADLRLIYLALAHMIKFRGHFLIEGDLNPDNSDVDKLFIQLVQTYNQLFEENPINASGVDAKAILSARLSKSRRLENLIAQLPGEKKNGLFGNLIALSLGLTPNFKSNFDLAEDAKLQLSKDTYDDDLDNLLAQIGDQYADLFLAAKNLSDAILLSDILRVNTEITKAPLSASMIKRYDEHHQDLTLLKALVRQQLPEKYKEIFFDQSKNGYAGYIDGGASQEEFYKFIKPILEKMDGTEELLVKLNREDLLRKQRTFDNGSIPHQIHLGELHAILRRQEDFYPFLKDNREKIEKILTFRIPYYVGPLARGNSRFAWMTRKSEETITPWNFEEVVDKGASAQSFIERMTNFDKNLPNEKVLPKHSLLYEYFTVYNELTKVKYVTEGMRKPAFLSGEQKKAIVDLLFKTNRKVTVKQLKEDYFKKIECFDSVEISGVEDRFNASLGTYHDLLKIIKDKDFLDNEENEDILEDIVLTLTLFEDREMIEERLKTYAHLFDDKVMKQLKRRRYTGWGRLSRKLINGIRDKQSGKTILDFLKSDGFANRNFMQLIHDDSLTFKEDIQKAQVSGQGDSLHEHIANLAGSPAIKKGILQTVKVVDELVKVMGRHKPENIVIEMARENQTTQKGQKNSRERMKRIEEGIKELGSQILKEHPVENTQLQNEKLYLYYLQNGRDMYVDQELDINRLSDYDVDHIVPQSFLKDDSIDNKVLTRSDKARGKSDNVPSEEVVKKMKNYWRQLLNAKLITQRKFDNLTKAERGGLSELDKAGFIKRQLVETRQITKHVAQILDSRMNTKYDENDKLIREVKVITLKSKLVSDFRKDFQFYKVREINNYHHAHDAYLNAVVGTALIKKYPKLESEFVYGDYKVYDVRKMIAKSEQEIGKATAKYFFYSNIMNFFKTEITLANGEIRKRPLIETNGETGEIVWDKGRDFATVRKVLSMPQVNIVKKTEVQTGGFSKESILPKRNSDKLIARKKDWDPKKYGGFDSPTVAYSVLVVAKVEKGKSKKLKSVKELLGITIMERSSFEKNPIDFLEAKGYKEVKKDLIIKLPKYSLFELENGRKRMLASAGELQKGNELALPSKYVNFLYLASHYEKLKGSPEDNEQKQLFVEQHKHYLDEIIEQISEFSKRVILADANLDKVLSAYNKHRDKPIREQAENIIHLFTLTNLGAPAAFKYFDTTIDRKRYTSTKEVLDATLIHQSITGLYETRIDLSQLGGDGGGGSPAPEAAAKGGTLNIEDEYRLHETSKEPDVPLGSTWLSDFPQAWAETGGMGLAVRQAPLIIPLKATSTPVSIKQYPMSQEARLGIKPHIQRLLDQGILVPCQSPWNTPLLPVKKPGTNDYRPVQDLREVNKRVEDIHPTVPNPYNLLSGLPPSHQWYTVLDLKDAFFCLRLHPTSQPLFAFEWRDPEMGISGQLTWTRLPQGFKNSPTLFNEALHRDLADFRIQHPDLILLQYVDDLLLAATSEQDCQRGTRALLQTLGNLGYRASAKKAQICQKQVKYLGYLLKEGQRWLTEARKETVMGQPTPKTPRQLREFLGKAGFCRLFIPGFAEMAAPLYPLTKPGTLFNWGPDQQKAYQEIKQALLTAPALGLPDLTKPFELFVDEKQGYAKGVLTQKLGPWRRPVAYLSKKLDPVAAGWPPCLRMVAAIAVLTKDAGKLTMGQPLVILAPHAVEALVKQPPDRWLSNARMTHYQAMLLDTDRVQFGPVVALNPATLLPLPEKEAPHDCLEILAETHGTRPDLTDQPIPDADYTWYTDGSSFLQEGQRRAGAAVTTETEVIWARALPAGTSAQRAELIALTQALKMAEGKKLNVYTDSRYAFATAHVHGEIYRRRGWLTSEGREIKNKNEILALLKALFLPKRLSIIHCPGHQKGNSAEARGNRMADQAAREAAMKAVLETSTLLAGKRTADGSEFEKRTADGSEFESPKKKAKVE

SEQ ID NO: 1091 - protein, 2096 aa, synthetic construct
MPAAKRVKLDGGDKKYSIGLDIGTNSVGWAVITDEYKVPSKKFKVLGNTDRHSIKKNLIGALLFDSGETAEATRLKRTARRRYTRRKNRICYLQEIFSNEMAKVDDSFFHRLEESFLVEEDKKHERHPIFGNIVDEVAYHEKYPTIYHLRKKLVDSTDKADLRLIYLALAHMIKFRGHFLIEGDLNPDNSDVDKLFIQLVQTYNQLFEENPINASGVDAKAILSARLSKSRRLENLIAQLPGEKKNGLFGNLIALSLGLTPNFKSNFDLAEDAKLQLSKDTYDDDLDNLLAQIGDQYADLFLAAKNLSDAILLSDILRVNTEITKAPLSASMIKRYDEHHQDLTLLKALVRQQLPEKYKEIFFDQSKNGYAGYIDGGASQEEFYKFIKPILEKMDGTEELLVKLNREDLLRKQRTFDNGSIPHQIHLGELHAILRRQEDFYPFLKDNREKIEKILTFRIPYYVGPLARGNSRFAWMTRKSEETITPWNFEEVVDKGASAQSFIERMTNFDKNLPNEKVLPKHSLLYEYFTVYNELTKVKYVTEGMRKPAFLSGEQKKAIVDLLFKTNRKVTVKQLKEDYFKKIECFDSVEISGVEDRFNASLGTYHDLLKIIKDKDFLDNEENEDILEDIVLTLTLFEDREMIEERLKTYAHLFDDKVMKQLKRRRYTGWGRLSRKLINGIRDKQSGKTILDFLKSDGFANRNFMQLIHDDSLTFKEDIQKAQVSGQGDSLHEHIANLAGSPAIKKGILQTVKVVDELVKVMGRHKPENIVIEMARENQTTQKGQKNSRERMKRIEEGIKELGSQILKEHPVENTQLQNEKLYLYYLQNGRDMYVDQELDINRLSDYDVDHIVPQSFLKDDSIDNKVLTRSDKARGKSDNVPSEEVVKKMKNYWRQLLNAKLITQRKFDNLTKAERGGLSELDKAGFIKRQLVETRQITKHVAQILDSRMNTKYDENDKLIREVKVITLKSKLVSDFRKDFQFYKVREINNYHHAHDAYLNAVVGTALIKKYPKLESEFVYGDYKVYDVRKMIAKSEQEIGKATAKYFFYSNIMNFFKTEITLANGEIRKRPLIETNGETGEIVWDKGRDFATVRKVLSMPQVNIVKKTEVQTGGFSKESILPKRNSDKLIARKKDWDPKKYGGFDSPTVAYSVLVVAKVEKGKSKKLKSVKELLGITIMERSSFEKNPIDFLEAKGYKEVKKDLIIKLPKYSLFELENGRKRMLASAGELQKGNELALPSKYVNFLYLASHYEKLKGSPEDNEQKQLFVEQHKHYLDEIIEQISEFSKRVILADANLDKVLSAYNKHRDKPIREQAENIIHLFTLTNLGAPAAFKYFDTTIDRKRYTSTKEVLDATLIHQSITGLYETRIDLSQLGGDGGEAAAKGGGGGSGGTLNIEDEYRLHETSKEPDVPLGSTWLSDFPQAWAETGGMGLAVRQAPLIIPLKATSTPVSIKQYPMSQEARLGIKPHIQRLLDQGILVPCQSPWNTPLLPVKKPGTNDYRPVQDLREVNKRVEDIHPTVPNPYNLLSGLPPSHQWYTVLDLKDAFFCLRLHPTSQPLFAFEWRDPEMGISGQLTWTRLPQGFKNSPTLFNEALHRDLADFRIQHPDLILLQYVDDLLLAATSEQDCQRGTRALLQTLGNLGYRASAKKAQICQKQVKYLGYLLKEGQRWLTEARKETVMGQPTPKTPRQLREFLGKAGFCRLFIPGFAEMAAPLYPLTKPGTLFNWGPDQQKAYQEIKQALLTAPALGLPDLTKPFELFVDEKQGYAKGVLTQKLGPWRRPVAYLSKKLDPVAAGWPPCLRMVAAIAVLTKDAGKLTMGQPLVILAPHAVEALVKQPPDRWLSNARMTHYQAMLLDTDRVQFGPVVALNPATLLPLPEKEAPHDCLEILAETHGTRPDLTDQPIPDADYTWYTDGSSFLQEGQRRAGAAVTTETEVIWARALPAGTSAQRAELIALTQALKMAEGKKLNVYTDSRYAFATAHVHGEIYRRRGWLTSEGREIKNKNEILALLKALFLPKRLSIIHCPGHQKGNSAEARGNRMADQAAREAAMKAVLETSTLLAGKRTADGSEFEKRTADGSEFESPKKKAKVE

SEQ ID NO: 1092 - protein, 2109 aa, synthetic construct
MPAAKRVKLDGGDKKYSIGLDIGTNSVGWAVITDEYKVPSKKFKVLGNTDRHSIKKNLIGALLFDSGETAEATRLKRTARRRYTRRKNRICYLQEIFSNEMAKVDDSFFHRLEESFLVEEDKKHERHPIFGNIVDEVAYHEKYPTIYHLRKKLVDSTDKADLRLIYLALAHMIKFRGHFLIEGDLNPDNSDVDKLFIQLVQTYNQLFEENPINASGVDAKAILSARLSKSRRLENLIAQLPGEKKNGLFGNLIALSLGLTPNFKSNFDLAEDAKLQLSKDTYDDDLDNLLAQIGDQYADLFLAAKNLSDAILLSDILRVNTEITKAPLSASMIKRYDEHHQDLTLLKALVRQQLPEKYKEIFFDQSKNGYAGYIDGGASQEEFYKFIKPILEKMDGTEELLVKLNREDLLRKQRTFDNGSIPHQIHLGELHAILRRQEDFYPFLKDNREKIEKILTFRIPYYVGPLARGNSRFAWMTRKSEETITPWNFEEVVDKGASAQSFIERMTNFDKNLPNEKVLPKHSLLYEYFTVYNELTKVKYVTEGMRKPAFLSGEQKKAIVDLLFKTNRKVTVKQLKEDYFKKIECFDSVEISGVEDRFNASLGTYHDLLKIIKDKDFLDNEENEDILEDIVLTLTLFEDREMIEERLKTYAHLFDDKVMKQLKRRRYTGWGRLSRKLINGIRDKQSGKTILDFLKSDGFANRNFMQLIHDDSLTFKEDIQKAQVSGQGDSLHEHIANLAGSPAIKKGILQTVKVVDELVKVMGRHKPENIVIEMARENQTTQKGQKNSRERMKRIEEGIKELGSQILKEHPVENTQLQNEKLYLYYLQNGRDMYVDQELDINRLSDYDVDHIVPQSFLKDDSIDNKVLTRSDKARGKSDNVPSEEVVKKMKNYWRQLLNAKLITQRKFDNLTKAERGGLSELDKAGFIKRQLVETRQITKHVAQILDSRMNTKYDENDKLIREVKVITLKSKLVSDFRKDFQFYKVREINNYHHAHDAYLNAVVGTALIKKYPKLESEFVYGDYKVYDVRKMIAKSEQEIGKATAKYFFYSNIMNFFKTEITLANGEIRKRPLIETNGETGEIVWDKGRDFATVRKVLSMPQVNIVKKTEVQTGGFSKESILPKRNSDKLIARKKDWDPKKYGGFDSPTVAYSVLVVAKVEKGKSKKLKSVKELLGITIMERSSFEKNPIDFLEAKGYKEVKKDLIIKLPKYSLFELENGRKRMLASAGELQKGNELALPSKYVNFLYLASHYEKLKGSPEDNEQKQLFVEQHKHYLDEIIEQISEFSKRVILADANLDKVLSAYNKHRDKPIREQAENIIHLFTLTNLGAPAAFKYFDTTIDRKRYTSTKEVLDATLIHQSITGLYETRIDLSQLGGDGGSGGSSGGSSGSETPGTSESATPESSGGSSGGSSGGVPWILKKPLELTIKLDLEEQQGTLLNNSILSKKGKEELKQLFEKYSALWQSWENQVGHRRIRPHKIATGTVKPTPQKQYHINPKAKPDIQIVINDLLKQGVLIQKESTMNTPVYPVPKPNGRWRMVLDYRAVNKVTPLIAVQNQHSYGILGSLFKGRYKTTIDLSNGFWAHPIVPEDYWITAFTWQGKQYCWTVLPQGFLNSPGLFNGDVVDLLQGIPNVEVYVDDVYISHDSEKEHLEYLDILFNRLKEAGYIISLKKSNIANSIVDFLGFQITNEGRGLTDTFKEKLENITAPTTLKQLQSILGLLNFARNFIPDFTELIAPLYALIPKSPKNYVPWQIEHSTTLETLITKLNGAEYLQGRKGDKTLIMKVNASYTTGYIRYYNEGEKKPISYVSIVFSKTELKFTELEKLLTTVHKGLLKALDLSMGQNIHVYSPIVSMQNIQKTPQTAKKALASRWLSWLSYLEDPRIRFFYDPQMPALKDLPAVDTGKDNKKHPSNFQHIFYTDGSAITSPTKEGHLNAGMGIVYFINKDGNLQKQQEWSISLGNHTAQFAEIAAFEFALKKCLPLGGNILVVTDSNYVAKAYNEELDVWASNGFVNNRKKPLKHISKWKSVADLKRLRPDVVVTHEPGHQKLDSSPHAYGNNLADQLATQASFKVHAGKRTADGSEFEKRTADGSEFESPKKKAKVE

SEQ ID NO: 1093 - protein, 2122 aa, synthetic construct
MPAAKRVKLDGGDKKYSIGLDIGTNSVGWAVITDEYKVPSKKFKVLGNTDRHSIKKNLIGALLFDSGETAEATRLKRTARRRYTRRKNRICYLQEIFSNEMAKVDDSFFHRLEESFLVEEDKKHERHPIFGNIVDEVAYHEKYPTIYHLRKKLVDSTDKADLRLIYLALAHMIKFRGHFLIEGDLNPDNSDVDKLFIQLVQTYNQLFEENPINASGVDAKAILSARLSKSRRLENLIAQLPGEKKNGLFGNLIALSLGLTPNFKSNFDLAEDAKLQLSKDTYDDDLDNLLAQIGDQYADLFLAAKNLSDAILLSDILRVNTEITKAPLSASMIKRYDEHHQDLTLLKALVRQQLPEKYKEIFFDQSKNGYAGYIDGGASQEEFYKFIKPILEKMDGTEELLVKLNREDLLRKQRTFDNGSIPHQIHLGELHAILRRQEDFYPFLKDNREKIEKILTFRIPYYVGPLARGNSRFAWMTRKSEETITPWNFEEVVDKGASAQSFIERMTNFDKNLPNEKVLPKHSLLYEYFTVYNELTKVKYVTEGMRKPAFLSGEQKKAIVDLLFKTNRKVTVKQLKEDYFKKIECFDSVEISGVEDRFNASLGTYHDLLKIIKDKDFLDNEENEDILEDIVLTLTLFEDREMIEERLKTYAHLFDDKVMKQLKRRRYTGWGRLSRKLINGIRDKQSGKTILDFLKSDGFANRNFMQLIHDDSLTFKEDIQKAQVSGQGDSLHEHIANLAGSPAIKKGILQTVKVVDELVKVMGRHKPENIVIEMARENQTTQKGQKNSRERMKRIEEGIKELGSQILKEHPVENTQLQNEKLYLYYLQNGRDMYVDQELDINRLSDYDVDHIVPQSFLKDDSIDNKVLTRSDKARGKSDNVPSEEVVKKMKNYWRQLLNAKLITQRKFDNLTKAERGGLSELDKAGFIKRQLVETRQITKHVAQILDSRMNTKYDENDKLIREVKVITLKSKLVSDFRKDFQFYKVREINNYHHAHDAYLNAVVGTALIKKYPKLESEFVYGDYKVYDVRKMIAKSEQEIGKATAKYFFYSNIMNFFKTEITLANGEIRKRPLIETNGETGEIVWDKGRDFATVRKVLSMPQVNIVKKTEVQTGGFSKESILPKRNSDKLIARKKDWDPKKYGGFDSPTVAYSVLVVAKVEKGKSKKLKSVKELLGITIMERSSFEKNPIDFLEAKGYKEVKKDLIIKLPKYSLFELENGRKRMLASAGELQKGNELALPSKYVNFLYLASHYEKLKGSPEDNEQKQLFVEQHKHYLDEIIEQISEFSKRVILADANLDKVLSAYNKHRDKPIREQAENIIHLFTLTNLGAPAAFKYFDTTIDRKRYTSTKEVLDATLIHQSITGLYETRIDLSQLGGDGGAEAAAKEAAAKEAAAKEAAAKALEAEAAAKEAAAKEAAAKEAAAKAGGVPWILKKPLELTIKLDLEEQQGTLLNNSILSKKGKEELKQLFEKYSALWQSWENQVGHRRIRPHKIATGTVKPTPQKQYHINPKAKPDIQIVINDLLKQGVLIQKESTMNTPVYPVPKPNGRWRMVLDYRAVNKVTPLIAVQNQHSYGILGSLFKGRYKTTIDLSNGFWAHPIVPEDYWITAFTWQGKQYCWTVLPQGFLNSPGLFNGDVVDLLQGIPNVEVYVDDVYISHDSEKEHLEYLDILFNRLKEAGYIISLKKSNIANSIVDFLGFQITNEGRGLTDTFKEKLENITAPTTLKQLQSILGLLNFARNFIPDFTELIAPLYALIPKSPKNYVPWQIEHSTTLETLITKLNGAEYLQGRKGDKTLIMKVNASYTTGYIRYYNEGEKKPISYVSIVFSKTELKFTELEKLLTTVHKGLLKALDLSMGQNIHVYSPIVSMQNIQKTPQTAKKALASRWLSWLSYLEDPRIRFFYDPQMPALKDLPAVDTGKDNKKHPSNFQHIFYTDGSAITSPTKEGHLNAGMGIVYFINKDGNLQKQQEWSISLGNHTAQFAEIAAFEFALKKCLPLGGNILVVTDSNYVAKAYNEELDVWASNGFVNNRKKPLKHISKWKSVADLKRLRPDVVVTHEPGHQKLDSSPHAYGNNLADQLATQASFKVHAGKRTADGSEFEKRTADGSEFESPKKKAKVE

SEQ ID NO: 1094 - protein, 2106 aa, synthetic construct
MPAAKRVKLDGGDKKYSIGLDIGTNSVGWAVITDEYKVPSKKFKVLGNTDRHSIKKNLIGALLFDSGETAEATRLKRTARRRYTRRKNRICYLQEIFSNEMAKVDDSFFHRLEESFLVEEDKKHERHPIFGNIVDEVAYHEKYPTIYHLRKKLVDSTDKADLRLIYLALAHMIKFRGHFLIEGDLNPDNSDVDKLFIQLVQTYNQLFEENPINASGVDAKAILSARLSKSRRLENLIAQLPGEKKNGLFGNLIALSLGLTPNFKSNFDLAEDAKLQLSKDTYDDDLDNLLAQIGDQYADLFLAAKNLSDAILLSDILRVNTEITKAPLSASMIKRYDEHHQDLTLLKALVRQQLPEKYKEIFFDQSKNGYAGYIDGGASQEEFYKFIKPILEKMDGTEELLVKLNREDLLRKQRTFDNGSIPHQIHLGELHAILRRQEDFYPFLKDNREKIEKILTFRIPYYVGPLARGNSRFAWMTRKSEETITPWNFEEVVDKGASAQSFIERMTNFDKNLPNEKVLPKHSLLYEYFTVYNELTKVKYVTEGMRKPAFLSGEQKKAIVDLLFKTNRKVTVKQLKEDYFKKIECFDSVEISGVEDRFNASLGTYHDLLKIIKDKDFLDNEENEDILEDIVLTLTLFEDREMIEERLKTYAHLFDDKVMKQLKRRRYTGWGRLSRKLINGIRDKQSGKTILDFLKSDGFANRNFMQLIHDDSLTFKEDIQKAQVSGQGDSLHEHIANLAGSPAIKKGILQTVKVVDELVKVMGRHKPENIVIEMARENQTTQKGQKNSRERMKRIEEGIKELGSQILKEHPVENTQLQNEKLYLYYLQNGRDMYVDQELDINRLSDYDVDHIVPQSFLKDDSIDNKVLTRSDKARGKSDNVPSEEVVKKMKNYWRQLLNAKLITQRKFDNLTKAERGGLSELDKAGFIKRQLVETRQITKHVAQILDSRMNTKYDENDKLIREVKVITLKSKLVSDFRKDFQFYKVREINNYHHAHDAYLNAVVGTALIKKYPKLESEFVYGDYKVYDVRKMIAKSEQEIGKATAKYFFYSNIMNFFKTEITLANGEIRKRPLIETNGETGEIVWDKGRDFATVRKVLSMPQVNIVKKTEVQTGGFSKESILPKRNSDKLIARKKDWDPKKYGGFDSPTVAYSVLVVAKVEKGKSKKLKSVKELLGITIMERSSFEKNPIDFLEAKGYKEVKKDLIIKLPKYSLFELENGRKRMLASAGELQKGNELALPSKYVNFLYLASHYEKLKGSPEDNEQKQLFVEQHKHYLDEIIEQISEFSKRVILADANLDKVLSAYNKHRDKPIREQAENIIHLFTLTNLGAPAAFKYFDTTIDRKRYTSTKEVLDATLIHQSITGLYETRIDLSQLGGDGGEAAAKEAAAKEAAAKEAAAKEAAAKEAAAKGGVPWILKKPLELTIKLDLEEQQGTLLNNSILSKKGKEELKQLFEKYSALWQSWENQVGHRRIRPHKIATGTVKPTPQKQYHINPKAKPDIQIVINDLLKQGVLIQKESTMNTPVYPVPKPNGRWRMVLDYRAVNKVTPLIAVQNQHSYGILGSLFKGRYKTTIDLSNGFWAHPIVPEDYWITAFTWQGKQYCWTVLPQGFLNSPGLFNGDVVDLLQGIPNVEVYVDDVYISHDSEKEHLEYLDILFNRLKEAGYIISLKKSNIANSIVDFLGFQITNEGRGLTDTFKEKLENITAPTTLKQLQSILGLLNFARNFIPDFTELIAPLYALIPKSPKNYVPWQIEHSTTLETLITKLNGAEYLQGRKGDKTLIMKVNASYTTGYIRYYNEGEKKPISYVSIVFSKTELKFTELEKLLTTVHKGLLKALDLSMGQNIHVYSPIVSMQNIQKTPQTAKKALASRWLSWLSYLEDPRIRFFYDPQMPALKDLPAVDTGKDNKKHPSNFQHIFYTDGSAITSPTKEGHLNAGMGIVYFINKDGNLQKQQEWSISLGNHTAQFAEIAAFEFALKKCLPLGGNILVVTDSNYVAKAYNEELDVWASNGFVNNRKKPLKHISKWKSVADLKRLRPDVVVTHEPGHQKLDSSPHAYGNNLADQLATQASFKVHAGKRTADGSEFEKRTADGSEFESPKKKAKVE

SEQ ID NO: 1095 - protein, 2094 aa, synthetic construct
MPAAKRVKLDGGDKKYSIGLDIGTNSVGWAVITDEYKVPSKKFKVLGNTDRHSIKKNLIGALLFDSGETAEATRLKRTARRRYTRRKNRICYLQEIFSNEMAKVDDSFFHRLEESFLVEEDKKHERHPIFGNIVDEVAYHEKYPTIYHLRKKLVDSTDKADLRLIYLALAHMIKFRGHFLIEGDLNPDNSDVDKLFIQLVQTYNQLFEENPINASGVDAKAILSARLSKSRRLENLIAQLPGEKKNGLFGNLIALSLGLTPNFKSNFDLAEDAKLQLSKDTYDDDLDNLLAQIGDQYADLFLAAKNLSDAILLSDILRVNTEITKAPLSASMIKRYDEHHQDLTLLKALVRQQLPEKYKEIFFDQSKNGYAGYIDGGASQEEFYKFIKPILEKMDGTEELLVKLNREDLLRKQRTFDNGSIPHQIHLGELHAILRRQEDFYPFLKDNREKIEKILTFRIPYYVGPLARGNSRFAWMTRKSEETITPWNFEEVVDKGASAQSFIERMTNFDKNLPNEKVLPKHSLLYEYFTVYNELTKVKYVTEGMRKPAFLSGEQKKAIVDLLFKTNRKVTVKQLKEDYFKKIECFDSVEISGVEDRFNASLGTYHDLLKIIKDKDFLDNEENEDILEDIVLTLTLFEDREMIEERLKTYAHLFDDKVMKQLKRRRYTGWGRLSRKLINGIRDKQSGKTILDFLKSDGFANRNFMQLIHDDSLTFKEDIQKAQVSGQGDSLHEHIANLAGSPAIKKGILQTVKVVDELVKVMGRHKPENIVIEMARENQTTQKGQKNSRERMKRIEEGIKELGSQILKEHPVENTQLQNEKLYLYYLQNGRDMYVDQELDINRLSDYDVDHIVPQSFLKDDSIDNKVLTRSDKARGKSDNVPSEEVVKKMKNYWRQLLNAKLITQRKFDNLTKAERGGLSELDKAGFIKRQLVETRQITKHVAQILDSRMNTKYDENDKLIREVKVITLKSKLVSDFRKDFQFYKVREINNYHHAHDAYLNAVVGTALIKKYPKLESEFVYGDYKVYDVRKMIAKSEQEIGKATAKYFFYSNIMNFFKTEITLANGEIRKRPLIETNGETGEIVWDKGRDFATVRKVLSMPQVNIVKKTEVQTGGFSKESILPKRNSDKLIARKKDWDPKKYGGFDSPTVAYSVLVVAKVEKGKSKKLKSVKELLGITIMERSSFEKNPIDFLEAKGYKEVKKDLIIKLPKYSLFELENGRKRMLASAGELQKGNELALPSKYVNFLYLASHYEKLKGSPEDNEQKQLFVEQHKHYLDEIIEQISEFSKRVILADANLDKVLSAYNKHRDKPIREQAENIIHLFTLTNLGAPAAFKYFDTTIDRKRYTSTKEVLDATLIHQSITGLYETRIDLSQLGGDGGGSSGSSGSSGSSGSSGSSGGVPWILKKPLELTIKLDLEEQQGTLLNNSILSKKGKEELKQLFEKYSALWQSWENQVGHRRIRPHKIATGTVKPTPQKQYHINPKAKPDIQIVINDLLKQGVLIQKESTMNTPVYPVPKPNGRWRMVLDYRAVNKVTPLIAVQNQHSYGILGSLFKGRYKTTIDLSNGFWAHPIVPEDYWITAFTWQGKQYCWTVLPQGFLNSPGLFNGDVVDLLQGIPNVEVYVDDVYISHDSEKEHLEYLDILFNRLKEAGYIISLKKSNIANSIVDFLGFQITNEGRGLTDTFKEKLENITAPTTLKQLQSILGLLNFARNFIPDFTELIAPLYALIPKSPKNYVPWQIEHSTTLETLITKLNGAEYLQGRKGDKTLIMKVNASYTTGYIRYYNEGEKKPISYVSIVFSKTELKFTELEKLLTTVHKGLLKALDLSMGQNIHVYSPIVSMQNIQKTPQTAKKALASRWLSWLSYLEDPRIRFFYDPQMPALKDLPAVDTGKDNKKHPSNFQHIFYTDGSAITSPTKEGHLNAGMGIVYFINKDGNLQKQQEWSISLGNHTAQFAEIAAFEFALKKCLPLGGNILVVTDSNYVAKAYNEELDVWASNGFVNNRKKPLKHISKWKSVADLKRLRPDVVVTHEPGHQKLDSSPHAYGNNLADQLATQASFKVHAGKRTADGSEFEKRTADGSEFESPKKKAKVE

SEQ ID NO: 1096 - protein, 2087 aa, synthetic construct
MPAAKRVKLDGGDKKYSIGLDIGTNSVGWAVITDEYKVPSKKFKVLGNTDRHSIKKNLIGALLFDSGETAEATRLKRTARRRYTRRKNRICYLQEIFSNEMAKVDDSFFHRLEESFLVEEDKKHERHPIFGNIVDEVAYHEKYPTIYHLRKKLVDSTDKADLRLIYLALAHMIKFRGHFLIEGDLNPDNSDVDKLFIQLVQTYNQLFEENPINASGVDAKAILSARLSKSRRLENLIAQLPGEKKNGLFGNLIALSLGLTPNFKSNFDLAEDAKLQLSKDTYDDDLDNLLAQIGDQYADLFLAAKNLSDAILLSDILRVNTEITKAPLSASMIKRYDEHHQDLTLLKALVRQQLPEKYKEIFFDQSKNGYAGYIDGGASQEEFYKFIKPILEKMDGTEELLVKLNREDLLRKQRTFDNGSIPHQIHLGELHAILRRQEDFYPFLKDNREKIEKILTFRIPYYVGPLARGNSRFAWMTRKSEETITPWNFEEVVDKGASAQSFIERMTNFDKNLPNEKVLPKHSLLYEYFTVYNELTKVKYVTEGMRKPAFLSGEQKKAIVDLLFKTNRKVTVKQLKEDYFKKIECFDSVEISGVEDRFNASLGTYHDLLKIIKDKDFLDNEENEDILEDIVLTLTLFEDREMIEERLKTYAHLFDDKVMKQLKRRRYTGWGRLSRKLINGIRDKQSGKTILDFLKSDGFANRNFMQLIHDDSLTFKEDIQKAQVSGQGDSLHEHIANLAGSPAIKKGILQTVKVVDELVKVMGRHKPENIVIEMARENQTTQKGQKNSRERMKRIEEGIKELGSQILKEHPVENTQLQNEKLYLYYLQNGRDMYVDQELDINRLSDYDVDHIVPQSFLKDDSIDNKVLTRSDKARGKSDNVPSEEVVKKMKNYWRQLLNAKLITQRKFDNLTKAERGGLSELDKAGFIKRQLVETRQITKHVAQILDSRMNTKYDENDKLIREVKVITLKSKLVSDFRKDFQFYKVREINNYHHAHDAYLNAVVGTALIKKYPKLESEFVYGDYKVYDVRKMIAKSEQEIGKATAKYFFYSNIMNFFKTEITLANGEIRKRPLIETNGETGEIVWDKGRDFATVRKVLSMPQVNIVKKTEVQTGGFSKESILPKRNSDKLIARKKDWDPKKYGGFDSPTVAYSVLVVAKVEKGKSKKLKSVKELLGITIMERSSFEKNPIDFLEAKGYKEVKKDLIIKLPKYSLFELENGRKRMLASAGELQKGNELALPSKYVNFLYLASHYEKLKGSPEDNEQKQLFVEQHKHYLDEIIEQISEFSKRVILADANLDKVLSAYNKHRDKPIREQAENIIHLFTLTNLGAPAAFKYFDTTIDRKRYTSTKEVLDATLIHQSITGLYETRIDLSQLGGDGGPAPGGGEAAAKGGVPWILKKPLELTIKLDLEEQQGTLLNNSILSKKGKEELKQLFEKYSALWQSWENQVGHRRIRPHKIATGTVKPTPQKQYHINPKAKPDIQIVINDLLKQGVLIQKESTMNTPVYPVPKPNGRWRMVLDYRAVNKVTPLIAVQNQHSYGILGSLFKGRYKTTIDLSNGFWAHPIVPEDYWITAFTWQGKQYCWTVLPQGFLNSPGLFNGDVVDLLQGIPNVEVYVDDVYISHDSEKEHLEYLDILFNRLKEAGYIISLKKSNIANSIVDFLGFQITNEGRGLTDTFKEKLENITAPTTLKQLQSILGLLNFARNFIPDFTELIAPLYALIPKSPKNYVPWQIEHSTTLETLITKLNGAEYLQGRKGDKTLIMKVNASYTTGYIRYYNEGEKKPISYVSIVFSKTELKFTELEKLLTTVHKGLLKALDLSMGQNIHVYSPIVSMQNIQKTPQTAKKALASRWLSWLSYLEDPRIRFFYDPQMPALKDLPAVDTGKDNKKHPSNFQHIFYTDGSAITSPTKEGHLNAGMGIVYFINKDGNLQKQQEWSISLGNHTAQFAEIAAFEFALKKCLPLGGNILVVTDSNYVAKAYNEELDVWASNGFVNNRKKPLKHISKWKSVADLKRLRPDVVVTHEPGHQKLDSSPHAYGNNLADQLATQASFKVHAGKRTADGSEFEKRTADGSEFESPKKKAKVE

SEQ ID NO: 1097 - protein, 2087 aa, synthetic construct
MPAAKRVKLDGGDKKYSIGLDIGTNSVGWAVITDEYKVPSKKFKVLGNTDRHSIKKNLIGALLFDSGETAEATRLKRTARRRYTRRKNRICYLQEIFSNEMAKVDDSFFHRLEESFLVEEDKKHERHPIFGNIVDEVAYHEKYPTIYHLRKKLVDSTDKADLRLIYLALAHMIKFRGHFLIEGDLNPDNSDVDKLFIQLVQTYNQLFEENPINASGVDAKAILSARLSKSRRLENLIAQLPGEKKNGLFGNLIALSLGLTPNFKSNFDLAEDAKLQLSKDTYDDDLDNLLAQIGDQYADLFLAAKNLSDAILLSDILRVNTEITKAPLSASMIKRYDEHHQDLTLLKALVRQQLPEKYKEIFFDQSKNGYAGYIDGGASQEEFYKFIKPILEKMDGTEELLVKLNREDLLRKQRTFDNGSIPHQIHLGELHAILRRQEDFYPFLKDNREKIEKILTFRIPYYVGPLARGNSRFAWMTRKSEETITPWNFEEVVDKGASAQSFIERMTNFDKNLPNEKVLPKHSLLYEYFTVYNELTKVKYVTEGMRKPAFLSGEQKKAIVDLLFKTNRKVTVKQLKEDYFKKIECFDSVEISGVEDRFNASLGTYHDLLKIIKDKDFLDNEENEDILEDIVLTLTLFEDREMIEERLKTYAHLFDDKVMKQLKRRRYTGWGRLSRKLINGIRDKQSGKTILDFLKSDGFANRNFMQLIHDDSLTFKEDIQKAQVSGQGDSLHEHIANLAGSPAIKKGILQTVKVVDELVKVMGRHKPENIVIEMARENQTTQKGQKNSRERMKRIEEGIKELGSQILKEHPVENTQLQNEKLYLYYLQNGRDMYVDQELDINRLSDYDVDHIVPQSFLKDDSIDNKVLTRSDKARGKSDNVPSEEVVKKMKNYWRQLLNAKLITQRKFDNLTKAERGGLSELDKAGFIKRQLVETRQITKHVAQILDSRMNTKYDENDKLIREVKVITLKSKLVSDFRKDFQFYKVREINNYHHAHDAYLNAVVGTALIKKYPKLESEFVYGDYKVYDVRKMIAKSEQEIGKATAKYFFYSNIMNFFKTEITLANGEIRKRPLIETNGETGEIVWDKGRDFATVRKVLSMPQVNIVKKTEVQTGGFSKESILPKRNSDKLIARKKDWDPKKYGGFDSPTVAYSVLVVAKVEKGKSKKLKSVKELLGITIMERSSFEKNPIDFLEAKGYKEVKKDLIIKLPKYSLFELENGRKRMLASAGELQKGNELALPSKYVNFLYLASHYEKLKGSPEDNEQKQLFVEQHKHYLDEIIEQISEFSKRVILADANLDKVLSAYNKHRDKPIREQAENIIHLFTLTNLGAPAAFKYFDTTIDRKRYTSTKEVLDATLIHQSITGLYETRIDLSQLGGDGGGGSEAAAKPAPGGVPWILKKPLELTIKLDLEEQQGTLLNNSILSKKGKEELKQLFEKYSALWQSWENQVGHRRIRPHKIATGTVKPTPQKQYHINPKAKPDIQIVINDLLKQGVLIQKESTMNTPVYPVPKPNGRWRMVLDYRAVNKVTPLIAVQNQHSYGILGSLFKGRYKTTIDLSNGFWAHPIVPEDYWITAFTWQGKQYCWTVLPQGFLNSPGLFNGDVVDLLQGIPNVEVYVDDVYISHDSEKEHLEYLDILFNRLKEAGYIISLKKSNIANSIVDFLGFQITNEGRGLTDTFKEKLENITAPTTLKQLQSILGLLNFARNFIPDFTELIAPLYALIPKSPKNYVPWQIEHSTTLETLITKLNGAEYLQGRKGDKTLIMKVNASYTTGYIRYYNEGEKKPISYVSIVFSKTELKFTELEKLLTTVHKGLLKALDLSMGQNIHVYSPIVSMQNIQKTPQTAKKALASRWLSWLSYLEDPRIRFFYDPQMPALKDLPAVDTGKDNKKHPSNFQHIFYTDGSAITSPTKEGHLNAGMGIVYFINKDGNLQKQQEWSISLGNHTAQFAEIAAFEFALKKCLPLGGNILVVTDSNYVAKAYNEELDVWASNGFVNNRKKPLKHISKWKSVADLKRLRPDVVVTHEPGHQKLDSSPHAYGNNLADQLATQASFKVHAGKRTADGSEFEKRTADGSEFESPKKKAKVE

SEQ ID NO: 1098 - protein, 2085 aa, synthetic construct
MPAAKRVKLDGGDKKYSIGLDIGTNSVGWAVITDEYKVPSKKFKVLGNTDRHSIKKNLIGALLFDSGETAEATRLKRTARRRYTRRKNRICYLQEIFSNEMAKVDDSFFHRLEESFLVEEDKKHERHPIFGNIVDEVAYHEKYPTIYHLRKKLVDSTDKADLRLIYLALAHMIKFRGHFLIEGDLNPDNSDVDKLFIQLVQTYNQLFEENPINASGVDAKAILSARLSKSRRLENLIAQLPGEKKNGLFGNLIALSLGLTPNFKSNFDLAEDAKLQLSKDTYDDDLDNLLAQIGDQYADLFLAAKNLSDAILLSDILRVNTEITKAPLSASMIKRYDEHHQDLTLLKALVRQQLPEKYKEIFFDQSKNGYAGYIDGGASQEEFYKFIKPILEKMDGTEELLVKLNREDLLRKQRTFDNGSIPHQIHLGELHAILRRQEDFYPFLKDNREKIEKILTFRIPYYVGPLARGNSRFAWMTRKSEETITPWNFEEVVDKGASAQSFIERMTNFDKNLPNEKVLPKHSLLYEYFTVYNELTKVKYVTEGMRKPAFLSGEQKKAIVDLLFKTNRKVTVKQLKEDYFKKIECFDSVEISGVEDRFNASLGTYHDLLKIIKDKDFLDNEENEDILEDIVLTLTLFEDREMIEERLKTYAHLFDDKVMKQLKRRRYTGWGRLSRKLINGIRDKQSGKTILDFLKSDGFANRNFMQLIHDDSLTFKEDIQKAQVSGQGDSLHEHIANLAGSPAIKKGILQTVKVVDELVKVMGRHKPENIVIEMARENQTTQKGQKNSRERMKRIEEGIKELGSQILKEHPVENTQLQNEKLYLYYLQNGRDMYVDQELDINRLSDYDVDHIVPQSFLKDDSIDNKVLTRSDKARGKSDNVPSEEVVKKMKNYWRQLLNAKLITQRKFDNLTKAERGGLSELDKAGFIKRQLVETRQITKHVAQILDSRMNTKYDENDKLIREVKVITLKSKLVSDFRKDFQFYKVREINNYHHAHDAYLNAVVGTALIKKYPKLESEFVYGDYKVYDVRKMIAKSEQEIGKATAKYFFYSNIMNFFKTEITLANGEIRKRPLIETNGETGEIVWDKGRDFATVRKVLSMPQVNIVKKTEVQTGGFSKESILPKRNSDKLIARKKDWDPKKYGGFDSPTVAYSVLVVAKVEKGKSKKLKSVKELLGITIMERSSFEKNPIDFLEAKGYKEVKKDLIIKLPKYSLFELENGRKRMLASAGELQKGNELALPSKYVNFLYLASHYEKLKGSPEDNEQKQLFVEQHKHYLDEIIEQISEFSKRVILADANLDKVLSAYNKHRDKPIREQAENIIHLFTLTNLGAPAAFKYFDTTIDRKRYTSTKEVLDATLIHQSITGLYETRIDLSQLGGDGGPAPGGSGGGGGVPWILKKPLELTIKLDLEEQQGTLLNNSILSKKGKEELKQLFEKYSALWQSWENQVGHRRIRPHKIATGTVKPTPQKQYHINPKAKPDIQIVINDLLKQGVLIQKESTMNTPVYPVPKPNGRWRMVLDYRAVNKVTPLIAVQNQHSYGILGSLFKGRYKTTIDLSNGFWAHPIVPEDYWITAFTWQGKQYCWTVLPQGFLNSPGLFNGDVVDLLQGIPNVEVYVDDVYISHDSEKEHLEYLDILFNRLKEAGYIISLKKSNIANSIVDFLGFQITNEGRGLTDTFKEKLENITAPTTLKQLQSILGLLNFARNFIPDFTELIAPLYALIPKSPKNYVPWQIEHSTTLETLITKLNGAEYLQGRKGDKTLIMKVNASYTTGYIRYYNEGEKKPISYVSIVFSKTELKFTELEKLLTTVHKGLLKALDLSMGQNIHVYSPIVSMQNIQKTPQTAKKALASRWLSWLSYLEDPRIRFFYDPQMPALKDLPAVDTGKDNKKHPSNFQHIFYTDGSAITSPTKEGHLNAGMGIVYFINKDGNLQKQQEWSISLGNHTAQFAEIAAFEFALKKCLPLGGNILVVTDSNYVAKAYNEELDVWASNGFVNNRKKPLKHISKWKSVADLKRLRPDVVVTHEPGHQKLDSSPHAYGNNLADQLATQASFKVHAGKRTADGSEFEKRTADGSEFESPKKKAKVE

SEQ ID NO: 1099 - protein, 2087 aa, synthetic construct
MPAAKRVKLDGGDKKYSIGLDIGTNSVGWAVITDEYKVPSKKFKVLGNTDRHSIKKNLIGALLFDSGETAEATRLKRTARRRYTRRKNRICYLQEIFSNEMAKVDDSFFHRLEESFLVEEDKKHERHPIFGNIVDEVAYHEKYPTIYHLRKKLVDSTDKADLRLIYLALAHMIKFRGHFLIEGDLNPDNSDVDKLFIQLVQTYNQLFEENPINASGVDAKAILSARLSKSRRLENLIAQLPGEKKNGLFGNLIALSLGLTPNFKSNFDLAEDAKLQLSKDTYDDDLDNLLAQIGDQYADLFLAAKNLSDAILLSDILRVNTEITKAPLSASMIKRYDEHHQDLTLLKALVRQQLPEKYKEIFFDQSKNGYAGYIDGGASQEEFYKFIKPILEKMDGTEELLVKLNREDLLRKQRTFDNGSIPHQIHLGELHAILRRQEDFYPFLKDNREKIEKILTFRIPYYVGPLARGNSRFAWMTRKSEETITPWNFEEVVDKGASAQSFIERMTNFDKNLPNEKVLPKHSLLYEYFTVYNELTKVKYVTEGMRKPAFLSGEQKKAIVDLLFKTNRKVTVKQLKEDYFKKIECFDSVEISGVEDRFNASLGTYHDLLKIIKDKDFLDNEENEDILEDIVLTLTLFEDREMIEERLKTYAHLFDDKVMKQLKRRRYTGWGRLSRKLINGIRDKQSGKTILDFLKSDGFANRNFMQLIHDDSLTFKEDIQKAQVSGQGDSLHEHIANLAGSPAIKKGILQTVKVVDELVKVMGRHKPENIVIEMARENQTTQKGQKNSRERMKRIEEGIKELGSQILKEHPVENTQLQNEKLYLYYLQNGRDMYVDQELDINRLSDYDVDHIVPQSFLKDDSIDNKVLTRSDKARGKSDNVPSEEVVKKMKNYWRQLLNAKLITQRKFDNLTKAERGGLSELDKAGFIKRQLVETRQITKHVAQILDSRMNTKYDENDKLIREVKVITLKSKLVSDFRKDFQFYKVREINNYHHAHDAYLNAVVGTALIKKYPKLESEFVYGDYKVYDVRKMIAKSEQEIGKATAKYFFYSNIMNFFKTEITLANGEIRKRPLIETNGETGEIVWDKGRDFATVRKVLSMPQVNIVKKTEVQTGGFSKESILPKRNSDKLIARKKDWDPKKYGGFDSPTVAYSVLVVAKVEKGKSKKLKSVKELLGITIMERSSFEKNPIDFLEAKGYKEVKKDLIIKLPKYSLFELENGRKRMLASAGELQKGNELALPSKYVNFLYLASHYEKLKGSPEDNEQKQLFVEQHKHYLDEIIEQISEFSKRVILADANLDKVLSAYNKHRDKPIREQAENIIHLFTLTNLGAPAAFKYFDTTIDRKRYTSTKEVLDATLIHQSITGLYETRIDLSQLGGDGGGGSPAPEAAAKGGVPWILKKPLELTIKLDLEEQQGTLLNNSILSKKGKEELKQLFEKYSALWQSWENQVGHRRIRPHKIATGTVKPTPQKQYHINPKAKPDIQIVINDLLKQGVLIQKESTMNTPVYPVPKPNGRWRMVLDYRAVNKVTPLIAVQNQHSYGILGSLFKGRYKTTIDLSNGFWAHPIVPEDYWITAFTWQGKQYCWTVLPQGFLNSPGLFNGDVVDLLQGIPNVEVYVDDVYISHDSEKEHLEYLDILFNRLKEAGYIISLKKSNIANSIVDFLGFQITNEGRGLTDTFKEKLENITAPTTLKQLQSILGLLNFARNFIPDFTELIAPLYALIPKSPKNYVPWQIEHSTTLETLITKLNGAEYLQGRKGDKTLIMKVNASYTTGYIRYYNEGEKKPISYVSIVFSKTELKFTELEKLLTTVHKGLLKALDLSMGQNIHVYSPIVSMQNIQKTPQTAKKALASRWLSWLSYLEDPRIRFFYDPQMPALKDLPAVDTGKDNKKHPSNFQHIFYTDGSAITSPTKEGHLNAGMGIVYFINKDGNLQKQQEWSISLGNHTAQFAEIAAFEFALKKCLPLGGNILVVTDSNYVAKAYNEELDVWASNGFVNNRKKPLKHISKWKSVADLKRLRPDVVVTHEPGHQKLDSSPHAYGNNLADQLATQASFKVHAGKRTADGSEFEKRTADGSEFESPKKKAKVE

SEQ ID NO: 1100 - protein, 2087 aa, synthetic construct
MPAAKRVKLDGGDKKYSIGLDIGTNSVGWAVITDEYKVPSKKFKVLGNTDRHSIKKNLIGALLFDSGETAEATRLKRTARRRYTRRKNRICYLQEIFSNEMAKVDDSFFHRLEESFLVEEDKKHERHPIFGNIVDEVAYHEKYPTIYHLRKKLVDSTDKADLRLIYLALAHMIKFRGHFLIEGDLNPDNSDVDKLFIQLVQTYNQLFEENPINASGVDAKAILSARLSKSRRLENLIAQLPGEKKNGLFGNLIALSLGLTPNFKSNFDLAEDAKLQLSKDTYDDDLDNLLAQIGDQYADLFLAAKNLSDAILLSDILRVNTEITKAPLSASMIKRYDEHHQDLTLLKALVRQQLPEKYKEIFFDQSKNGYAGYIDGGASQEEFYKFIKPILEKMDGTEELLVKLNREDLLRKQRTFDNGSIPHQIHLGELHAILRRQEDFYPFLKDNREKIEKILTFRIPYYVGPLARGNSRFAWMTRKSEETITPWNFEEVVDKGASAQSFIERMTNFDKNLPNEKVLPKHSLLYEYFTVYNELTKVKYVTEGMRKPAFLSGEQKKAIVDLLFKTNRKVTVKQLKEDYFKKIECFDSVEISGVEDRFNASLGTYHDLLKIIKDKDFLDNEENEDILEDIVLTLTLFEDREMIEERLKTYAHLFDDKVMKQLKRRRYTGWGRLSRKLINGIRDKQSGKTILDFLKSDGFANRNFMQLIHDDSLTFKEDIQKAQVSGQGDSLHEHIANLAGSPAIKKGILQTVKVVDELVKVMGRHKPENIVIEMARENQTTQKGQKNSRERMKRIEEGIKELGSQILKEHPVENTQLQNEKLYLYYLQNGRDMYVDQELDINRLSDYDVDHIVPQSFLKDDSIDNKVLTRSDKARGKSDNVPSEEVVKKMKNYWRQLLNAKLITQRKFDNLTKAERGGLSELDKAGFIKRQLVETRQITKHVAQILDSRMNTKYDENDKLIREVKVITLKSKLVSDFRKDFQFYKVREINNYHHAHDAYLNAVVGTALIKKYPKLESEFVYGDYKVYDVRKMIAKSEQEIGKATAKYFFYSNIMNFFKTEITLANGEIRKRPLIETNGETGEIVWDKGRDFATVRKVLSMPQVNIVKKTEVQTGGFSKESILPKRNSDKLIARKKDWDPKKYGGFDSPTVAYSVLVVAKVEKGKSKKLKSVKELLGITIMERSSFEKNPIDFLEAKGYKEVKKDLIIKLPKYSLFELENGRKRMLASAGELQKGNELALPSKYVNFLYLASHYEKLKGSPEDNEQKQLFVEQHKHYLDEIIEQISEFSKRVILADANLDKVLSAYNKHRDKPIREQAENIIHLFTLTNLGAPAAFKYFDTTIDRKRYTSTKEVLDATLIHQSITGLYETRIDLSQLGGDGGGSSEAAAKGGGGGVPWILKKPLELTIKLDLEEQQGTLLNNSILSKKGKEELKQLFEKYSALWQSWENQVGHRRIRPHKIATGTVKPTPQKQYHINPKAKPDIQIVINDLLKQGVLIQKESTMNTPVYPVPKPNGRWRMVLDYRAVNKVTPLIAVQNQHSYGILGSLFKGRYKTTIDLSNGFWAHPIVPEDYWITAFTWQGKQYCWTVLPQGFLNSPGLFNGDVVDLLQGIPNVEVYVDDVYISHDSEKEHLEYLDILFNRLKEAGYIISLKKSNIANSIVDFLGFQITNEGRGLTDTFKEKLENITAPTTLKQLQSILGLLNFARNFIPDFTELIAPLYALIPKSPKNYVPWQIEHSTTLETLITKLNGAEYLQGRKGDKTLIMKVNASYTTGYIRYYNEGEKKPISYVSIVFSKTELKFTELEKLLTTVHKGLLKALDLSMGQNIHVYSPIVSMQNIQKTPQTAKKALASRWLSWLSYLEDPRIRFFYDPQMPALKDLPAVDTGKDNKKHPSNFQHIFYTDGSAITSPTKEGHLNAGMGIVYFINKDGNLQKQQEWSISLGNHTAQFAEIAAFEFALKKCLPLGGNILVVTDSNYVAKAYNEELDVWASNGFVNNRKKPLKHISKWKSVADLKRLRPDVVVTHEPGHQKLDSSPHAYGNNLADQLATQASFKVHAGKRTADGSEFEKRTADGSEFESPKKKAKVE

SEQ ID NO: 1101 - protein, 2091 aa, synthetic construct
MPAAKRVKLDGGDKKYSIGLDIGTNSVGWAVITDEYKVPSKKFKVLGNTDRHSIKKNLIGALLFDSGETAEATRLKRTARRRYTRRKNRICYLQEIFSNEMAKVDDSFFHRLEESFLVEEDKKHERHPIFGNIVDEVAYHEKYPTIYHLRKKLVDSTDKADLRLIYLALAHMIKFRGHFLIEGDLNPDNSDVDKLFIQLVQTYNQLFEENPINASGVDAKAILSARLSKSRRLENLIAQLPGEKKNGLFGNLIALSLGLTPNFKSNFDLAEDAKLQLSKDTYDDDLDNLLAQIGDQYADLFLAAKNLSDAILLSDILRVNTEITKAPLSASMIKRYDEHHQDLTLLKALVRQQLPEKYKEIFFDQSKNGYAGYIDGGASQEEFYKFIKPILEKMDGTEELLVKLNREDLLRKQRTFDNGSIPHQIHLGELHAILRRQEDFYPFLKDNREKIEKILTFRIPYYVGPLARGNSRFAWMTRKSEETITPWNFEEVVDKGASAQSFIERMTNFDKNLPNEKVLPKHSLLYEYFTVYNELTKVKYVTEGMRKPAFLSGEQKKAIVDLLFKTNRKVTVKQLKEDYFKKIECFDSVEISGVEDRFNASLGTYHDLLKIIKDKDFLDNEENEDILEDIVLTLTLFEDREMIEERLKTYAHLFDDKVMKQLKRRRYTGWGRLSRKLINGIRDKQSGKTILDFLKSDGFANRNFMQLIHDDSLTFKEDIQKAQVSGQGDSLHEHIANLAGSPAIKKGILQTVKVVDELVKVMGRHKPENIVIEMARENQTTQKGQKNSRERMKRIEEGIKELGSQILKEHPVENTQLQNEKLYLYYLQNGRDMYVDQELDINRLSDYDVDHIVPQSFLKDDSIDNKVLTRSDKARGKSDNVPSEEVVKKMKNYWRQLLNAKLITQRKFDNLTKAERGGLSELDKAGFIKRQLVETRQITKHVAQILDSRMNTKYDENDKLIREVKVITLKSKLVSDFRKDFQFYKVREINNYHHAHDAYLNAVVGTALIKKYPKLESEFVYGDYKVYDVRKMIAKSEQEIGKATAKYFFYSNIMNFFKTEITLANGEIRKRPLIETNGETGEIVWDKGRDFATVRKVLSMPQVNIVKKTEVQTGGFSKESILPKRNSDKLIARKKDWDPKKYGGFDSPTVAYSVLVVAKVEKGKSKKLKSVKELLGITIMERSSFEKNPIDFLEAKGYKEVKKDLIIKLPKYSLFELENGRKRMLASAGELQKGNELALPSKYVNFLYLASHYEKLKGSPEDNEQKQLFVEQHKHYLDEIIEQISEFSKRVILADANLDKVLSAYNKHRDKPIREQAENIIHLFTLTNLGAPAAFKYFDTTIDRKRYTSTKEVLDATLIHQSITGLYETRIDLSQLGGDGGGSSGSSGSSGSSGSSGGVPWILKKPLELTIKLDLEEQQGTLLNNSILSKKGKEELKQLFEKYSALWQSWENQVGHRRIRPHKIATGTVKPTPQKQYHINPKAKPDIQIVINDLLKQGVLIQKESTMNTPVYPVPKPNGRWRMVLDYRAVNKVTPLIAVQNQHSYGILGSLFKGRYKTTIDLSNGFWAHPIVPEDYWITAFTWQGKQYCWTVLPQGFLNSPGLFNGDVVDLLQGIPNVEVYVDDVYISHDSEKEHLEYLDILFNRLKEAGYIISLKKSNIANSIVDFLGFQITNEGRGLTDTFKEKLENITAPTTLKQLQSILGLLNFARNFIPDFTELIAPLYALIPKSPKNYVPWQIEHSTTLETLITKLNGAEYLQGRKGDKTLIMKVNASYTTGYIRYYNEGEKKPISYVSIVFSKTELKFTELEKLLTTVHKGLLKALDLSMGQNIHVYSPIVSMQNIQKTPQTAKKALASRWLSWLSYLEDPRIRFFYDPQMPALKDLPAVDTGKDNKKHPSNFQHIFYTDGSAITSPTKEGHLNAGMGIVYFINKDGNLQKQQEWSISLGNHTAQFAEIAAFEFALKKCLPLGGNILVVTDSNYVAKAYNEELDVWASNGFVNNRKKPLKHISKWKSVADLKRLRPDVVVTHEPGHQKLDSSPHAYGNNLADQLATQASFKVHAGKRTADGSEFEKRTADGSEFESPKKKAKVE

SEQ ID NO: 1102 - protein, 2081 aa, synthetic construct
MPAAKRVKLDGGDKKYSIGLDIGTNSVGWAVITDEYKVPSKKFKVLGNTDRHSIKKNLIGALLFDSGETAEATRLKRTARRRYTRRKNRICYLQEIFSNEMAKVDDSFFHRLEESFLVEEDKKHERHPIFGNIVDEVAYHEKYPTIYHLRKKLVDSTDKADLRLIYLALAHMIKFRGHFLIEGDLNPDNSDVDKLFIQLVQTYNQLFEENPINASGVDAKAILSARLSKSRRLENLIAQLPGEKKNGLFGNLIALSLGLTPNFKSNFDLAEDAKLQLSKDTYDDDLDNLLAQIGDQYADLFLAAKNLSDAILLSDILRVNTEITKAPLSASMIKRYDEHHQDLTLLKALVRQQLPEKYKEIFFDQSKNGYAGYIDGGASQEEFYKFIKPILEKMDGTEELLVKLNREDLLRKQRTFDNGSIPHQIHLGELHAILRRQEDFYPFLKDNREKIEKILTFRIPYYVGPLARGNSRFAWMTRKSEETITPWNFEEVVDKGASAQSFIERMTNFDKNLPNEKVLPKHSLLYEYFTVYNELTKVKYVTEGMRKPAFLSGEQKKAIVDLLFKTNRKVTVKQLKEDYFKKIECFDSVEISGVEDRFNASLGTYHDLLKIIKDKDFLDNEENEDILEDIVLTLTLFEDREMIEERLKTYAHLFDDKVMKQLKRRRYTGWGRLSRKLINGIRDKQSGKTILDFLKSDGFANRNFMQLIHDDSLTFKEDIQKAQVSGQGDSLHEHIANLAGSPAIKKGILQTVKVVDELVKVMGRHKPENIVIEMARENQTTQKGQKNSRERMKRIEEGIKELGSQILKEHPVENTQLQNEKLYLYYLQNGRDMYVDQELDINRLSDYDVDHIVPQSFLKDDSIDNKVLTRSDKARGKSDNVPSEEVVKKMKNYWRQLLNAKLITQRKFDNLTKAERGGLSELDKAGFIKRQLVETRQITKHVAQILDSRMNTKYDENDKLIREVKVITLKSKLVSDFRKDFQFYKVREINNYHHAHDAYLNAVVGTALIKKYPKLESEFVYGDYKVYDVRKMIAKSEQEIGKATAKYFFYSNIMNFFKTEITLANGEIRKRPLIETNGETGEIVWDKGRDFATVRKVLSMPQVNIVKKTEVQTGGFSKESILPKRNSDKLIARKKDWDPKKYGGFDSPTVAYSVLVVAKVEKGKSKKLKSVKELLGITIMERSSFEKNPIDFLEAKGYKEVKKDLIIKLPKYSLFELENGRKRMLASAGELQKGNELALPSKYVNFLYLASHYEKLKGSPEDNEQKQLFVEQHKHYLDEIIEQISEFSKRVILADANLDKVLSAYNKHRDKPIREQAENIIHLFTLTNLGAPAAFKYFDTTIDRKRYTSTKEVLDATLIHQSITGLYETRIDLSQLGGDGGPAPAPGGVPWILKKPLELTIKLDLEEQQGTLLNNSILSKKGKEELKQLFEKYSALWQSWENQVGHRRIRPHKIATGTVKPTPQKQYHINPKAKPDIQIVINDLLKQGVLIQKESTMNTPVYPVPKPNGRWRMVLDYRAVNKVTPLIAVQNQHSYGILGSLFKGRYKTTIDLSNGFWAHPIVPEDYWITAFTWQGKQYCWTVLPQGFLNSPGLFNGDVVDLLQGIPNVEVYVDDVYISHDSEKEHLEYLDILFNRLKEAGYIISLKKSNIANSIVDFLGFQITNEGRGLTDTFKEKLENITAPTTLKQLQSILGLLNFARNFIPDFTELIAPLYALIPKSPKNYVPWQIEHSTTLETLITKLNGAEYLQGRKGDKTLIMKVNASYTTGYIRYYNEGEKKPISYVSIVFSKTELKFTELEKLLTTVHKGLLKALDLSMGQNIHVYSPIVSMQNIQKTPQTAKKALASRWLSWLSYLEDPRIRFFYDPQMPALKDLPAVDTGKDNKKHPSNFQHIFYTDGSAITSPTKEGHLNAGMGIVYFINKDGNLQKQQEWSISLGNHTAQFAEIAAFEFALKKCLPLGGNILVVTDSNYVAKAYNEELDVWASNGFVNNRKKPLKHISKWKSVADLKRLRPDVVVTHEPGHQKLDSSPHAYGNNLADQLATQASFKVHAGKRTADGSEFEKRTADGSEFESPKKKAKVE

SEQ ID NO: 1103 - protein, 2085 aa, synthetic construct
MPAAKRVKLDGGDKKYSIGLDIGTNSVGWAVITDEYKVPSKKFKVLGNTDRHSIKKNLIGALLFDSGETAEATRLKRTARRRYTRRKNRICYLQEIFSNEMAKVDDSFFHRLEESFLVEEDKKHERHPIFGNIVDEVAYHEKYPTIYHLRKKLVDSTDKADLRLIYLALAHMIKFRGHFLIEGDLNPDNSDVDKLFIQLVQTYNQLFEENPINASGVDAKAILSARLSKSRRLENLIAQLPGEKKNGLFGNLIALSLGLTPNFKSNFDLAEDAKLQLSKDTYDDDLDNLLAQIGDQYADLFLAAKNLSDAILLSDILRVNTEITKAPLSASMIKRYDEHHQDLTLLKALVRQQLPEKYKEIFFDQSKNGYAGYIDGGASQEEFYKFIKPILEKMDGTEELLVKLNREDLLRKQRTFDNGSIPHQIHLGELHAILRRQEDFYPFLKDNREKIEKILTFRIPYYVGPLARGNSRFAWMTRKSEETITPWNFEEVVDKGASAQSFIERMTNFDKNLPNEKVLPKHSLLYEYFTVYNELTKVKYVTEGMRKPAFLSGEQKKAIVDLLFKTNRKVTVKQLKEDYFKKIECFDSVEISGVEDRFNASLGTYHDLLKIIKDKDFLDNEENEDILEDIVLTLTLFEDREMIEERLKTYAHLFDDKVMKQLKRRRYTGWGRLSRKLINGIRDKQSGKTILDFLKSDGFANRNFMQLIHDDSLTFKEDIQKAQVSGQGDSLHEHIANLAGSPAIKKGILQTVKVVDELVKVMGRHKPENIVIEMARENQTTQKGQKNSRERMKRIEEGIKELGSQILKEHPVENTQLQNEKLYLYYLQNGRDMYVDQELDINRLSDYDVDHIVPQSFLKDDSIDNKVLTRSDKARGKSDNVPSEEVVKKMKNYWRQLLNAKLITQRKFDNLTKAERGGLSELDKAGFIKRQLVETRQITKHVAQILDSRMNTKYDENDKLIREVKVITLKSKLVSDFRKDFQFYKVREINNYHHAHDAYLNAVVGTALIKKYPKLESEFVYGDYKVYDVRKMIAKSEQEIGKATAKYFFYSNIMNFFKTEITLANGEIRKRPLIETNGETGEIVWDKGRDFATVRKVLSMPQVNIVKKTEVQTGGFSKESILPKRNSDKLIARKKDWDPKKYGGFDSPTVAYSVLVVAKVEKGKSKKLKSVKELLGITIMERSSFEKNPIDFLEAKGYKEVKKDLIIKLPKYSLFELENGRKRMLASAGELQKGNELALPSKYVNFLYLASHYEKLKGSPEDNEQKQLFVEQHKHYLDEIIEQISEFSKRVILADANLDKVLSAYNKHRDKPIREQAENIIHLFTLTNLGAPAAFKYFDTTIDRKRYTSTKEVLDATLIHQSITGLYETRIDLSQLGGDGGGSSGSSGSSGGVPWILKKPLELTIKLDLEEQQGTLLNNSILSKKGKEELKQLFEKYSALWQSWENQVGHRRIRPHKIATGTVKPTPQKQYHINPKAKPDIQIVINDLLKQGVLIQKESTMNTPVYPVPKPNGRWRMVLDYRAVNKVTPLIAVQNQHSYGILGSLFKGRYKTTIDLSNGFWAHPIVPEDYWITAFTWQGKQYCWTVLPQGFLNSPGLFNGDVVDLLQGIPNVEVYVDDVYISHDSEKEHLEYLDILFNRLKEAGYIISLKKSNIANSIVDFLGFQITNEGRGLTDTFKEKLENITAPTTLKQLQSILGLLNFARNFIPDFTELIAPLYALIPKSPKNYVPWQIEHSTTLETLITKLNGAEYLQGRKGDKTLIMKVNASYTTGYIRYYNEGEKKPISYVSIVFSKTELKFTELEKLLTTVHKGLLKALDLSMGQNIHVYSPIVSMQNIQKTPQTAKKALASRWLSWLSYLEDPRIRFFYDPQMPALKDLPAVDTGKDNKKHPSNFQHIFYTDGSAITSPTKEGHLNAGMGIVYFINKDGNLQKQQEWSISLGNHTAQFAEIAAFEFALKKCLPLGGNILVVTDSNYVAKAYNEELDVWASNGFVNNRKKPLKHISKWKSVADLKRLRPDVVVTHEPGHQKLDSSPHAYGNNLADQLATQASFKVHAGKRTADGSEFEKRTADGSEFESPKKKAKVE

SEQ ID NO: 1104 - protein, 2087 aa, synthetic construct
MPAAKRVKLDGGDKKYSIGLDIGTNSVGWAVITDEYKVPSKKFKVLGNTDRHSIKKNLIGALLFDSGETAEATRLKRTARRRYTRRKNRICYLQEIFSNEMAKVDDSFFHRLEESFLVEEDKKHERHPIFGNIVDEVAYHEKYPTIYHLRKKLVDSTDKADLRLIYLALAHMIKFRGHFLIEGDLNPDNSDVDKLFIQLVQTYNQLFEENPINASGVDAKAILSARLSKSRRLENLIAQLPGEKKNGLFGNLIALSLGLTPNFKSNFDLAEDAKLQLSKDTYDDDLDNLLAQIGDQYADLFLAAKNLSDAILLSDILRVNTEITKAPLSASMIKRYDEHHQDLTLLKALVRQQLPEKYKEIFFDQSKNGYAGYIDGGASQEEFYKFIKPILEKMDGTEELLVKLNREDLLRKQRTFDNGSIPHQIHLGELHAILRRQEDFYPFLKDNREKIEKILTFRIPYYVGPLARGNSRFAWMTRKSEETITPWNFEEVVDKGASAQSFIERMTNFDKNLPNEKVLPKHSLLYEYFTVYNELTKVKYVTEGMRKPAFLSGEQKKAIVDLLFKTNRKVTVKQLKEDYFKKIECFDSVEISGVEDRFNASLGTYHDLLKIIKDKDFLDNEENEDILEDIVLTLTLFEDREMIEERLKTYAHLFDDKVMKQLKRRRYTGWGRLSRKLINGIRDKQSGKTILDFLKSDGFANRNFMQLIHDDSLTFKEDIQKAQVSGQGDSLHEHIANLAGSPAIKKGILQTVKVVDELVKVMGRHKPENIVIEMARENQTTQKGQKNSRERMKRIEEGIKELGSQILKEHPVENTQLQNEKLYLYYLQNGRDMYVDQELDINRLSDYDVDHIVPQSFLKDDSIDNKVLTRSDKARGKSDNVPSEEVVKKMKNYWRQLLNAKLITQRKFDNLTKAERGGLSELDKAGFIKRQLVETRQITKHVAQILDSRMNTKYDENDKLIREVKVITLKSKLVSDFRKDFQFYKVREINNYHHAHDAYLNAVVGTALIKKYPKLESEFVYGDYKVYDVRKMIAKSEQEIGKATAKYFFYSNIMNFFKTEITLANGEIRKRPLIETNGETGEIVWDKGRDFATVRKVLSMPQVNIVKKTEVQTGGFSKESILPKRNSDKLIARKKDWDPKKYGGFDSPTVAYSVLVVAKVEKGKSKKLKSVKELLGITIMERSSFEKNPIDFLEAKGYKEVKKDLIIKLPKYSLFELENGRKRMLASAGELQKGNELALPSKYVNFLYLASHYEKLKGSPEDNEQKQLFVEQHKHYLDEIIEQISEFSKRVILADANLDKVLSAYNKHRDKPIREQAENIIHLFTLTNLGAPAAFKYFDTTIDRKRYTSTKEVLDATLIHQSITGLYETRIDLSQLGGDGGPAPGSSEAAAKGGVPWILKKPLELTIKLDLEEQQGTLLNNSILSKKGKEELKQLFEKYSALWQSWENQVGHRRIRPHKIATGTVKPTPQKQYHINPKAKPDIQIVINDLLKQGVLIQKESTMNTPVYPVPKPNGRWRMVLDYRAVNKVTPLIAVQNQHSYGILGSLFKGRYKTTIDLSNGFWAHPIVPEDYWITAFTWQGKQYCWTVLPQGFLNSPGLFNGDVVDLLQGIPNVEVYVDDVYISHDSEKEHLEYLDILFNRLKEAGYIISLKKSNIANSIVDFLGFQITNEGRGLTDTFKEKLENITAPTTLKQLQSILGLLNFARNFIPDFTELIAPLYALIPKSPKNYVPWQIEHSTTLETLITKLNGAEYLQGRKGDKTLIMKVNASYTTGYIRYYNEGEKKPISYVSIVFSKTELKFTELEKLLTTVHKGLLKALDLSMGQNIHVYSPIVSMQNIQKTPQTAKKALASRWLSWLSYLEDPRIRFFYDPQMPALKDLPAVDTGKDNKKHPSNFQHIFYTDGSAITSPTKEGHLNAGMGIVYFINKDGNLQKQQEWSISLGNHTAQFAEIAAFEFALKKCLPLGGNILVVTDSNYVAKAYNEELDVWASNGFVNNRKKPLKHISKWKSVADLKRLRPDVVVTHEPGHQKLDSSPHAYGNNLADQLATQASFKVHAGKRTADGSEFEKRTADGSEFESPKKKAKVE

SEQ ID NO: 1105 - protein, 2087 aa, synthetic construct
MPAAKRVKLDGGDKKYSIGLDIGTNSVGWAVITDEYKVPSKKFKVLGNTDRHSIKKNLIGALLFDSGETAEATRLKRTARRRYTRRKNRICYLQEIFSNEMAKVDDSFFHRLEESFLVEEDKKHERHPIFGNIVDEVAYHEKYPTIYHLRKKLVDSTDKADLRLIYLALAHMIKFRGHFLIEGDLNPDNSDVDKLFIQLVQTYNQLFEENPINASGVDAKAILSARLSKSRRLENLIAQLPGEKKNGLFGNLIALSLGLTPNFKSNFDLAEDAKLQLSKDTYDDDLDNLLAQIGDQYADLFLAAKNLSDAILLSDILRVNTEITKAPLSASMIKRYDEHHQDLTLLKALVRQQLPEKYKEIFFDQSKNGYAGYIDGGASQEEFYKFIKPILEKMDGTEELLVKLNREDLLRKQRTFDNGSIPHQIHLGELHAILRRQEDFYPFLKDNREKIEKILTFRIPYYVGPLARGNSRFAWMTRKSEETITPWNFEEVVDKGASAQSFIERMTNFDKNLPNEKVLPKHSLLYEYFTVYNELTKVKYVTEGMRKPAFLSGEQKKAIVDLLFKTNRKVTVKQLKEDYFKKIECFDSVEISGVEDRFNASLGTYHDLLKIIKDKDFLDNEENEDILEDIVLTLTLFEDREMIEERLKTYAHLFDDKVMKQLKRRRYTGWGRLSRKLINGIRDKQSGKTILDFLKSDGFANRNFMQLIHDDSLTFKEDIQKAQVSGQGDSLHEHIANLAGSPAIKKGILQTVKVVDELVKVMGRHKPENIVIEMARENQTTQKGQKNSRERMKRIEEGIKELGSQILKEHPVENTQLQNEKLYLYYLQNGRDMYVDQELDINRLSDYDVDHIVPQSFLKDDSIDNKVLTRSDKARGKSDNVPSEEVVKKMKNYWRQLLNAKLITQRKFDNLTKAERGGLSELDKAGFIKRQLVETRQITKHVAQILDSRMNTKYDENDKLIREVKVITLKSKLVSDFRKDFQFYKVREINNYHHAHDAYLNAVVGTALIKKYPKLESEFVYGDYKVYDVRKMIAKSEQEIGKATAKYFFYSNIMNFFKTEITLANGEIRKRPLIETNGETGEIVWDKGRDFATVRKVLSMPQVNIVKKTEVQTGGFSKESILPKRNSDKLIARKKDWDPKKYGGFDSPTVAYSVLVVAKVEKGKSKKLKSVKELLGITIMERSSFEKNPIDFLEAKGYKEVKKDLIIKLPKYSLFELENGRKRMLASAGELQKGNELALPSKYVNFLYLASHYEKLKGSPEDNEQKQLFVEQHKHYLDEIIEQISEFSKRVILADANLDKVLSAYNKHRDKPIREQAENIIHLFTLTNLGAPAAFKYFDTTIDRKRYTSTKEVLDATLIHQSITGLYETRIDLSQLGGDGGEAAAKPAPGGGGGVPWILKKPLELTIKLDLEEQQGTLLNNSILSKKGKEELKQLFEKYSALWQSWENQVGHRRIRPHKIATGTVKPTPQKQYHINPKAKPDIQIVINDLLKQGVLIQKESTMNTPVYPVPKPNGRWRMVLDYRAVNKVTPLIAVQNQHSYGILGSLFKGRYKTTIDLSNGFWAHPIVPEDYWITAFTWQGKQYCWTVLPQGFLNSPGLFNGDVVDLLQGIPNVEVYVDDVYISHDSEKEHLEYLDILFNRLKEAGYIISLKKSNIANSIVDFLGFQITNEGRGLTDTFKEKLENITAPTTLKQLQSILGLLNFARNFIPDFTELIAPLYALIPKSPKNYVPWQIEHSTTLETLITKLNGAEYLQGRKGDKTLIMKVNASYTTGYIRYYNEGEKKPISYVSIVFSKTELKFTELEKLLTTVHKGLLKALDLSMGQNIHVYSPIVSMQNIQKTPQTAKKALASRWLSWLSYLEDPRIRFFYDPQMPALKDLPAVDTGKDNKKHPSNFQHIFYTDGSAITSPTKEGHLNAGMGIVYFINKDGNLQKQQEWSISLGNHTAQFAEIAAFEFALKKCLPLGGNILVVTDSNYVAKAYNEELDVWASNGFVNNRKKPLKHISKWKSVADLKRLRPDVVVTHEPGHQKLDSSPHAYGNNLADQLATQASFKVHAGKRTADGSEFEKRTADGSEFESPKKKAKVE

SEQ ID NO: 1106 - protein, 2087 aa, synthetic construct
MPAAKRVKLDGGDKKYSIGLDIGTNSVGWAVITDEYKVPSKKFKVLGNTDRHSIKKNLIGALLFDSGETAEATRLKRTARRRYTRRKNRICYLQEIFSNEMAKVDDSFFHRLEESFLVEEDKKHERHPIFGNIVDEVAYHEKYPTIYHLRKKLVDSTDKADLRLIYLALAHMIKFRGHFLIEGDLNPDNSDVDKLFIQLVQTYNQLFEENPINASGVDAKAILSARLSKSRRLENLIAQLPGEKKNGLFGNLIALSLGLTPNFKSNFDLAEDAKLQLSKDTYDDDLDNLLAQIGDQYADLFLAAKNLSDAILLSDILRVNTEITKAPLSASMIKRYDEHHQDLTLLKALVRQQLPEKYKEIFFDQSKNGYAGYIDGGASQEEFYKFIKPILEKMDGTEELLVKLNREDLLRKQRTFDNGSIPHQIHLGELHAILRRQEDFYPFLKDNREKIEKILTFRIPYYVGPLARGNSRFAWMTRKSEETITPWNFEEVVDKGASAQSFIERMTNFDKNLPNEKVLPKHSLLYEYFTVYNELTKVKYVTEGMRKPAFLSGEQKKAIVDLLFKTNRKVTVKQLKEDYFKKIECFDSVEISGVEDRFNASLGTYHDLLKIIKDKDFLDNEENEDILEDIVLTLTLFEDREMIEERLKTYAHLFDDKVMKQLKRRRYTGWGRLSRKLINGIRDKQSGKTILDFLKSDGFANRNFMQLIHDDSLTFKEDIQKAQVSGQGDSLHEHIANLAGSPAIKKGILQTVKVVDELVKVMGRHKPENIVIEMARENQTTQKGQKNSRERMKRIEEGIKELGSQILKEHPVENTQLQNEKLYLYYLQNGRDMYVDQELDINRLSDYDVDHIVPQSFLKDDSIDNKVLTRSDKARGKSDNVPSEEVVKKMKNYWRQLLNAKLITQRKFDNLTKAERGGLSELDKAGFIKRQLVETRQITKHVAQILDSRMNTKYDENDKLIREVKVITLKSKLVSDFRKDFQFYKVREINNYHHAHDAYLNAVVGTALIKKYPKLESEFVYGDYKVYDVRKMIAKSEQEIGKATAKYFFYSNIMNFFKTEITLANGEIRKRPLIETNGETGEIVWDKGRDFATVRKVLSMPQVNIVKKTEVQTGGFSKESILPKRNSDKLIARKKDWDPKKYGGFDSPTVAYSVLVVAKVEKGKSKKLKSVKELLGITIMERSSFEKNPIDFLEAKGYKEVKKDLIIKLPKYSLFELENGRKRMLASAGELQKGNELALPSKYVNFLYLASHYEKLKGSPEDNEQKQLFVEQHKHYLDEIIEQISEFSKRVILADANLDKVLSAYNKHRDKPIREQAENIIHLFTLTNLGAPAAFKYFDTTIDRKRYTSTKEVLDATLIHQSITGLYETRIDLSQLGGDGGGGSGGGEAAAKGGVPWILKKPLELTIKLDLEEQQGTLLNNSILSKKGKEELKQLFEKYSALWQSWENQVGHRRIRPHKIATGTVKPTPQKQYHINPKAKPDIQIVINDLLKQGVLIQKESTMNTPVYPVPKPNGRWRMVLDYRAVNKVTPLIAVQNQHSYGILGSLFKGRYKTTIDLSNGFWAHPIVPEDYWITAFTWQGKQYCWTVLPQGFLNSPGLFNGDVVDLLQGIPNVEVYVDDVYISHDSEKEHLEYLDILFNRLKEAGYIISLKKSNIANSIVDFLGFQITNEGRGLTDTFKEKLENITAPTTLKQLQSILGLLNFARNFIPDFTELIAPLYALIPKSPKNYVPWQIEHSTTLETLITKLNGAEYLQGRKGDKTLIMKVNASYTTGYIRYYNEGEKKPISYVSIVFSKTELKFTELEKLLTTVHKGLLKALDLSMGQNIHVYSPIVSMQNIQKTPQTAKKALASRWLSWLSYLEDPRIRFFYDPQMPALKDLPAVDTGKDNKKHPSNFQHIFYTDGSAITSPTKEGHLNAGMGIVYFINKDGNLQKQQEWSISLGNHTAQFAEIAAFEFALKKCLPLGGNILVVTDSNYVAKAYNEELDVWASNGFVNNRKKPLKHISKWKSVADLKRLRPDVVVTHEPGHQKLDSSPHAYGNNLADQLATQASFKVHAGKRTADGSEFEKRTADGSEFESPKKKAKVE

SEQ ID NO: 1107 - protein, 2082 aa, synthetic construct
MPAAKRVKLDGGDKKYSIGLDIGTNSVGWAVITDEYKVPSKKFKVLGNTDRHSIKKNLIGALLFDSGETAEATRLKRTARRRYTRRKNRICYLQEIFSNEMAKVDDSFFHRLEESFLVEEDKKHERHPIFGNIVDEVAYHEKYPTIYHLRKKLVDSTDKADLRLIYLALAHMIKFRGHFLIEGDLNPDNSDVDKLFIQLVQTYNQLFEENPINASGVDAKAILSARLSKSRRLENLIAQLPGEKKNGLFGNLIALSLGLTPNFKSNFDLAEDAKLQLSKDTYDDDLDNLLAQIGDQYADLFLAAKNLSDAILLSDILRVNTEITKAPLSASMIKRYDEHHQDLTLLKALVRQQLPEKYKEIFFDQSKNGYAGYIDGGASQEEFYKFIKPILEKMDGTEELLVKLNREDLLRKQRTFDNGSIPHQIHLGELHAILRRQEDFYPFLKDNREKIEKILTFRIPYYVGPLARGNSRFAWMTRKSEETITPWNFEEVVDKGASAQSFIERMTNFDKNLPNEKVLPKHSLLYEYFTVYNELTKVKYVTEGMRKPAFLSGEQKKAIVDLLFKTNRKVTVKQLKEDYFKKIECFDSVEISGVEDRFNASLGTYHDLLKIIKDKDFLDNEENEDILEDIVLTLTLFEDREMIEERLKTYAHLFDDKVMKQLKRRRYTGWGRLSRKLINGIRDKQSGKTILDFLKSDGFANRNFMQLIHDDSLTFKEDIQKAQVSGQGDSLHEHIANLAGSPAIKKGILQTVKVVDELVKVMGRHKPENIVIEMARENQTTQKGQKNSRERMKRIEEGIKELGSQILKEHPVENTQLQNEKLYLYYLQNGRDMYVDQELDINRLSDYDVDHIVPQSFLKDDSIDNKVLTRSDKARGKSDNVPSEEVVKKMKNYWRQLLNAKLITQRKFDNLTKAERGGLSELDKAGFIKRQLVETRQITKHVAQILDSRMNTKYDENDKLIREVKVITLKSKLVSDFRKDFQFYKVREINNYHHAHDAYLNAVVGTALIKKYPKLESEFVYGDYKVYDVRKMIAKSEQEIGKATAKYFFYSNIMNFFKTEITLANGEIRKRPLIETNGETGEIVWDKGRDFATVRKVLSMPQVNIVKKTEVQTGGFSKESILPKRNSDKLIARKKDWDPKKYGGFDSPTVAYSVLVVAKVEKGKSKKLKSVKELLGITIMERSSFEKNPIDFLEAKGYKEVKKDLIIKLPKYSLFELENGRKRMLASAGELQKGNELALPSKYVNFLYLASHYEKLKGSPEDNEQKQLFVEQHKHYLDEIIEQISEFSKRVILADANLDKVLSAYNKHRDKPIREQAENIIHLFTLTNLGAPAAFKYFDTTIDRKRYTSTKEVLDATLIHQSITGLYETRIDLSQLGGDGGPAPGGSGGVPWILKKPLELTIKLDLEEQQGTLLNNSILSKKGKEELKQLFEKYSALWQSWENQVGHRRIRPHKIATGTVKPTPQKQYHINPKAKPDIQIVINDLLKQGVLIQKESTMNTPVYPVPKPNGRWRMVLDYRAVNKVTPLIAVQNQHSYGILGSLFKGRYKTTIDLSNGFWAHPIVPEDYWITAFTWQGKQYCWTVLPQGFLNSPGLFNGDVVDLLQGIPNVEVYVDDVYISHDSEKEHLEYLDILFNRLKEAGYIISLKKSNIANSIVDFLGFQITNEGRGLTDTFKEKLENITAPTTLKQLQSILGLLNFARNFIPDFTELIAPLYALIPKSPKNYVPWQIEHSTTLETLITKLNGAEYLQGRKGDKTLIMKVNASYTTGYIRYYNEGEKKPISYVSIVFSKTELKFTELEKLLTTVHKGLLKALDLSMGQNIHVYSPIVSMQNIQKTPQTAKKALASRWLSWLSYLEDPRIRFFYDPQMPALKDLPAVDTGKDNKKHPSNFQHIFYTDGSAITSPTKEGHLNAGMGIVYFINKDGNLQKQQEWSISLGNHTAQFAEIAAFEFALKKCLPLGGNILVVTDSNYVAKAYNEELDVWASNGFVNNRKKPLKHISKWKSVADLKRLRPDVVVTHEPGHQKLDSSPHAYGNNLADQLATQASFKVHAGKRTADGSEFEKRTADGSEFESPKKKAKVE

SEQ ID NO: 1108 - protein, 2084 aa, synthetic construct
MPAAKRVKLDGGDKKYSIGLDIGTNSVGWAVITDEYKVPSKKFKVLGNTDRHSIKKNLIGALLFDSGETAEATRLKRTARRRYTRRKNRICYLQEIFSNEMAKVDDSFFHRLEESFLVEEDKKHERHPIFGNIVDEVAYHEKYPTIYHLRKKLVDSTDKADLRLIYLALAHMIKFRGHFLIEGDLNPDNSDVDKLFIQLVQTYNQLFEENPINASGVDAKAILSARLSKSRRLENLIAQLPGEKKNGLFGNLIALSLGLTPNFKSNFDLAEDAKLQLSKDTYDDDLDNLLAQIGDQYADLFLAAKNLSDAILLSDILRVNTEITKAPLSASMIKRYDEHHQDLTLLKALVRQQLPEKYKEIFFDQSKNGYAGYIDGGASQEEFYKFIKPILEKMDGTEELLVKLNREDLLRKQRTFDNGSIPHQIHLGELHAILRRQEDFYPFLKDNREKIEKILTFRIPYYVGPLARGNSRFAWMTRKSEETITPWNFEEVVDKGASAQSFIERMTNFDKNLPNEKVLPKHSLLYEYFTVYNELTKVKYVTEGMRKPAFLSGEQKKAIVDLLFKTNRKVTVKQLKEDYFKKIECFDSVEISGVEDRFNASLGTYHDLLKIIKDKDFLDNEENEDILEDIVLTLTLFEDREMIEERLKTYAHLFDDKVMKQLKRRRYTGWGRLSRKLINGIRDKQSGKTILDFLKSDGFANRNFMQLIHDDSLTFKEDIQKAQVSGQGDSLHEHIANLAGSPAIKKGILQTVKVVDELVKVMGRHKPENIVIEMARENQTTQKGQKNSRERMKRIEEGIKELGSQILKEHPVENTQLQNEKLYLYYLQNGRDMYVDQELDINRLSDYDVDHIVPQSFLKDDSIDNKVLTRSDKARGKSDNVPSEEVVKKMKNYWRQLLNAKLITQRKFDNLTKAERGGLSELDKAGFIKRQLVETRQITKHVAQILDSRMNTKYDENDKLIREVKVITLKSKLVSDFRKDFQFYKVREINNYHHAHDAYLNAVVGTALIKKYPKLESEFVYGDYKVYDVRKMIAKSEQEIGKATAKYFFYSNIMNFFKTEITLANGEIRKRPLIETNGETGEIVWDKGRDFATVRKVLSMPQVNIVKKTEVQTGGFSKESILPKRNSDKLIARKKDWDPKKYGGFDSPTVAYSVLVVAKVEKGKSKKLKSVKELLGITIMERSSFEKNPIDFLEAKGYKEVKKDLIIKLPKYSLFELENGRKRMLASAGELQKGNELALPSKYVNFLYLASHYEKLKGSPEDNEQKQLFVEQHKHYLDEIIEQISEFSKRVILADANLDKVLSAYNKHRDKPIREQAENIIHLFTLTNLGAPAAFKYFDTTIDRKRYTSTKEVLDATLIHQSITGLYETRIDLSQLGGDGGGGGEAAAKGGVPWILKKPLELTIKLDLEEQQGTLLNNSILSKKGKEELKQLFEKYSALWQSWENQVGHRRIRPHKIATGTVKPTPQKQYHINPKAKPDIQIVINDLLKQGVLIQKESTMNTPVYPVPKPNGRWRMVLDYRAVNKVTPLIAVQNQHSYGILGSLFKGRYKTTIDLSNGFWAHPIVPEDYWITAFTWQGKQYCWTVLPQGFLNSPGLFNGDVVDLLQGIPNVEVYVDDVYISHDSEKEHLEYLDILFNRLKEAGYIISLKKSNIANSIVDFLGFQITNEGRGLTDTFKEKLENITAPTTLKQLQSILGLLNFARNFIPDFTELIAPLYALIPKSPKNYVPWQIEHSTTLETLITKLNGAEYLQGRKGDKTLIMKVNASYTTGYIRYYNEGEKKPISYVSIVFSKTELKFTELEKLLTTVHKGLLKALDLSMGQNIHVYSPIVSMQNIQKTPQTAKKALASRWLSWLSYLEDPRIRFFYDPQMPALKDLPAVDTGKDNKKHPSNFQHIFYTDGSAITSPTKEGHLNAGMGIVYFINKDGNLQKQQEWSISLGNHTAQFAEIAAFEFALKKCLPLGGNILVVTDSNYVAKAYNEELDVWASNGFVNNRKKPLKHISKWKSVADLKRLRPDVVVTHEPGHQKLDSSPHAYGNNLADQLATQASFKVHAGKRTADGSEFEKRTADGSEFESPKKKAKVE

SEQ ID NO: 1109 - protein, 2085 aa, synthetic construct
MPAAKRVKLDGGDKKYSIGLDIGTNSVGWAVITDEYKVPSKKFKVLGNTDRHSIKKNLIGALLFDSGETAEATRLKRTARRRYTRRKNRICYLQEIFSNEMAKVDDSFFHRLEESFLVEEDKKHERHPIFGNIVDEVAYHEKYPTIYHLRKKLVDSTDKADLRLIYLALAHMIKFRGHFLIEGDLNPDNSDVDKLFIQLVQTYNQLFEENPINASGVDAKAILSARLSKSRRLENLIAQLPGEKKNGLFGNLIALSLGLTPNFKSNFDLAEDAKLQLSKDTYDDDLDNLLAQIGDQYADLFLAAKNLSDAILLSDILRVNTEITKAPLSASMIKRYDEHHQDLTLLKALVRQQLPEKYKEIFFDQSKNGYAGYIDGGASQEEFYKFIKPILEKMDGTEELLVKLNREDLLRKQRTFDNGSIPHQIHLGELHAILRRQEDFYPFLKDNREKIEKILTFRIPYYVGPLARGNSRFAWMTRKSEETITPWNFEEVVDKGASAQSFIERMTNFDKNLPNEKVLPKHSLLYEYFTVYNELTKVKYVTEGMRKPAFLSGEQKKAIVDLLFKTNRKVTVKQLKEDYFKKIECFDSVEISGVEDRFNASLGTYHDLLKIIKDKDFLDNEENEDILEDIVLTLTLFEDREMIEERLKTYAHLFDDKVMKQLKRRRYTGWGRLSRKLINGIRDKQSGKTILDFLKSDGFANRNFMQLIHDDSLTFKEDIQKAQVSGQGDSLHEHIANLAGSPAIKKGILQTVKVVDELVKVMGRHKPENIVIEMARENQTTQKGQKNSRERMKRIEEGIKELGSQILKEHPVENTQLQNEKLYLYYLQNGRDMYVDQELDINRLSDYDVDHIVPQSFLKDDSIDNKVLTRSDKARGKSDNVPSEEVVKKMKNYWRQLLNAKLITQRKFDNLTKAERGGLSELDKAGFIKRQLVETRQITKHVAQILDSRMNTKYDENDKLIREVKVITLKSKLVSDFRKDFQFYKVREINNYHHAHDAYLNAVVGTALIKKYPKLESEFVYGDYKVYDVRKMIAKSEQEIGKATAKYFFYSNIMNFFKTEITLANGEIRKRPLIETNGETGEIVWDKGRDFATVRKVLSMPQVNIVKKTEVQTGGFSKESILPKRNSDKLIARKKDWDPKKYGGFDSPTVAYSVLVVAKVEKGKSKKLKSVKELLGITIMERSSFEKNPIDFLEAKGYKEVKKDLIIKLPKYSLFELENGRKRMLASAGELQKGNELALPSKYVNFLYLASHYEKLKGSPEDNEQKQLFVEQHKHYLDEIIEQISEFSKRVILADANLDKVLSAYNKHRDKPIREQAENIIHLFTLTNLGAPAAFKYFDTTIDRKRYTSTKEVLDATLIHQSITGLYETRIDLSQLGGDGGGGGGSSPAPGGVPWILKKPLELTIKLDLEEQQGTLLNNSILSKKGKEELKQLFEKYSALWQSWENQVGHRRIRPHKIATGTVKPTPQKQYHINPKAKPDIQIVINDLLKQGVLIQKESTMNTPVYPVPKPNGRWRMVLDYRAVNKVTPLIAVQNQHSYGILGSLFKGRYKTTIDLSNGFWAHPIVPEDYWITAFTWQGKQYCWTVLPQGFLNSPGLFNGDVVDLLQGIPNVEVYVDDVYISHDSEKEHLEYLDILFNRLKEAGYIISLKKSNIANSIVDFLGFQITNEGRGLTDTFKEKLENITAPTTLKQLQSILGLLNFARNFIPDFTELIAPLYALIPKSPKNYVPWQIEHSTTLETLITKLNGAEYLQGRKGDKTLIMKVNASYTTGYIRYYNEGEKKPISYVSIVFSKTELKFTELEKLLTTVHKGLLKALDLSMGQNIHVYSPIVSMQNIQKTPQTAKKALASRWLSWLSYLEDPRIRFFYDPQMPALKDLPAVDTGKDNKKHPSNFQHIFYTDGSAITSPTKEGHLNAGMGIVYFINKDGNLQKQQEWSISLGNHTAQFAEIAAFEFALKKCLPLGGNILVVTDSNYVAKAYNEELDVWASNGFVNNRKKPLKHISKWKSVADLKRLRPDVVVTHEPGHQKLDSSPHAYGNNLADQLATQASFKVHAGKRTADGSEFEKRTADGSEFESPKKKAKVE

SEQ ID NO: 1110 - protein, 2085 aa, synthetic construct
MPAAKRVKLDGGDKKYSIGLDIGTNSVGWAVITDEYKVPSKKFKVLGNTDRHSIKKNLIGALLFDSGETAEATRLKRTARRRYTRRKNRICYLQEIFSNEMAKVDDSFFHRLEESFLVEEDKKHERHPIFGNIVDEVAYHEKYPTIYHLRKKLVDSTDKADLRLIYLALAHMIKFRGHFLIEGDLNPDNSDVDKLFIQLVQTYNQLFEENPINASGVDAKAILSARLSKSRRLENLIAQLPGEKKNGLFGNLIALSLGLTPNFKSNFDLAEDAKLQLSKDTYDDDLDNLLAQIGDQYADLFLAAKNLSDAILLSDILRVNTEITKAPLSASMIKRYDEHHQDLTLLKALVRQQLPEKYKEIFFDQSKNGYAGYIDGGASQEEFYKFIKPILEKMDGTEELLVKLNREDLLRKQRTFDNGSIPHQIHLGELHAILRRQEDFYPFLKDNREKIEKILTFRIPYYVGPLARGNSRFAWMTRKSEETITPWNFEEVVDKGASAQSFIERMTNFDKNLPNEKVLPKHSLLYEYFTVYNELTKVKYVTEGMRKPAFLSGEQKKAIVDLLFKTNRKVTVKQLKEDYFKKIECFDSVEISGVEDRFNASLGTYHDLLKIIKDKDFLDNEENEDILEDIVLTLTLFEDREMIEERLKTYAHLFDDKVMKQLKRRRYTGWGRLSRKLINGIRDKQSGKTILDFLKSDGFANRNFMQLIHDDSLTFKEDIQKAQVSGQGDSLHEHIANLAGSPAIKKGILQTVKVVDELVKVMGRHKPENIVIEMARENQTTQKGQKNSRERMKRIEEGIKELGSQILKEHPVENTQLQNEKLYLYYLQNGRDMYVDQELDINRLSDYDVDHIVPQSFLKDDSIDNKVLTRSDKARGKSDNVPSEEVVKKMKNYWRQLLNAKLITQRKFDNLTKAERGGLSELDKAGFIKRQLVETRQITKHVAQILDSRMNTKYDENDKLIREVKVITLKSKLVSDFRKDFQFYKVREINNYHHAHDAYLNAVVGTALIKKYPKLESEFVYGDYKVYDVRKMIAKSEQEIGKATAKYFFYSNIMNFFKTEITLANGEIRKRPLIETNGETGEIVWDKGRDFATVRKVLSMPQVNIVKKTEVQTGGFSKESILPKRNSDKLIARKKDWDPKKYGGFDSPTVAYSVLVVAKVEKGKSKKLKSVKELLGITIMERSSFEKNPIDFLEAKGYKEVKKDLIIKLPKYSLFELENGRKRMLASAGELQKGNELALPSKYVNFLYLASHYEKLKGSPEDNEQKQLFVEQHKHYLDEIIEQISEFSKRVILADANLDKVLSAYNKHRDKPIREQAENIIHLFTLTNLGAPAAFKYFDTTIDRKRYTSTKEVLDATLIHQSITGLYETRIDLSQLGGDGGPAPGGSGSSGGVPWILKKPLELTIKLDLEEQQGTLLNNSILSKKGKEELKQLFEKYSALWQSWENQVGHRRIRPHKIATGTVKPTPQKQYHINPKAKPDIQIVINDLLKQGVLIQKESTMNTPVYPVPKPNGRWRMVLDYRAVNKVTPLIAVQNQHSYGILGSLFKGRYKTTIDLSNGFWAHPIVPEDYWITAFTWQGKQYCWTVLPQGFLNSPGLFNGDVVDLLQGIPNVEVYVDDVYISHDSEKEHLEYLDILFNRLKEAGYIISLKKSNIANSIVDFLGFQITNEGRGLTDTFKEKLENITAPTTLKQLQSILGKLNFARNFIPDFTELIAPLYALIPKSPKNYVPWQIEHSTTLETLITKLNGAEYLQGRKGDKTLIMKVNASYTTGYIRYYNEGEKKPISYVSIVFSKTELKFTELEKLLTTVHKGLLKALDLSMGQNIHVYSPIVSMQNIQKTPQTAKKALASRWLSWLSYLEDPRIRFFYDPQMPALKDLPAVDTGKDNKKHPSNFQHIFYTDGSAITSPTKEGHLNAGMGIVYFINKDGNLQKQQEWSISLGNHTAQFAEIAAFEFALKKCLPLGGNILVVTDSNYVAKAYNEELDVWASNGFVNNRKKPLKHISKWKSVADLKRLRPDVVVTHEPGHQKLDSSPHAYGNNLADQLATQASFKVHAGKRTADGSEFEKRTADGSEFESPKKKAKVE

SEQ ID NO: 1111 - protein, 2087 aa, synthetic construct
MPAAKRVKLDGGDKKYSIGLDIGTNSVGWAVITDEYKVPSKKFKVLGNTDRHSIKKNLIGALLFDSGETAEATRLKRTARRRYTRRKNRICYLQEIFSNEMAKVDDSFFHRLEESFLVEEDKKHERHPIFGNIVDEVAYHEKYPTIYHLRKKLVDSTDKADLRLIYLALAHMIKFRGHFLIEGDLNPDNSDVDKLFIQLVQTYNQLFEENPINASGVDAKAILSARLSKSRRLENLIAQLPGEKKNGLFGNLIALSLGLTPNFKSNFDLAEDAKLQLSKDTYDDDLDNLLAQIGDQYADLFLAAKNLSDAILLSDILRVNTEITKAPLSASMIKRYDEHHQDLTLLKALVRQQLPEKYKEIFFDQSKNGYAGYIDGGASQEEFYKFIKPILEKMDGTEELLVKLNREDLLRKQRTFDNGSIPHQIHLGELHAILRRQEDFYPFLKDNREKIEKILTFRIPYYVGPLARGNSRFAWMTRKSEETITPWNFEEVVDKGASAQSFIERMTNFDKNLPNEKVLPKHSLLYEYFTVYNELTKVKYVTEGMRKPAFLSGEQKKAIVDLLFKTNRKVTVKQLKEDYFKKIECFDSVEISGVEDRFNASLGTYHDLLKIIKDKDFLDNEENEDILEDIVLTLTLFEDREMIEERLKTYAHLFDDKVMKQLKRRRYTGWGRLSRKLINGIRDKQSGKTILDFLKSDGFANRNFMQLIHDDSLTFKEDIQKAQVSGQGDSLHEHIANLAGSPAIKKGILQTVKVVDELVKVMGRHKPENIVIEMARENQTTQKGQKNSRERMKRIEEGIKELGSQILKEHPVENTQLQNEKLYLYYLQNGRDMYVDQELDINRLSDYDVDHIVPQSFLKDDSIDNKVLTRSDKARGKSDNVPSEEVVKKMKNYWRQLLNAKLITQRKFDNLTKAERGGLSELDKAGFIKRQLVETRQITKHVAQILDSRMNTKYDENDKLIREVKVITLKSKLVSDFRKDFQFYKVREINNYHHAHDAYLNAVVGTALIKKYPKLESEFVYGDYKVYDVRKMIAKSEQEIGKATAKYFFYSNIMNFFKTEITLANGEIRKRPLIETNGETGEIVWDKGRDFATVRKVLSMPQVNIVKKTEVQTGGFSKESILPKRNSDKLIARKKDWDPKKYGGFDSPTVAYSVLVVAKVEKGKSKKLKSVKELLGITIMERSSFEKNPIDFLEAKGYKEVKKDLIIKLPKYSLFELENGRKRMLASAGELQKGNELALPSKYVNFLYLASHYEKLKGSPEDNEQKQLFVEQHKHYLDEIIEQISEFSKRVILADANLDKVLSAYNKHRDKPIREQAENIIHLFTLTNLGAPAAFKYFDTTIDRKRYTSTKEVLDATLIHQSITGLYETRIDLSQLGGDGGGSSEAAAKGGGGGVPWILKKPLELTIKLDLEEQQGTLLNNSILSKKGKEELKQLFEKYSALWQSWENQVGHRRIRPHKIATGTVKPTPQKQYHINPKAKPDIQIVINDLLKQGVLIQKESTMNTPVYPVPKPNGRWRMVLDYRAVNKVTPLIAVQNQHSYGILGSLFKGRYKTTIDLSNGFWAHPIVPEDYWITAFTWQGKQYCWTVLPQGFLNSPGLFNGDVVDLLQGIPNVEVYVDDVYISHDSEKEHLEYLDILFNRLKEAGYIISLKKSNIANSIVDFLGFQITNEGRGLTDTFKEKLENITAPTTLKQLQSILGKLNFARNFIPDFTELIAPLYALIPKSPKNYVPWQIEHSTTLETLITKLNGAEYLQGRKGDKTLIMKVNASYTTGYIRYYNEGEKKPISYVSIVFSKTELKFTELEKLLTTVHKGLLKALDLSMGQNIHVYSPIVSMQNIQKTPQTAKKALASRWLSWLSYLEDPRIRFFYDPQMPALKDLPAVDTGKDNKKHPSNFQHIFYTDGSAITSPTKEGHLNAGMGIVYFINKDGNLQKQQEWSISLGNHTAQFAEIAAFEFALKKCLPLGGNILVVTDSNYVAKAYNEELDVWASNGFVNNRKKPLKHISKWKSVADLKRLRPDVVVTHEPGHQKLDSSPHAYGNNLADQLATQASFKVHAGKRTADGSEFEKRTADGSEFESPKKKAKVE

SEQ ID NO: 1112 - protein, 2091 aa, synthetic construct
MPAAKRVKLDGGDKKYSIGLDIGTNSVGWAVITDEYKVPSKKFKVLGNTDRHSIKKNLIGALLFDSGETAEATRLKRTARRRYTRRKNRICYLQEIFSNEMAKVDDSFFHRLEESFLVEEDKKHERHPIFGNIVDEVAYHEKYPTIYHLRKKLVDSTDKADLRLIYLALAHMIKFRGHFLIEGDLNPDNSDVDKLFIQLVQTYNQLFEENPINASGVDAKAILSARLSKSRRLENLIAQLPGEKKNGLFGNLIALSLGLTPNFKSNFDLAEDAKLQLSKDTYDDDLDNLLAQIGDQYADLFLAAKNLSDAILLSDILRVNTEITKAPLSASMIKRYDEHHQDLTLLKALVRQQLPEKYKEIFFDQSKNGYAGYIDGGASQEEFYKFIKPILEKMDGTEELLVKLNREDLLRKQRTFDNGSIPHQIHLGELHAILRRQEDFYPFLKDNREKIEKILTFRIPYYVGPLARGNSRFAWMTRKSEETITPWNFEEVVDKGASAQSFIERMTNFDKNLPNEKVLPKHSLLYEYFTVYNELTKVKYVTEGMRKPAFLSGEQKKAIVDLLFKTNRKVTVKQLKEDYFKKIECFDSVEISGVEDRFNASLGTYHDLLKIIKDKDFLDNEENEDILEDIVLTLTLFEDREMIEERLKTYAHLFDDKVMKQLKRRRYTGWGRLSRKLINGIRDKQSGKTILDFLKSDGFANRNFMQLIHDDSLTFKEDIQKAQVSGQGDSLHEHIANLAGSPAIKKGILQTVKVVDELVKVMGRHKPENIVIEMARENQTTQKGQKNSRERMKRIEEGIKELGSQILKEHPVENTQLQNEKLYLYYLQNGRDMYVDQELDINRLSDYDVDHIVPQSFLKDDSIDNKVLTRSDKARGKSDNVPSEEVVKKMKNYWRQLLNAKLITQRKFDNLTKAERGGLSELDKAGFIKRQLVETRQITKHVAQILDSRMNTKYDENDKLIREVKVITLKSKLVSDFRKDFQFYKVREINNYHHAHDAYLNAVVGTALIKKYPKLESEFVYGDYKVYDVRKMIAKSEQEIGKATAKYFFYSNIMNFFKTEITLANGEIRKRPLIETNGETGEIVWDKGRDFATVRKVLSMPQVNIVKKTEVQTGGFSKESILPKRNSDKLIARKKDWDPKKYGGFDSPTVAYSVLVVAKVEKGKSKKLKSVKELLGITIMERSSFEKNPIDFLEAKGYKEVKKDLIIKLPKYSLFELENGRKRMLASAGELQKGNELALPSKYVNFLYLASHYEKLKGSPEDNEQKQLFVEQHKHYLDEIIEQISEFSKRVILADANLDKVLSAYNKHRDKPIREQAENIIHLFTLTNLGAPAAFKYFDTTIDRKRYTSTKEVLDATLIHQSITGLYETRIDLSQLGGDGGGSSGSSGSSGSSGSSGGVPWILKKPLELTIKLDLEEQQGTLLNNSILSKKGKEELKQLFEKYSALWQSWENQVGHRRIRPHKIATGTVKPTPQKQYHINPKAKPDIQIVINDLLKQGVLIQKESTMNTPVYPVPKPNGRWRMVLDYRAVNKVTPLIAVQNQHSYGILGSLFKGRYKTTIDLSNGFWAHPIVPEDYWITAFTWQGKQYCWTVLPQGFLNSPGLFNGDVVDLLQGIPNVEVYVDDVYISHDSEKEHLEYLDILFNRLKEAGYIISLKKSNIANSIVDFLGFQITNEGRGLTDTFKEKLENITAPTTLKQLQSILGKLNFARNFIPDFTELIAPLYALIPKSPKNYVPWQIEHSTTLETLITKLNGAEYLQGRKGDKTLIMKVNASYTTGYIRYYNEGEKKPISYVSIVFSKTELKFTELEKLLTTVHKGLLKALDLSMGQNIHVYSPIVSMQNIQKTPQTAKKALASRWLSWLSYLEDPRIRFFYDPQMPALKDLPAVDTGKDNKKHPSNFQHIFYTDGSAITSPTKEGHLNAGMGIVYFINKDGNLQKQQEWSISLGNHTAQFAEIAAFEFALKKCLPLGGNILVVTDSNYVAKAYNEELDVWASNGFVNNRKKPLKHISKWKSVADLKRLRPDVVVTHEPGHQKLDSSPHAYGNNLADQLATQASFKVHAGKRTADGSEFEKRTADGSEFESPKKKAKVE

SEQ ID NO: 1113 - protein, 2087 aa, synthetic construct
MPAAKRVKLDGGDKKYSIGLDIGTNSVGWAVITDEYKVPSKKFKVLGNTDRHSIKKNLIGALLFDSGETAEATRLKRTARRRYTRRKNRICYLQEIFSNEMAKVDDSFFHRLEESFLVEEDKKHERHPIFGNIVDEVAYHEKYPTIYHLRKKLVDSTDKADLRLIYLALAHMIKFRGHFLIEGDLNPDNSDVDKLFIQLVQTYNQLFEENPINASGVDAKAILSARLSKSRRLENLIAQLPGEKKNGLFGNLIALSLGLTPNFKSNFDLAEDAKLQLSKDTYDDDLDNLLAQIGDQYADLFLAAKNLSDAILLSDILRVNTEITKAPLSASMIKRYDEHHQDLTLLKALVRQQLPEKYKEIFFDQSKNGYAGYIDGGASQEEFYKFIKPILEKMDGTEELLVKLNREDLLRKQRTFDNGSIPHQIHLGELHAILRRQEDFYPFLKDNREKIEKILTFRIPYYVGPLARGNSRFAWMTRKSEETITPWNFEEVVDKGASAQSFIERMTNFDKNLPNEKVLPKHSLLYEYFTVYNELTKVKYVTEGMRKPAFLSGEQKKAIVDLLFKTNRKVTVKQLKEDYFKKIECFDSVEISGVEDRFNASLGTYHDLLKIIKDKDFLDNEENEDILEDIVLTLTLFEDREMIEERLKTYAHLFDDKVMKQLKRRRYTGWGRLSRKLINGIRDKQSGKTILDFLKSDGFANRNFMQLIHDDSLTFKEDIQKAQVSGQGDSLHEHIANLAGSPAIKKGILQTVKVVDELVKVMGRHKPENIVIEMARENQTTQKGQKNSRERMKRIEEGIKELGSQILKEHPVENTQLQNEKLYLYYLQNGRDMYVDQELDINRLSDYDVDHIVPQSFLKDDSIDNKVLTRSDKARGKSDNVPSEEVVKKMKNYWRQLLNAKLITQRKFDNLTKAERGGLSELDKAGFIKRQLVETRQITKHVAQILDSRMNTKYDENDKLIREVKVITLKSKLVSDFRKDFQFYKVREINNYHHAHDAYLNAVVGTALIKKYPKLESEFVYGDYKVYDVRKMIAKSEQEIGKATAKYFFYSNIMNFFKTEITLANGEIRKRPLIETNGETGEIVWDKGRDFATVRKVLSMPQVNIVKKTEVQTGGFSKESILPKRNSDKLIARKKDWDPKKYGGFDSPTVAYSVLVVAKVEKGKSKKLKSVKELLGITIMERSSFEKNPIDFLEAKGYKEVKKDLIIKLPKYSLFELENGRKRMLASAGELQKGNELALPSKYVNFLYLASHYEKLKGSPEDNEQKQLFVEQHKHYLDEIIEQISEFSKRVILADANLDKVLSAYNKHRDKPIREQAENIIHLFTLTNLGAPAAFKYFDTTIDRKRYTSTKEVLDATLIHQSITGLYETRIDLSQLGGDGGGGSEAAAKGGGGGVPWILKKPLELTIKLDLEEQQGTLLNNSILSKKGKEELKQLFEKYSALWQSWENQVGHRRIRPHKIATGTVKPTPQKQYHINPKAKPDIQIVINDLLKQGVLIQKESTMNTPVYPVPKPNGRWRMVLDYRAVNKVTPLIAVQNQHSYGILGSLFKGRYKTTIDLSNGFWAHPIVPEDYWITAFTWQGKQYCWTVLPQGFLNSPGLFNGDVVDLLQGIPNVEVYVDDVYISHDSEKEHLEYLDILFNRLKEAGYIISLKKSNIANSIVDFLGFQITNEGRGLTDTFKEKLENITAPTTLKQLQSILGKLNFARNFIPDFTELIAPLYALIPKSPKNYVPWQIEHSTTLETLITKLNGAEYLQGRKGDKTLIMKVNASYTTGYIRYYNEGEKKPISYVSIVFSKTELKFTELEKLLTTVHKGLLKALDLSMGQNIHVYSPIVSMQNIQKTPQTAKKALASRWLSWLSYLEDPRIRFFYDPQMPALKDLPAVDTGKDNKKHPSNFQHIFYTDGSAITSPTKEGHLNAGMGIVYFINKDGNLQKQQEWSISLGNHTAQFAEIAAFEFALKKCLPLGGNILVVTDSNYVAKAYNEELDVWASNGFVNNRKKPLKHISKWKSVADLKRLRPDVVVTHEPGHQKLDSSPHAYGNNLADQLATQASFKVHAGKRTADGSEFEKRTADGSEFESPKKKAKVE

SEQ ID NO: 1114 - protein, 2087 aa, synthetic construct
MPAAKRVKLDGGDKKYSIGLDIGTNSVGWAVITDEYKVPSKKFKVLGNTDRHSIKKNLIGALLFDSGETAEATRLKRTARRRYTRRKNRICYLQEIFSNEMAKVDDSFFHRLEESFLVEEDKKHERHPIFGNIVDEVAYHEKYPTIYHLRKKLVDSTDKADLRLIYLALAHMIKFRGHFLIEGDLNPDNSDVDKLFIQLVQTYNQLFEENPINASGVDAKAILSARLSKSRRLENLIAQLPGEKKNGLFGNLIALSLGLTPNFKSNFDLAEDAKLQLSKDTYDDDLDNLLAQIGDQYADLFLAAKNLSDAILLSDILRVNTEITKAPLSASMIKRYDEHHQDLTLLKALVRQQLPEKYKEIFFDQSKNGYAGYIDGGASQEEFYKFIKPILEKMDGTEELLVKLNREDLLRKQRTFDNGSIPHQIHLGELHAILRRQEDFYPFLKDNREKIEKILTFRIPYYVGPLARGNSRFAWMTRKSEETITPWNFEEVVDKGASAQSFIERMTNFDKNLPNEKVLPKHSLLYEYFTVYNELTKVKYVTEGMRKPAFLSGEQKKAIVDLLFKTNRKVTVKQLKEDYFKKIECFDSVEISGVEDRFNASLGTYHDLLKIIKDKDFLDNEENEDILEDIVLTLTLFEDREMIEERLKTYAHLFDDKVMKQLKRRRYTGWGRLSRKLINGIRDKQSGKTILDFLKSDGFANRNFMQLIHDDSLTFKEDIQKAQVSGQGDSLHEHIANLAGSPAIKKGILQTVKVVDELVKVMGRHKPENIVIEMARENQTTQKGQKNSRERMKRIEEGIKELGSQILKEHPVENTQLQNEKLYLYYLQNGRDMYVDQELDINRLSDYDVDHIVPQSFLKDDSIDNKVLTRSDKARGKSDNVPSEEVVKKMKNYWRQLLNAKLITQRKFDNLTKAERGGLSELDKAGFIKRQLVETRQITKHVAQILDSRMNTKYDENDKLIREVKVITLKSKLVSDFRKDFQFYKVREINNYHHAHDAYLNAVVGTALIKKYPKLESEFVYGDYKVYDVRKMIAKSEQEIGKATAKYFFYSNIMNFFKTEITLANGEIRKRPLIETNGETGEIVWDKGRDFATVRKVLSMPQVNIVKKTEVQTGGFSKESILPKRNSDKLIARKKDWDPKKYGGFDSPTVAYSVLVVAKVEKGKSKKLKSVKELLGITIMERSSFEKNPIDFLEAKGYKEVKKDLIIKLPKYSLFELENGRKRMLASAGELQKGNELALPSKYVNFLYLASHYEKLKGSPEDNEQKQLFVEQHKHYLDEIIEQISEFSKRVILADANLDKVLSAYNKHRDKPIREQAENIIHLFTLTNLGAPAAFKYFDTTIDRKRYTSTKEVLDATLIHQSITGLYETRIDLSQLGGDGGGGGEAAAKGGSGGVPWILKKPLELTIKLDLEEQQGTLLNNSILSKKGKEELKQLFEKYSALWQSWENQVGHRRIRPHKIATGTVKPTPQKQYHINPKAKPDIQIVINDLLKQGVLIQKESTMNTPVYPVPKPNGRWRMVLDYRAVNKVTPLIAVQNQHSYGILGSLFKGRYKTTIDLSNGFWAHPIVPEDYWITAFTWQGKQYCWTVLPQGFLNSPGLFNGDVVDLLQGIPNVEVYVDDVYISHDSEKEHLEYLDILFNRLKEAGYIISLKKSNIANSIVDFLGFQITNEGRGLTDTFKEKLENITAPTTLKQLQSILGKLNFARNFIPDFTELIAPLYALIPKSPKNYVPWQIEHSTTLETLITKLNGAEYLQGRKGDKTLIMKVNASYTTGYIRYYNEGEKKPISYVSIVFSKTELKFTELEKLLTTVHKGLLKALDLSMGQNIHVYSPIVSMQNIQKTPQTAKKALASRWLSWLSYLEDPRIRFFYDPQMPALKDLPAVDTGKDNKKHPSNFQHIFYTDGSAITSPTKEGHLNAGMGIVYFINKDGNLQKQQEWSISLGNHTAQFAEIAAFEFALKKCLPLGGNILVVTDSNYVAKAYNEELDVWASNGFVNNRKKPLKHISKWKSVADLKRLRPDVVVTHEPGHQKLDSSPHAYGNNLADQLATQASFKVHAGKRTADGSEFEKRTADGSEFESPKKKAKVE

SEQ ID NO: 1115 - protein, 2208 aa, synthetic construct
MPAAKRVKLDGGDKKYSIGLDIGTNSVGWAVITDEYKVPSKKFKVLGNTDRHSIKKNLIGALLFDSGETAEATRLKRTARRRYTRRKNRICYLQEIFSNEMAKVDDSFFHRLEESFLVEEDKKHERHPIFGNIVDEVAYHEKYPTIYHLRKKLVDSTDKADLRLIYLALAHMIKFRGHFLIEGDLNPDNSDVDKLFIQLVQTYNQLFEENPINASGVDAKAILSARLSKSRRLENLIAQLPGEKKNGLFGNLIALSLGLTPNFKSNFDLAEDAKLQLSKDTYDDDLDNLLAQIGDQYADLFLAAKNLSDAILLSDILRVNTEITKAPLSASMIKRYDEHHQDLTLLKALVRQQLPEKYKEIFFDQSKNGYAGYIDGGASQEEFYKFIKPILEKMDGTEELLVKLNREDLLRKQRTFDNGSIPHQIHLGELHAILRRQEDFYPFLKDNREKIEKILTFRIPYYVGPLARGNSRFAWMTRKSEETITPWNFEEVVDKGASAQSFIERMTNFDKNLPNEKVLPKHSLLYEYFTVYNELTKVKYVTEGMRKPAFLSGEQKKAIVDLLFKTNRKVTVKQLKEDYFKKIECFDSVEISGVEDRFNASLGTYHDLLKIIKDKDFLDNEENEDILEDIVLTLTLFEDREMIEERLKTYAHLFDDKVMKQLKRRRYTGWGRLSRKLINGIRDKQSGKTILDFLKSDGFANRNFMQLIHDDSLTFKEDIQKAQVSGQGDSLHEHIANLAGSPAIKKGILQTVKVVDELVKVMGRHKPENIVIEMARENQTTQKGQKNSRERMKRIEEGIKELGSQILKEHPVENTQLQNEKLYLYYLQNGRDMYVDQELDINRLSDYDVDHIVPQSFLKDDSIDNKVLTRSDKARGKSDNVPSEEVVKKMKNYWRQLLNAKLITQRKFDNLTKAERGGLSELDKAGFIKRQLVETRQITKHVAQILDSRMNTKYDENDKLIREVKVITLKSKLVSDFRKDFQFYKVREINNYHHAHDAYLNAVVGTALIKKYPKLESEFVYGDYKVYDVRKMIAKSEQEIGKATAKYFFYSNIMNFFKTEITLANGEIRKRPLIETNGETGEIVWDKGRDFATVRKVLSMPQVNIVKKTEVQTGGFSKESILPKRNSDKLIARKKDWDPKKYGGFDSPTVAYSVLVVAKVEKGKSKKLKSVKELLGITIMERSSFEKNPIDFLEAKGYKEVKKDLIIKLPKYSLFELENGRKRMLASAGELQKGNELALPSKYVNFLYLASHYEKLKGSPEDNEQKQLFVEQHKHYLDEIIEQISEFSKRVILADANLDKVLSAYNKHRDKPIREQAENIIHLFTLTNLGAPAAFKYFDTTIDRKRYTSTKEVLDATLIHQSITGLYETRIDLSQLGGDGGAEAAAKEAAAKEAAAKEAAAKALEAEAAAKEAAAKEAAAKEAAAKAGGMDLLKPLTVERKGVKIKGYWNSQADITCVPKDLLQGEEPVRQQNVTTIHGTQEGDVYYVNLKIDGRRINTEVIGTTLDYAIITPGDVPWILKKPLELTIKLDLEEQQGTLLNNSILSKKGKEELKQLFEKYSALWQSWENQVGHRRIRPHKIATGTVKPTPQKQYHINPKAKPDIQIVINDLLKQGVLIQKESTMNTPVYPVPKPNGRWRMVLDYRAVNKVTPLIAVQNQHSYGILGSLFKGRYKTTIDLSNGFWAHPIVPEDYWITAFTWQGKQYCWTVLPQGFLNSPGLFNGDVVDLLQGIPNVEVYVDDVYISHDSEKEHLEYLDILFNRLKEAGYIISLKKSNIANSIVDFLGFQITNEGRGLTDTFKEKLENITAPTTLKQLQSILGLLNFARNFIPDFTELIAPLYALIPKSPKNYVPWQIEHSTTLETLITKLNGAEYLQGRKGDKTLIMKVNASYTTGYIRYYNEGEKKPISYVSIVFSKTELKFTELEKLLTTVHKGLLKALDLSMGQNIHVYSPIVSMQNIQKTPQTAKKALASRWLSWLSYLEDPRIRFFYDPQMPALKDLPAVDTGKDNKKHPSNFQHIFYTDGSAITSPTKEGHLNAGMGIVYFINKDGNLQKQQEWSISLGNHTAQFAEIAAFEFALKKCLPLGGNILVVTDSNYVAKAYNEELDVWASNGFVNNRKKPLKHISKWKSVADLKRLRPDVVVTHEPGHQKLDSSPHAYGNNLADQLATQASFKVHAGKRTADGSEFEKRTADGSEFESPKKKAKVE

SEQ ID NO: 1116 - protein, 2182 aa, synthetic construct
MPAAKRVKLDGGDKKYSIGLDIGTNSVGWAVITDEYKVPSKKFKVLGNTDRHSIKKNLIGALLFDSGETAEATRLKRTARRRYTRRKNRICYLQEIFSNEMAKVDDSFFHRLEESFLVEEDKKHERHPIFGNIVDEVAYHEKYPTIYHLRKKLVDSTDKADLRLIYLALAHMIKFRGHFLIEGDLNPDNSDVDKLFIQLVQTYNQLFEENPINASGVDAKAILSARLSKSRRLENLIAQLPGEKKNGLFGNLIALSLGLTPNFKSNFDLAEDAKLQLSKDTYDDDLDNLLAQIGDQYADLFLAAKNLSDAILLSDILRVNTEITKAPLSASMIKRYDEHHQDLTLLKALVRQQLPEKYKEIFFDQSKNGYAGYIDGGASQEEFYKFIKPILEKMDGTEELLVKLNREDLLRKQRTFDNGSIPHQIHLGELHAILRRQEDFYPFLKDNREKIEKILTFRIPYYVGPLARGNSRFAWMTRKSEETITPWNFEEVVDKGASAQSFIERMTNFDKNLPNEKVLPKHSLLYEYFTVYNELTKVKYVTEGMRKPAFLSGEQKKAIVDLLFKTNRKVTVKQLKEDYFKKIECFDSVEISGVEDRFNASLGTYHDLLKIIKDKDFLDNEENEDILEDIVLTLTLFEDREMIEERLKTYAHLFDDKVMKQLKRRRYTGWGRLSRKLINGIRDKQSGKTILDFLKSDGFANRNFMQLIHDDSLTFKEDIQKAQVSGQGDSLHEHIANLAGSPAIKKGILQTVKVVDELVKVMGRHKPENIVIEMARENQTTQKGQKNSRERMKRIEEGIKELGSQILKEHPVENTQLQNEKLYLYYLQNGRDMYVDQELDINRLSDYDVDHIVPQSFLKDDSIDNKVLTRSDKARGKSDNVPSEEVVKKMKNYWRQLLNAKLITQRKFDNLTKAERGGLSELDKAGFIKRQLVETRQITKHVAQILDSRMNTKYDENDKLIREVKVITLKSKLVSDFRKDFQFYKVREINNYHHAHDAYLNAVVGTALIKKYPKLESEFVYGDYKVYDVRKMIAKSEQEIGKATAKYFFYSNIMNFFKTEITLANGEIRKRPLIETNGETGEIVWDKGRDFATVRKVLSMPQVNIVKKTEVQTGGFSKESILPKRNSDKLIARKKDWDPKKYGGFDSPTVAYSVLVVAKVEKGKSKKLKSVKELLGITIMERSSFEKNPIDFLEAKGYKEVKKDLIIKLPKYSLFELENGRKRMLASAGELQKGNELALPSKYVNFLYLASHYEKLKGSPEDNEQKQLFVEQHKHYLDEIIEQISEFSKRVILADANLDKVLSAYNKHRDKPIREQAENIIHLFTLTNLGAPAAFKYFDTTIDRKRYTSTKEVLDATLIHQSITGLYETRIDLSQLGGDGGEAAAKEAAAKEAAAKEAAAKGGMDLLKPLTVERKGVKIKGYWNSQADITCVPKDLLQGEEPVRQQNVTTIHGTQEGDVYYVNLKIDGRRINTEVIGTTLDYAIITPGDVPWILKKPLELTIKLDLEEQQGTLLNNSILSKKGKEELKQLFEKYSALWQSWENQVGHRRIRPHKIATGTVKPTPQKQYHINPKAKPDIQIVINDLLKQGVLIQKESTMNTPVYPVPKPNGRWRMVLDYRAVNKVTPLIAVQNQHSYGILGSLFKGRYKTTIDLSNGFWAHPIVPEDYWITAFTWQGKQYCWTVLPQGFLNSPGLFNGDVVDLLQGIPNVEVYVDDVYISHDSEKEHLEYLDILFNRLKEAGYIISLKKSNIANSIVDFLGFQITNEGRGLTDTFKEKLENITAPTTLKQLQSILGLLNFARNFIPDFTELIAPLYALIPKSPKNYVPWQIEHSTTLETLITKLNGAEYLQGRKGDKTLIMKVNASYTTGYIRYYNEGEKKPISYVSIVFSKTELKFTELEKLLTTVHKGLLKALDLSMGQNIHVYSPIVSMQNIQKTPQTAKKALASRWLSWLSYLEDPRIRFFYDPQMPALKDLPAVDTGKDNKKHPSNFQHIFYTDGSAITSPTKEGHLNAGMGIVYFINKDGNLQKQQEWSISLGNHTAQFAEIAAFEFALKKCLPLGGNILVVTDSNYVAKAYNEELDVWASNGFVNNRKKPLKHISKWKSVADLKRLRPDVVVTHEPGHQKLDSSPHAYGNNLADQLATQASFKVHAGKRTADGSEFEKRTADGSEFESPKKKAKVE

SEQ ID NO: 1117 - protein, 2171 aa, synthetic construct
MPAAKRVKLDGGDKKYSIGLDIGTNSVGWAVITDEYKVPSKKFKVLGNTDRHSIKKNLIGALLFDSGETAEATRLKRTARRRYTRRKNRICYLQEIFSNEMAKVDDSFFHRLEESFLVEEDKKHERHPIFGNIVDEVAYHEKYPTIYHLRKKLVDSTDKADLRLIYLALAHMIKFRGHFLIEGDLNPDNSDVDKLFIQLVQTYNQLFEENPINASGVDAKAILSARLSKSRRLENLIAQLPGEKKNGLFGNLIALSLGLTPNFKSNFDLAEDAKLQLSKDTYDDDLDNLLAQIGDQYADLFLAAKNLSDAILLSDILRVNTEITKAPLSASMIKRYDEHHQDLTLLKALVRQQLPEKYKEIFFDQSKNGYAGYIDGGASQEEFYKFIKPILEKMDGTEELLVKLNREDLLRKQRTFDNGSIPHQIHLGELHAILRRQEDFYPFLKDNREKIEKILTFRIPYYVGPLARGNSRFAWMTRKSEETITPWNFEEVVDKGASAQSFIERMTNFDKNLPNEKVLPKHSLLYEYFTVYNELTKVKYVTEGMRKPAFLSGEQKKAIVDLLFKTNRKVTVKQLKEDYFKKIECFDSVEISGVEDRFNASLGTYHDLLKIIKDKDFLDNEENEDILEDIVLTLTLFEDREMIEERLKTYAHLFDDKVMKQLKRRRYTGWGRLSRKLINGIRDKQSGKTILDFLKSDGFANRNFMQLIHDDSLTFKEDIQKAQVSGQGDSLHEHIANLAGSPAIKKGILQTVKVVDELVKVMGRHKPENIVIEMARENQTTQKGQKNSRERMKRIEEGIKELGSQILKEHPVENTQLQNEKLYLYYLQNGRDMYVDQELDINRLSDYDVDHIVPQSFLKDDSIDNKVLTRSDKARGKSDNVPSEEVVKKMKNYWRQLLNAKLITQRKFDNLTKAERGGLSELDKAGFIKRQLVETRQITKHVAQILDSRMNTKYDENDKLIREVKVITLKSKLVSDFRKDFQFYKVREINNYHHAHDAYLNAVVGTALIKKYPKLESEFVYGDYKVYDVRKMIAKSEQEIGKATAKYFFYSNIMNFFKTEITLANGEIRKRPLIETNGETGEIVWDKGRDFATVRKVLSMPQVNIVKKTEVQTGGFSKESILPKRNSDKLIARKKDWDPKKYGGFDSPTVAYSVLVVAKVEKGKSKKLKSVKELLGITIMERSSFEKNPIDFLEAKGYKEVKKDLIIKLPKYSLFELENGRKRMLASAGELQKGNELALPSKYVNFLYLASHYEKLKGSPEDNEQKQLFVEQHKHYLDEIIEQISEFSKRVILADANLDKVLSAYNKHRDKPIREQAENIIHLFTLTNLGAPAAFKYFDTTIDRKRYTSTKEVLDATLIHQSITGLYETRIDLSQLGGDGGGSSPAPGGGGGMDLLKPLTVERKGVKIKGYWNSQADITCVPKDLLQGEEPVRQQNVTTIHGTQEGDVYYVNLKIDGRRINTEVIGTTLDYAIITPGDVPWILKKPLELTIKLDLEEQQGTLLNNSILSKKGKEELKQLFEKYSALWQSWENQVGHRRIRPHKIATGTVKPTPQKQYHINPKAKPDIQIVINDLLKQGVLIQKESTMNTPVYPVPKPNGRWRMVLDYRAVNKVTPLIAVQNQHSYGILGSLFKGRYKTTIDLSNGFWAHPIVPEDYWITAFTWQGKQYCWTVLPQGFLNSPGLFNGDVVDLLQGIPNVEVYVDDVYISHDSEKEHLEYLDILFNRLKEAGYIISLKKSNIANSIVDFLGFQITNEGRGLTDTFKEKLENITAPTTLKQLQSILGLLNFARNFIPDFTELIAPLYALIPKSPKNYVPWQIEHSTTLETLITKLNGAEYLQGRKGDKTLIMKVNASYTTGYIRYYNEGEKKPISYVSIVFSKTELKFTELEKLLTTVHKGLLKALDLSMGQNIHVYSPIVSMQNIQKTPQTAKKALASRWLSWLSYLEDPRIRFFYDPQMPALKDLPAVDTGKDNKKHPSNFQHIFYTDGSAITSPTKEGHLNAGMGIVYFINKDGNLQKQQEWSISLGNHTAQFAEIAAFEFALKKCLPLGGNILVVTDSNYVAKAYNEELDVWASNGFVNNRKKPLKHISKWKSVADLKRLRPDVVVTHEPGHQKLDSSPHAYGNNLADQLATQASFKVHAGKRTADGSEFEKRTADGSEFESPKKKAKVE

SEQ ID NO: 1118 - protein, 2173 aa, synthetic construct
MPAAKRVKLDGGDKKYSIGLDIGTNSVGWAVITDEYKVPSKKFKVLGNTDRHSIKKNLIGALLFDSGETAEATRLKRTARRRYTRRKNRICYLQEIFSNEMAKVDDSFFHRLEESFLVEEDKKHERHPIFGNIVDEVAYHEKYPTIYHLRKKLVDSTDKADLRLIYLALAHMIKFRGHFLIEGDLNPDNSDVDKLFIQLVQTYNQLFEENPINASGVDAKAILSARLSKSRRLENLIAQLPGEKKNGLFGNLIALSLGLTPNFKSNFDLAEDAKLQLSKDTYDDDLDNLLAQIGDQYADLFLAAKNLSDAILLSDILRVNTEITKAPLSASMIKRYDEHHQDLTLLKALVRQQLPEKYKEIFFDQSKNGYAGYIDGGASQEEFYKFIKPILEKMDGTEELLVKLNREDLLRKQRTFDNGSIPHQIHLGELHAILRRQEDFYPFLKDNREKIEKILTFRIPYYVGPLARGNSRFAWMTRKSEETITPWNFEEVVDKGASAQSFIERMTNFDKNLPNEKVLPKHSLLYEYFTVYNELTKVKYVTEGMRKPAFLSGEQKKAIVDLLFKTNRKVTVKQLKEDYFKKIECFDSVEISGVEDRFNASLGTYHDLLKIIKDKDFLDNEENEDILEDIVLTLTLFEDREMIEERLKTYAHLFDDKVMKQLKRRRYTGWGRLSRKLINGIRDKQSGKTILDFLKSDGFANRNFMQLIHDDSLTFKEDIQKAQVSGQGDSLHEHIANLAGSPAIKKGILQTVKVVDELVKVMGRHKPENIVIEMARENQTTQKGQKNSRERMKRIEEGIKELGSQILKEHPVENTQLQNEKLYLYYLQNGRDMYVDQELDINRLSDYDVDHIVPQSFLKDDSIDNKVLTRSDKARGKSDNVPSEEVVKKMKNYWRQLLNAKLITQRKFDNLTKAERGGLSELDKAGFIKRQLVETRQITKHVAQILDSRMNTKYDENDKLIREVKVITLKSKLVSDFRKDFQFYKVREINNYHHAHDAYLNAVVGTALIKKYPKLESEFVYGDYKVYDVRKMIAKSEQEIGKATAKYFFYSNIMNFFKTEITLANGEIRKRPLIETNGETGEIVWDKGRDFATVRKVLSMPQVNIVKKTEVQTGGFSKESILPKRNSDKLIARKKDWDPKKYGGFDSPTVAYSVLVVAKVEKGKSKKLKSVKELLGITIMERSSFEKNPIDFLEAKGYKEVKKDLIIKLPKYSLFELENGRKRMLASAGELQKGNELALPSKYVNFLYLASHYEKLKGSPEDNEQKQLFVEQHKHYLDEIIEQISEFSKRVILADANLDKVLSAYNKHRDKPIREQAENIIHLFTLTNLGAPAAFKYFDTTIDRKRYTSTKEVLDATLIHQSITGLYETRIDLSQLGGDGGPAPEAAAKGGGGGMDLLKPLTVERKGVKIKGYWNSQADITCVPKDLLQGEEPVRQQNVTTIHGTQEGDVYYVNLKIDGRRINTEVIGTTLDYAIITPGDVPWILKKPLELTIKLDLEEQQGTLLNNSILSKKGKEELKQLFEKYSALWQSWENQVGHRRIRPHKIATGTVKPTPQKQYHINPKAKPDIQIVINDLLKQGVLIQKESTMNTPVYPVPKPNGRWRMVLDYRAVNKVTPLIAVQNQHSYGILGSLFKGRYKTTIDLSNGFWAHPIVPEDYWITAFTWQGKQYCWTVLPQGFLNSPGLFNGDVVDLLQGIPNVEVYVDDVYISHDSEKEHLEYLDILFNRLKEAGYIISLKKSNIANSIVDFLGFQITNEGRGLTDTFKEKLENITAPTTLKQLQSILGLLNFARNFIPDFTELIAPLYALIPKSPKNYVPWQIEHSTTLETLITKLNGAEYLQGRKGDKTLIMKVNASYTTGYIRYYNEGEKKPISYVSIVFSKTELKFTELEKLLTTVHKGLLKALDLSMGQNIHVYSPIVSMQNIQKTPQTAKKALASRWLSWLSYLEDPRIRFFYDPQMPALKDLPAVDTGKDNKKHPSNFQHIFYTDGSAITSPTKEGHLNAGMGIVYFINKDGNLQKQQEWSISLGNHTAQFAEIAAFEFALKKCLPLGGNILVVTDSNYVAKAYNEELDVWASNGFVNNRKKPLKHISKWKSVADLKRLRPDVVVTHEPGHQKLDSSPHAYGNNLADQLATQASFKVHAGKRTADGSEFEKRTADGSEFESPKKKAKVE

SEQ ID NO: 1119 - protein, 2182 aa, synthetic construct
MPAAKRVKLDGGDKKYSIGLDIGTNSVGWAVITDEYKVPSKKFKVLGNTDRHSIKKNLIGALLFDSGETAEATRLKRTARRRYTRRKNRICYLQEIFSNEMAKVDDSFFHRLEESFLVEEDKKHERHPIFGNIVDEVAYHEKYPTIYHLRKKLVDSTDKADLRLIYLALAHMIKFRGHFLIEGDLNPDNSDVDKLFIQLVQTYNQLFEENPINASGVDAKAILSARLSKSRRLENLIAQLPGEKKNGLFGNLIALSLGLTPNFKSNFDLAEDAKLQLSKDTYDDDLDNLLAQIGDQYADLFLAAKNLSDAILLSDILRVNTEITKAPLSASMIKRYDEHHQDLTLLKALVRQQLPEKYKEIFFDQSKNGYAGYIDGGASQEEFYKFIKPILEKMDGTEELLVKLNREDLLRKQRTFDNGSIPHQIHLGELHAILRRQEDFYPFLKDNREKIEKILTFRIPYYVGPLARGNSRFAWMTRKSEETITPWNFEEVVDKGASAQSFIERMTNFDKNLPNEKVLPKHSLLYEYFTVYNELTKVKYVTEGMRKPAFLSGEQKKAIVDLLFKTNRKVTVKQLKEDYFKKIECFDSVEISGVEDRFNASLGTYHDLLKIIKDKDFLDNEENEDILEDIVLTLTLFEDREMIEERLKTYAHLFDDKVMKQLKRRRYTGWGRLSRKLINGIRDKQSGKTILDFLKSDGFANRNFMQLIHDDSLTFKEDIQKAQVSGQGDSLHEHIANLAGSPAIKKGILQTVKVVDELVKVMGRHKPENIVIEMARENQTTQKGQKNSRERMKRIEEGIKELGSQILKEHPVENTQLQNEKLYLYYLQNGRDMYVDQELDINRLSDYDVDHIVPQSFLKDDSIDNKVLTRSDKARGKSDNVPSEEVVKKMKNYWRQLLNAKLITQRKFDNLTKAERGGLSELDKAGFIKRQLVETRQITKHVAQILDSRMNTKYDENDKLIREVKVITLKSKLVSDFRKDFQFYKVREINNYHHAHDAYLNAVVGTALIKKYPKLESEFVYGDYKVYDVRKMIAKSEQEIGKATAKYFFYSNIMNFFKTEITLANGEIRKRPLIETNGETGEIVWDKGRDFATVRKVLSMPQVNIVKKTEVQTGGFSKESILPKRNSDKLIARKKDWDPKKYGGFDSPTVAYSVLVVAKVEKGKSKKLKSVKELLGITIMERSSFEKNPIDFLEAKGYKEVKKDLIIKLPKYSLFELENGRKRMLASAGELQKGNELALPSKYVNFLYLASHYEKLKGSPEDNEQKQLFVEQHKHYLDEIIEQISEFSKRVILADANLDKVLSAYNKHRDKPIREQAENIIHLFTLTNLGAPAAFKYFDTTIDRKRYTSTKEVLDATLIHQSITGLYETRIDLSQLGGDGGGGGGSGGGGSGGGGSGGGGSGGMDLLKPLTVERKGVKIKGYWNSQADITCVPKDLLQGEEPVRQQNVTTIHGTQEGDVYYVNLKIDGRRINTEVIGTTLDYAIITPGDVPWILKKPLELTIKLDLEEQQGTLLNNSILSKKGKEELKQLFEKYSALWQSWENQVGHRRIRPHKIATGTVKPTPQKQYHINPKAKPDIQIVINDLLKQGVLIQKESTMNTPVYPVPKPNGRWRMVLDYRAVNKVTPLIAVQNQHSYGILGSLFKGRYKTTIDLSNGFWAHPIVPEDYWITAFTWQGKQYCWTVLPQGFLNSPGLFNGDVVDLLQGIPNVEVYVDDVYISHDSEKEHLEYLDILFNRLKEAGYIISLKKSNIANSIVDFLGFQITNEGRGLTDTFKEKLENITAPTTLKQLQSILGLLNFARNFIPDFTELIAPLYALIPKSPKNYVPWQIEHSTTLETLITKLNGAEYLQGRKGDKTLIMKVNASYTTGYIRYYNEGEKKPISYVSIVFSKTELKFTELEKLLTTVHKGLLKALDLSMGQNIHVYSPIVSMQNIQKTPQTAKKALASRWLSWLSYLEDPRIRFFYDPQMPALKDLPAVDTGKDNKKHPSNFQHIFYTDGSAITSPTKEGHLNAGMGIVYFINKDGNLQKQQEWSISLGNHTAQFAEIAAFEFALKKCLPLGGNILVVTDSNYVAKAYNEELDVWASNGFVNNRKKPLKHISKWKSVADLKRLRPDVVVTHEPGHQKLDSSPHAYGNNLADQLATQASFKVHAGKRTADGSEFEKRTADGSEFESPKKKAKVE

SEQ ID NO: 1120 - protein, 2171 aa, synthetic construct
MPAAKRVKLDGGDKKYSIGLDIGTNSVGWAVITDEYKVPSKKFKVLGNTDRHSIKKNLIGALLFDSGETAEATRLKRTARRRYTRRKNRICYLQEIFSNEMAKVDDSFFHRLEESFLVEEDKKHERHPIFGNIVDEVAYHEKYPTIYHLRKKLVDSTDKADLRLIYLALAHMIKFRGHFLIEGDLNPDNSDVDKLFIQLVQTYNQLFEENPINASGVDAKAILSARLSKSRRLENLIAQLPGEKKNGLFGNLIALSLGLTPNFKSNFDLAEDAKLQLSKDTYDDDLDNLLAQIGDQYADLFLAAKNLSDAILLSDILRVNTEITKAPLSASMIKRYDEHHQDLTLLKALVRQQLPEKYKEIFFDQSKNGYAGYIDGGASQEEFYKFIKPILEKMDGTEELLVKLNREDLLRKQRTFDNGSIPHQIHLGELHAILRRQEDFYPFLKDNREKIEKILTFRIPYYVGPLARGNSRFAWMTRKSEETITPWNFEEVVDKGASAQSFIERMTNFDKNLPNEKVLPKHSLLYEYFTVYNELTKVKYVTEGMRKPAFLSGEQKKAIVDLLFKTNRKVTVKQLKEDYFKKIECFDSVEISGVEDRFNASLGTYHDLLKIIKDKDFLDNEENEDILEDIVLTLTLFEDREMIEERLKTYAHLFDDKVMKQLKRRRYTGWGRLSRKLINGIRDKQSGKTILDFLKSDGFANRNFMQLIHDDSLTFKEDIQKAQVSGQGDSLHEHIANLAGSPAIKKGILQTVKVVDELVKVMGRHKPENIVIEMARENQTTQKGQKNSRERMKRIEEGIKELGSQILKEHPVENTQLQNEKLYLYYLQNGRDMYVDQELDINRLSDYDVDHIVPQSFLKDDSIDNKVLTRSDKARGKSDNVPSEEVVKKMKNYWRQLLNAKLITQRKFDNLTKAERGGLSELDKAGFIKRQLVETRQITKHVAQILDSRMNTKYDENDKLIREVKVITLKSKLVSDFRKDFQFYKVREINNYHHAHDAYLNAVVGTALIKKYPKLESEFVYGDYKVYDVRKMIAKSEQEIGKATAKYFFYSNIMNFFKTEITLANGEIRKRPLIETNGETGEIVWDKGRDFATVRKVLSMPQVNIVKKTEVQTGGFSKESILPKRNSDKLIARKKDWDPKKYGGFDSPTVAYSVLVVAKVEKGKSKKLKSVKELLGITIMERSSFEKNPIDFLEAKGYKEVKKDLIIKLPKYSLFELENGRKRMLASAGELQKGNELALPSKYVNFLYLASHYEKLKGSPEDNEQKQLFVEQHKHYLDEIIEQISEFSKRVILADANLDKVLSAYNKHRDKPIREQAENIIHLFTLTNLGAPAAFKYFDTTIDRKRYTSTKEVLDATLIHQSITGLYETRIDLSQLGGDGGPAPGGSGSSGGMDLLKPLTVERKGVKIKGYWNSQADITCVPKDLLQGEEPVRQQNVTTIHGTQEGDVYYVNLKIDGRRINTEVIGTTLDYAIITPGDVPWILKKPLELTIKLDLEEQQGTLLNNSILSKKGKEELKQLFEKYSALWQSWENQVGHRRIRPHKIATGTVKPTPQKQYHINPKAKPDIQIVINDLLKQGVLIQKESTMNTPVYPVPKPNGRWRMVLDYRAVNKVTPLIAVQNQHSYGILGSLFKGRYKTTIDLSNGFWAHPIVPEDYWITAFTWQGKQYCWTVLPQGFLNSPGLFNGDVVDLLQGIPNVEVYVDDVYISHDSEKEHLEYLDILFNRLKEAGYIISLKKSNIANSIVDFLGFQITNEGRGLTDTFKEKLENITAPTTLKQLQSILGLLNFARNFIPDFTELIAPLYALIPKSPKNYVPWQIEHSTTLETLITKLNGAEYLQGRKGDKTLIMKVNASYTTGYIRYYNEGEKKPISYVSIVFSKTELKFTELEKLLTTVHKGLLKALDLSMGQNIHVYSPIVSMQNIQKTPQTAKKALASRWLSWLSYLEDPRIRFFYDPQMPALKDLPAVDTGKDNKKHPSNFQHIFYTDGSAITSPTKEGHLNAGMGIVYFINKDGNLQKQQEWSISLGNHTAQFAEIAAFEFALKKCLPLGGNILVVTDSNYVAKAYNEELDVWASNGFVNNRKKPLKHISKWKSVADLKRLRPDVVVTHEPGHQKLDSSPHAYGNNLADQLATQASFKVHAGKRTADGSEFEKRTADGSEFESPKKKAKVE

SEQ ID NO: 1121 - protein, 2173 aa, synthetic construct
MPAAKRVKLDGGDKKYSIGLDIGTNSVGWAVITDEYKVPSKKFKVLGNTDRHSIKKNLIGALLFDSGETAEATRLKRTARRRYTRRKNRICYLQEIFSNEMAKVDDSFFHRLEESFLVEEDKKHERHPIFGNIVDEVAYHEKYPTIYHLRKKLVDSTDKADLRLIYLALAHMIKFRGHFLIEGDLNPDNSDVDKLFIQLVQTYNQLFEENPINASGVDAKAILSARLSKSRRLENLIAQLPGEKKNGLFGNLIALSLGLTPNFKSNFDLAEDAKLQLSKDTYDDDLDNLLAQIGDQYADLFLAAKNLSDAILLSDILRVNTEITKAPLSASMIKRYDEHHQDLTLLKALVRQQLPEKYKEIFFDQSKNGYAGYIDGGASQEEFYKFIKPILEKMDGTEELLVKLNREDLLRKQRTFDNGSIPHQIHLGELHAILRRQEDFYPFLKDNREKIEKILTFRIPYYVGPLARGNSRFAWMTRKSEETITPWNFEEVVDKGASAQSFIERMTNFDKNLPNEKVLPKHSLLYEYFTVYNELTKVKYVTEGMRKPAFLSGEQKKAIVDLLFKTNRKVTVKQLKEDYFKKIECFDSVEISGVEDRFNASLGTYHDLLKIIKDKDFLDNEENEDILEDIVLTLTLFEDREMIEERLKTYAHLFDDKVMKQLKRRRYTGWGRLSRKLINGIRDKQSGKTILDFLKSDGFANRNFMQLIHDDSLTFKEDIQKAQVSGQGDSLHEHIANLAGSPAIKKGILQTVKVVDELVKVMGRHKPENIVIEMARENQTTQKGQKNSRERMKRIEEGIKELGSQILKEHPVENTQLQNEKLYLYYLQNGRDMYVDQELDINRLSDYDVDHIVPQSFLKDDSIDNKVLTRSDKARGKSDNVPSEEVVKKMKNYWRQLLNAKLITQRKFDNLTKAERGGLSELDKAGFIKRQLVETRQITKHVAQILDSRMNTKYDENDKLIREVKVITLKSKLVSDFRKDFQFYKVREINNYHHAHDAYLNAVVGTALIKKYPKLESEFVYGDYKVYDVRKMIAKSEQEIGKATAKYFFYSNIMNFFKTEITLANGEIRKRPLIETNGETGEIVWDKGRDFATVRKVLSMPQVNIVKKTEVQTGGFSKESILPKRNSDKLIARKKDWDPKKYGGFDSPTVAYSVLVVAKVEKGKSKKLKSVKELLGITIMERSSFEKNPIDFLEAKGYKEVKKDLIIKLPKYSLFELENGRKRMLASAGELQKGNELALPSKYVNFLYLASHYEKLKGSPEDNEQKQLFVEQHKHYLDEIIEQISEFSKRVILADANLDKVLSAYNKHRDKPIREQAENIIHLFTLTNLGAPAAFKYFDTTIDRKRYTSTKEVLDATLIHQSITGLYETRIDLSQLGGDGGEAAAKPAPGSSGGMDLLKPLTVERKGVKIKGYWNSQADITCVPKDLLQGEEPVRQQNVTTIHGTQEGDVYYVNLKIDGRRINTEVIGTTLDYAIITPGDVPWILKKPLELTIKLDLEEQQGTLLNNSILSKKGKEELKQLFEKYSALWQSWENQVGHRRIRPHKIATGTVKPTPQKQYHINPKAKPDIQIVINDLLKQGVLIQKESTMNTPVYPVPKPNGRWRMVLDYRAVNKVTPLIAVQNQHSYGILGSLFKGRYKTTIDLSNGFWAHPIVPEDYWITAFTWQGKQYCWTVLPQGFLNSPGLFNGDVVDLLQGIPNVEVYVDDVYISHDSEKEHLEYLDILFNRLKEAGYIISLKKSNIANSIVDFLGFQITNEGRGLTDTFKEKLENITAPTTLKQLQSILGLLNFARNFIPDFTELIAPLYALIPKSPKNYVPWQIEHSTTLETLITKLNGAEYLQGRKGDKTLIMKVNASYTTGYIRYYNEGEKKPISYVSIVFSKTELKFTELEKLLTTVHKGLLKALDLSMGQNIHVYSPIVSMQNIQKTPQTAKKALASRWLSWLSYLEDPRIRFFYDPQMPALKDLPAVDTGKDNKKHPSNFQHIFYTDGSAITSPTKEGHLNAGMGIVYFINKDGNLQKQQEWSISLGNHTAQFAEIAAFEFALKKCLPLGGNILVVTDSNYVAKAYNEELDVWASNGFVNNRKKPLKHISKWKSVADLKRLRPDVVVTHEPGHQKLDSSPHAYGNNLADQLATQASFKVHAGKRTADGSEFEKRTADGSEFESPKKKAKVE

SEQ ID NO: 1122 - protein, 2172 aa, synthetic construct
MPAAKRVKLDGGDKKYSIGLDIGTNSVGWAVITDEYKVPSKKFKVLGNTDRHSIKKNLIGALLFDSGETAEATRLKRTARRRYTRRKNRICYLQEIFSNEMAKVDDSFFHRLEESFLVEEDKKHERHPIFGNIVDEVAYHEKYPTIYHLRKKLVDSTDKADLRLIYLALAHMIKFRGHFLIEGDLNPDNSDVDKLFIQLVQTYNQLFEENPINASGVDAKAILSARLSKSRRLENLIAQLPGEKKNGLFGNLIALSLGLTPNFKSNFDLAEDAKLQLSKDTYDDDLDNLLAQIGDQYADLFLAAKNLSDAILLSDILRVNTEITKAPLSASMIKRYDEHHQDLTLLKALVRQQLPEKYKEIFFDQSKNGYAGYIDGGASQEEFYKFIKPILEKMDGTEELLVKLNREDLLRKQRTFDNGSIPHQIHLGELHAILRRQEDFYPFLKDNREKIEKILTFRIPYYVGPLARGNSRFAWMTRKSEETITPWNFEEVVDKGASAQSFIERMTNFDKNLPNEKVLPKHSLLYEYFTVYNELTKVKYVTEGMRKPAFLSGEQKKAIVDLLFKTNRKVTVKQLKEDYFKKIECFDSVEISGVEDRFNASLGTYHDLLKIIKDKDFLDNEENEDILEDIVLTLTLFEDREMIEERLKTYAHLFDDKVMKQLKRRRYTGWGRLSRKLINGIRDKQSGKTILDFLKSDGFANRNFMQLIHDDSLTFKEDIQKAQVSGQGDSLHEHIANLAGSPAIKKGILQTVKVVDELVKVMGRHKPENIVIEMARENQTTQKGQKNSRERMKRIEEGIKELGSQILKEHPVENTQLQNEKLYLYYLQNGRDMYVDQELDINRLSDYDVDHIVPQSFLKDDSIDNKVLTRSDKARGKSDNVPSEEVVKKMKNYWRQLLNAKLITQRKFDNLTKAERGGLSELDKAGFIKRQLVETRQITKHVAQILDSRMNTKYDENDKLIREVKVITLKSKLVSDFRKDFQFYKVREINNYHHAHDAYLNAVVGTALIKKYPKLESEFVYGDYKVYDVRKMIAKSEQEIGKATAKYFFYSNIMNFFKTEITLANGEIRKRPLIETNGETGEIVWDKGRDFATVRKVLSMPQVNIVKKTEVQTGGFSKESILPKRNSDKLIARKKDWDPKKYGGFDSPTVAYSVLVVAKVEKGKSKKLKSVKELLGITIMERSSFEKNPIDFLEAKGYKEVKKDLIIKLPKYSLFELENGRKRMLASAGELQKGNELALPSKYVNFLYLASHYEKLKGSPEDNEQKQLFVEQHKHYLDEIIEQISEFSKRVILADANLDKVLSAYNKHRDKPIREQAENIIHLFTLTNLGAPAAFKYFDTTIDRKRYTSTKEVLDATLIHQSITGLYETRIDLSQLGGDGGGGGGSGGGGSGGMDLLKPLTVERKGVKIKGYWNSQADITCVPKDLLQGEEPVRQQNVTTIHGTQEGDVYYVNLKIDGRRINTEVIGTTLDYAIITPGDVPWILKKPLELTIKLDLEEQQGTLLNNSILSKKGKEELKQLFEKYSALWQSWENQVGHRRIRPHKIATGTVKPTPQKQYHINPKAKPDIQIVINDLLKQGVLIQKESTMNTPVYPVPKPNGRWRMVLDYRAVNKVTPLIAVQNQHSYGILGSLFKGRYKTTIDLSNGFWAHPIVPEDYWITAFTWQGKQYCWTVLPQGFLNSPGLFNGDVVDLLQGIPNVEVYVDDVYISHDSEKEHLEYLDILFNRLKEAGYIISLKKSNIANSIVDFLGFQITNEGRGLTDTFKEKLENITAPTTLKQLQSILGLLNFARNFIPDFTELIAPLYALIPKSPKNYVPWQIEHSTTLETLITKLNGAEYLQGRKGDKTLIMKVNASYTTGYIRYYNEGEKKPISYVSIVFSKTELKFTELEKLLTTVHKGLLKALDLSMGQNIHVYSPIVSMQNIQKTPQTAKKALASRWLSWLSYLEDPRIRFFYDPQMPALKDLPAVDTGKDNKKHPSNFQHIFYTDGSAITSPTKEGHLNAGMGIVYFINKDGNLQKQQEWSISLGNHTAQFAEIAAFEFALKKCLPLGGNILVVTDSNYVAKAYNEELDVWASNGFVNNRKKPLKHISKWKSVADLKRLRPDVVVTHEPGHQKLDSSPHAYGNNLADQLATQASFKVHAGKRTADGSEFEKRTADGSEFESPKKKAKVE

SEQ ID NO: 1123 - protein, 2173 aa, synthetic construct
MPAAKRVKLDGGDKKYSIGLDIGTNSVGWAVITDEYKVPSKKFKVLGNTDRHSIKKNLIGALLFDSGETAEATRLKRTARRRYTRRKNRICYLQEIFSNEMAKVDDSFFHRLEESFLVEEDKKHERHPIFGNIVDEVAYHEKYPTIYHLRKKLVDSTDKADLRLIYLALAHMIKFRGHFLIEGDLNPDNSDVDKLFIQLVQTYNQLFEENPINASGVDAKAILSARLSKSRRLENLIAQLPGEKKNGLFGNLIALSLGLTPNFKSNFDLAEDAKLQLSKDTYDDDLDNLLAQIGDQYADLFLAAKNLSDAILLSDILRVNTEITKAPLSASMIKRYDEHHQDLTLLKALVRQQLPEKYKEIFFDQSKNGYAGYIDGGASQEEFYKFIKPILEKMDGTEELLVKLNREDLLRKQRTFDNGSIPHQIHLGELHAILRRQEDFYPFLKDNREKIEKILTFRIPYYVGPLARGNSRFAWMTRKSEETITPWNFEEVVDKGASAQSFIERMTNFDKNLPNEKVLPKHSLLYEYFTVYNELTKVKYVTEGMRKPAFLSGEQKKAIVDLLFKTNRKVTVKQLKEDYFKKIECFDSVEISGVEDRFNASLGTYHDLLKIIKDKDFLDNEENEDILEDIVLTLTLFEDREMIEERLKTYAHLFDDKVMKQLKRRRYTGWGRLSRKLINGIRDKQSGKTILDFLKSDGFANRNFMQLIHDDSLTFKEDIQKAQVSGQGDSLHEHIANLAGSPAIKKGILQTVKVVDELVKVMGRHKPENIVIEMARENQTTQKGQKNSRERMKRIEEGIKELGSQILKEHPVENTQLQNEKLYLYYLQNGRDMYVDQELDINRLSDYDVDHIVPQSFLKDDSIDNKVLTRSDKARGKSDNVPSEEVVKKMKNYWRQLLNAKLITQRKFDNLTKAERGGLSELDKAGFIKRQLVETRQITKHVAQILDSRMNTKYDENDKLIREVKVITLKSKLVSDFRKDFQFYKVREINNYHHAHDAYLNAVVGTALIKKYPKLESEFVYGDYKVYDVRKMIAKSEQEIGKATAKYFFYSNIMNFFKTEITLANGEIRKRPLIETNGETGEIVWDKGRDFATVRKVLSMPQVNIVKKTEVQTGGFSKESILPKRNSDKLIARKKDWDPKKYGGFDSPTVAYSVLVVAKVEKGKSKKLKSVKELLGITIMERSSFEKNPIDFLEAKGYKEVKKDLIIKLPKYSLFELENGRKRMLASAGELQKGNELALPSKYVNFLYLASHYEKLKGSPEDNEQKQLFVEQHKHYLDEIIEQISEFSKRVILADANLDKVLSAYNKHRDKPIREQAENIIHLFTLTNLGAPAAFKYFDTTIDRKRYTSTKEVLDATLIHQSITGLYETRIDLSQLGGDGGGGSEAAAKPAPGGMDLLKPLTVERKGVKIKGYWNSQADITCVPKDLLQGEEPVRQQNVTTIHGTQEGDVYYVNLKIDGRRINTEVIGTTLDYAIITPGDVPWILKKPLELTIKLDLEEQQGTLLNNSILSKKGKEELKQLFEKYSALWQSWENQVGHRRIRPHKIATGTVKPTPQKQYHINPKAKPDIQIVINDLLKQGVLIQKESTMNTPVYPVPKPNGRWRMVLDYRAVNKVTPLIAVQNQHSYGILGSLFKGRYKTTIDLSNGFWAHPIVPEDYWITAFTWQGKQYCWTVLPQGFLNSPGLFNGDVVDLLQGIPNVEVYVDDVYISHDSEKEHLEYLDILFNRLKEAGYIISLKKSNIANSIVDFLGFQITNEGRGLTDTFKEKLENITAPTTLKQLQSILGLLNFARNFIPDFTELIAPLYALIPKSPKNYVPWQIEHSTTLETLITKLNGAEYLQGRKGDKTLIMKVNASYTTGYIRYYNEGEKKPISYVSIVFSKTELKFTELEKLLTTVHKGLLKALDLSMGQNIHVYSPIVSMQNIQKTPQTAKKALASRWLSWLSYLEDPRIRFFYDPQMPALKDLPAVDTGKDNKKHPSNFQHIFYTDGSAITSPTKEGHLNAGMGIVYFINKDGNLQKQQEWSISLGNHTAQFAEIAAFEFALKKCLPLGGNILVVTDSNYVAKAYNEELDVWASNGFVNNRKKPLKHISKWKSVADLKRLRPDVVVTHEPGHQKLDSSPHAYGNNLADQLATQASFKVHAGKRTADGSEFEKRTADGSEFESPKKKAKVE

SEQ ID NO: 1124 - protein, 2171 aa, synthetic construct
MPAAKRVKLDGGDKKYSIGLDIGTNSVGWAVITDEYKVPSKKFKVLGNTDRHSIKKNLIGALLFDSGETAEATRLKRTARRRYTRRKNRICYLQEIFSNEMAKVDDSFFHRLEESFLVEEDKKHERHPIFGNIVDEVAYHEKYPTIYHLRKKLVDSTDKADLRLIYLALAHMIKFRGHFLIEGDLNPDNSDVDKLFIQLVQTYNQLFEENPINASGVDAKAILSARLSKSRRLENLIAQLPGEKKNGLFGNLIALSLGLTPNFKSNFDLAEDAKLQLSKDTYDDDLDNLLAQIGDQYADLFLAAKNLSDAILLSDILRVNTEITKAPLSASMIKRYDEHHQDLTLLKALVRQQLPEKYKEIFFDQSKNGYAGYIDGGASQEEFYKFIKPILEKMDGTEELLVKLNREDLLRKQRTFDNGSIPHQIHLGELHAILRRQEDFYPFLKDNREKIEKILTFRIPYYVGPLARGNSRFAWMTRKSEETITPWNFEEVVDKGASAQSFIERMTNFDKNLPNEKVLPKHSLLYEYFTVYNELTKVKYVTEGMRKPAFLSGEQKKAIVDLLFKTNRKVTVKQLKEDYFKKIECFDSVEISGVEDRFNASLGTYHDLLKIIKDKDFLDNEENEDILEDIVLTLTLFEDREMIEERLKTYAHLFDDKVMKQLKRRRYTGWGRLSRKLINGIRDKQSGKTILDFLKSDGFANRNFMQLIHDDSLTFKEDIQKAQVSGQGDSLHEHIANLAGSPAIKKGILQTVKVVDELVKVMGRHKPENIVIEMARENQTTQKGQKNSRERMKRIEEGIKELGSQILKEHPVENTQLQNEKLYLYYLQNGRDMYVDQELDINRLSDYDVDHIVPQSFLKDDSIDNKVLTRSDKARGKSDNVPSEEVVKKMKNYWRQLLNAKLITQRKFDNLTKAERGGLSELDKAGFIKRQLVETRQITKHVAQILDSRMNTKYDENDKLIREVKVITLKSKLVSDFRKDFQFYKVREINNYHHAHDAYLNAVVGTALIKKYPKLESEFVYGDYKVYDVRKMIAKSEQEIGKATAKYFFYSNIMNFFKTEITLANGEIRKRPLIETNGETGEIVWDKGRDFATVRKVLSMPQVNIVKKTEVQTGGFSKESILPKRNSDKLIARKKDWDPKKYGGFDSPTVAYSVLVVAKVEKGKSKKLKSVKELLGITIMERSSFEKNPIDFLEAKGYKEVKKDLIIKLPKYSLFELENGRKRMLASAGELQKGNELALPSKYVNFLYLASHYEKLKGSPEDNEQKQLFVEQHKHYLDEIIEQISEFSKRVILADANLDKVLSAYNKHRDKPIREQAENIIHLFTLTNLGAPAAFKYFDTTIDRKRYTSTKEVLDATLIHQSITGLYETRIDLSQLGGDGGGGGGSSPAPGGMDLLKPLTVERKGVKIKGYWNSQADITCVPKDLLQGEEPVRQQNVTTIHGTQEGDVYYVNLKIDGRRINTEVIGTTLDYAIITPGDVPWILKKPLELTIKLDLEEQQGTLLNNSILSKKGKEELKQLFEKYSALWQSWENQVGHRRIRPHKIATGTVKPTPQKQYHINPKAKPDIQIVINDLLKQGVLIQKESTMNTPVYPVPKPNGRWRMVLDYRAVNKVTPLIAVQNQHSYGILGSLFKGRYKTTIDLSNGFWAHPIVPEDYWITAFTWQGKQYCWTVLPQGFLNSPGLFNGDVVDLLQGIPNVEVYVDDVYISHDSEKEHLEYLDILFNRLKEAGYIISLKKSNIANSIVDFLGFQITNEGRGLTDTFKEKLENITAPTTLKQLQSILGLLNFARNFIPDFTELIAPLYALIPKSPKNYVPWQIEHSTTLETLITKLNGAEYLQGRKGDKTLIMKVNASYTTGYIRYYNEGEKKPISYVSIVFSKTELKFTELEKLLTTVHKGLLKALDLSMGQNIHVYSPIVSMQNIQKTPQTAKKALASRWLSWLSYLEDPRIRFFYDPQMPALKDLPAVDTGKDNKKHPSNFQHIFYTDGSAITSPTKEGHLNAGMGIVYFINKDGNLQKQQEWSISLGNHTAQFAEIAAFEFALKKCLPLGGNILVVTDSNYVAKAYNEELDVWASNGFVNNRKKPLKHISKWKSVADLKRLRPDVVVTHEPGHQKLDSSPHAYGNNLADQLATQASFKVHAGKRTADGSEFEKRTADGSEFESPKKKAKVE

SEQ ID NO: 1125 - protein, 2177 aa, synthetic construct
MPAAKRVKLDGGDKKYSIGLDIGTNSVGWAVITDEYKVPSKKFKVLGNTDRHSIKKNLIGALLFDSGETAEATRLKRTARRRYTRRKNRICYLQEIFSNEMAKVDDSFFHRLEESFLVEEDKKHERHPIFGNIVDEVAYHEKYPTIYHLRKKLVDSTDKADLRLIYLALAHMIKFRGHFLIEGDLNPDNSDVDKLFIQLVQTYNQLFEENPINASGVDAKAILSARLSKSRRLENLIAQLPGEKKNGLFGNLIALSLGLTPNFKSNFDLAEDAKLQLSKDTYDDDLDNLLAQIGDQYADLFLAAKNLSDAILLSDILRVNTEITKAPLSASMIKRYDEHHQDLTLLKALVRQQLPEKYKEIFFDQSKNGYAGYIDGGASQEEFYKFIKPILEKMDGTEELLVKLNREDLLRKQRTFDNGSIPHQIHLGELHAILRRQEDFYPFLKDNREKIEKILTFRIPYYVGPLARGNSRFAWMTRKSEETITPWNFEEVVDKGASAQSFIERMTNFDKNLPNEKVLPKHSLLYEYFTVYNELTKVKYVTEGMRKPAFLSGEQKKAIVDLLFKTNRKVTVKQLKEDYFKKIECFDSVEISGVEDRFNASLGTYHDLLKIIKDKDFLDNEENEDILEDIVLTLTLFEDREMIEERLKTYAHLFDDKVMKQLKRRRYTGWGRLSRKLINGIRDKQSGKTILDFLKSDGFANRNFMQLIHDDSLTFKEDIQKAQVSGQGDSLHEHIANLAGSPAIKKGILQTVKVVDELVKVMGRHKPENIVIEMARENQTTQKGQKNSRERMKRIEEGIKELGSQILKEHPVENTQLQNEKLYLYYLQNGRDMYVDQELDINRLSDYDVDHIVPQSFLKDDSIDNKVLTRSDKARGKSDNVPSEEVVKKMKNYWRQLLNAKLITQRKFDNLTKAERGGLSELDKAGFIKRQLVETRQITKHVAQILDSRMNTKYDENDKLIREVKVITLKSKLVSDFRKDFQFYKVREINNYHHAHDAYLNAVVGTALIKKYPKLESEFVYGDYKVYDVRKMIAKSEQEIGKATAKYFFYSNIMNFFKTEITLANGEIRKRPLIETNGETGEIVWDKGRDFATVRKVLSMPQVNIVKKTEVQTGGFSKESILPKRNSDKLIARKKDWDPKKYGGFDSPTVAYSVLVVAKVEKGKSKKLKSVKELLGITIMERSSFEKNPIDFLEAKGYKEVKKDLIIKLPKYSLFELENGRKRMLASAGELQKGNELALPSKYVNFLYLASHYEKLKGSPEDNEQKQLFVEQHKHYLDEIIEQISEFSKRVILADANLDKVLSAYNKHRDKPIREQAENIIHLFTLTNLGAPAAFKYFDTTIDRKRYTSTKEVLDATLIHQSITGLYETRIDLSQLGGDGGGGGGSGGGGSGGGGSGGMDLLKPLTVERKGVKIKGYWNSQADITCVPKDLLQGEEPVRQQNVTTIHGTQEGDVYYVNLKIDGRRINTEVIGTTLDYAIITPGDVPWILKKPLELTIKLDLEEQQGTLLNNSILSKKGKEELKQLFEKYSALWQSWENQVGHRRIRPHKIATGTVKPTPQKQYHINPKAKPDIQIVINDLLKQGVLIQKESTMNTPVYPVPKPNGRWRMVLDYRAVNKVTPLIAVQNQHSYGILGSLFKGRYKTTIDLSNGFWAHPIVPEDYWITAFTWQGKQYCWTVLPQGFLNSPGLFNGDVVDLLQGIPNVEVYVDDVYISHDSEKEHLEYLDILFNRLKEAGYIISLKKSNIANSIVDFLGFQITNEGRGLTDTFKEKLENITAPTTLKQLQSILGLLNFARNFIPDFTELIAPLYALIPKSPKNYVPWQIEHSTTLETLITKLNGAEYLQGRKGDKTLIMKVNASYTTGYIRYYNEGEKKPISYVSIVFSKTELKFTELEKLLTTVHKGLLKALDLSMGQNIHVYSPIVSMQNIQKTPQTAKKALASRWLSWLSYLEDPRIRFFYDPQMPALKDLPAVDTGKDNKKHPSNFQHIFYTDGSAITSPTKEGHLNAGMGIVYFINKDGNLQKQQEWSISLGNHTAQFAEIAAFEFALKKCLPLGGNILVVTDSNYVAKAYNEELDVWASNGFVNNRKKPLKHISKWKSVADLKRLRPDVVVTHEPGHQKLDSSPHAYGNNLADQLATQASFKVHAGKRTADGSEFEKRTADGSEFESPKKKAKVE

SEQ ID NO: 1126 - protein, 2177 aa, synthetic construct
MPAAKRVKLDGGDKKYSIGLDIGTNSVGWAVITDEYKVPSKKFKVLGNTDRHSIKKNLIGALLFDSGETAEATRLKRTARRRYTRRKNRICYLQEIFSNEMAKVDDSFFHRLEESFLVEEDKKHERHPIFGNIVDEVAYHEKYPTIYHLRKKLVDSTDKADLRLIYLALAHMIKFRGHFLIEGDLNPDNSDVDKLFIQLVQTYNQLFEENPINASGVDAKAILSARLSKSRRLENLIAQLPGEKKNGLFGNLIALSLGLTPNFKSNFDLAEDAKLQLSKDTYDDDLDNLLAQIGDQYADLFLAAKNLSDAILLSDILRVNTEITKAPLSASMIKRYDEHHQDLTLLKALVRQQLPEKYKEIFFDQSKNGYAGYIDGGASQEEFYKFIKPILEKMDGTEELLVKLNREDLLRKQRTFDNGSIPHQIHLGELHAILRRQEDFYPFLKDNREKIEKILTFRIPYYVGPLARGNSRFAWMTRKSEETITPWNFEEVVDKGASAQSFIERMTNFDKNLPNEKVLPKHSLLYEYFTVYNELTKVKYVTEGMRKPAFLSGEQKKAIVDLLFKTNRKVTVKQLKEDYFKKIECFDSVEISGVEDRFNASLGTYHDLLKIIKDKDFLDNEENEDILEDIVLTLTLFEDREMIEERLKTYAHLFDDKVMKQLKRRRYTGWGRLSRKLINGIRDKQSGKTILDFLKSDGFANRNFMQLIHDDSLTFKEDIQKAQVSGQGDSLHEHIANLAGSPAIKKGILQTVKVVDELVKVMGRHKPENIVIEMARENQTTQKGQKNSRERMKRIEEGIKELGSQILKEHPVENTQLQNEKLYLYYLQNGRDMYVDQELDINRLSDYDVDHIVPQSFLKDDSIDNKVLTRSDKARGKSDNVPSEEVVKKMKNYWRQLLNAKLITQRKFDNLTKAERGGLSELDKAGFIKRQLVETRQITKHVAQILDSRMNTKYDENDKLIREVKVITLKSKLVSDFRKDFQFYKVREINNYHHAHDAYLNAVVGTALIKKYPKLESEFVYGDYKVYDVRKMIAKSEQEIGKATAKYFFYSNIMNFFKTEITLANGEIRKRPLIETNGETGEIVWDKGRDFATVRKVLSMPQVNIVKKTEVQTGGFSKESILPKRNSDKLIARKKDWDPKKYGGFDSPTVAYSVLVVAKVEKGKSKKLKSVKELLGITIMERSSFEKNPIDFLEAKGYKEVKKDLIIKLPKYSLFELENGRKRMLASAGELQKGNELALPSKYVNFLYLASHYEKLKGSPEDNEQKQLFVEQHKHYLDEIIEQISEFSKRVILADANLDKVLSAYNKHRDKPIREQAENIIHLFTLTNLGAPAAFKYFDTTIDRKRYTSTKEVLDATLIHQSITGLYETRIDLSQLGGDGGEAAAKEAAAKEAAAKGGMDLLKPLTVERKGVKIKGYWNSQADITCVPKDLLQGEEPVRQQNVTTIHGTQEGDVYYVNLKIDGRRINTEVIGTTLDYAIITPGDVPWILKKPLELTIKLDLEEQQGTLLNNSILSKKGKEELKQLFEKYSALWQSWENQVGHRRIRPHKIATGTVKPTPQKQYHINPKAKPDIQIVINDLLKQGVLIQKESTMNTPVYPVPKPNGRWRMVLDYRAVNKVTPLIAVQNQHSYGILGSLFKGRYKTTIDLSNGFWAHPIVPEDYWITAFTWQGKQYCWTVLPQGFLNSPGLFNGDVVDLLQGIPNVEVYVDDVYISHDSEKEHLEYLDILFNRLKEAGYIISLKKSNIANSIVDFLGFQITNEGRGLTDTFKEKLENITAPTTLKQLQSILGLLNFARNFIPDFTELIAPLYALIPKSPKNYVPWQIEHSTTLETLITKLNGAEYLQGRKGDKTLIMKVNASYTTGYIRYYNEGEKKPISYVSIVFSKTELKFTELEKLLTTVHKGLLKALDLSMGQNIHVYSPIVSMQNIQKTPQTAKKALASRWLSWLSYLEDPRIRFFYDPQMPALKDLPAVDTGKDNKKHPSNFQHIFYTDGSAITSPTKEGHLNAGMGIVYFINKDGNLQKQQEWSISLGNHTAQFAEIAAFEFALKKCLPLGGNILVVTDSNYVAKAYNEELDVWASNGFVNNRKKPLKHISKWKSVADLKRLRPDVVVTHEPGHQKLDSSPHAYGNNLADQLATQASFKVHAGKRTADGSEFEKRTADGSEFESPKKKAKVE

SEQ ID NO: 1127 - protein, 2173 aa, synthetic construct
MPAAKRVKLDGGDKKYSIGLDIGTNSVGWAVITDEYKVPSKKFKVLGNTDRHSIKKNLIGALLFDSGETAEATRLKRTARRRYTRRKNRICYLQEIFSNEMAKVDDSFFHRLEESFLVEEDKKHERHPIFGNIVDEVAYHEKYPTIYHLRKKLVDSTDKADLRLIYLALAHMIKFRGHFLIEGDLNPDNSDVDKLFIQLVQTYNQLFEENPINASGVDAKAILSARLSKSRRLENLIAQLPGEKKNGLFGNLIALSLGLTPNFKSNFDLAEDAKLQLSKDTYDDDLDNLLAQIGDQYADLFLAAKNLSDAILLSDILRVNTEITKAPLSASMIKRYDEHHQDLTLLKALVRQQLPEKYKEIFFDQSKNGYAGYIDGGASQEEFYKFIKPILEKMDGTEELLVKLNREDLLRKQRTFDNGSIPHQIHLGELHAILRRQEDFYPFLKDNREKIEKILTFRIPYYVGPLARGNSRFAWMTRKSEETITPWNFEEVVDKGASAQSFIERMTNFDKNLPNEKVLPKHSLLYEYFTVYNELTKVKYVTEGMRKPAFLSGEQKKAIVDLLFKTNRKVTVKQLKEDYFKKIECFDSVEISGVEDRFNASLGTYHDLLKIIKDKDFLDNEENEDILEDIVLTLTLFEDREMIEERLKTYAHLFDDKVMKQLKRRRYTGWGRLSRKLINGIRDKQSGKTILDFLKSDGFANRNFMQLIHDDSLTFKEDIQKAQVSGQGDSLHEHIANLAGSPAIKKGILQTVKVVDELVKVMGRHKPENIVIEMARENQTTQKGQKNSRERMKRIEEGIKELGSQILKEHPVENTQLQNEKLYLYYLQNGRDMYVDQELDINRLSDYDVDHIVPQSFLKDDSIDNKVLTRSDKARGKSDNVPSEEVVKKMKNYWRQLLNAKLITQRKFDNLTKAERGGLSELDKAGFIKRQLVETRQITKHVAQILDSRMNTKYDENDKLIREVKVITLKSKLVSDFRKDFQFYKVREINNYHHAHDAYLNAVVGTALIKKYPKLESEFVYGDYKVYDVRKMIAKSEQEIGKATAKYFFYSNIMNFFKTEITLANGEIRKRPLIETNGETGEIVWDKGRDFATVRKVLSMPQVNIVKKTEVQTGGFSKESILPKRNSDKLIARKKDWDPKKYGGFDSPTVAYSVLVVAKVEKGKSKKLKSVKELLGITIMERSSFEKNPIDFLEAKGYKEVKKDLIIKLPKYSLFELENGRKRMLASAGELQKGNELALPSKYVNFLYLASHYEKLKGSPEDNEQKQLFVEQHKHYLDEIIEQISEFSKRVILADANLDKVLSAYNKHRDKPIREQAENIIHLFTLTNLGAPAAFKYFDTTIDRKRYTSTKEVLDATLIHQSITGLYETRIDLSQLGGDGGEAAAKGSSGGSGGMDLLKPLTVERKGVKIKGYWNSQADITCVPKDLLQGEEPVRQQNVTTIHGTQEGDVYYVNLKIDGRRINTEVIGTTLDYAIITPGDVPWILKKPLELTIKLDLEEQQGTLLNNSILSKKGKEELKQLFEKYSALWQSWENQVGHRRIRPHKIATGTVKPTPQKQYHINPKAKPDIQIVINDLLKQGVLIQKESTMNTPVYPVPKPNGRWRMVLDYRAVNKVTPLIAVQNQHSYGILGSLFKGRYKTTIDLSNGFWAHPIVPEDYWITAFTWQGKQYCWTVLPQGFLNSPGLFNGDVVDLLQGIPNVEVYVDDVYISHDSEKEHLEYLDILFNRLKEAGYIISLKKSNIANSIVDFLGFQITNEGRGLTDTFKEKLENITAPTTLKQLQSILGLLNFARNFIPDFTELIAPLYALIPKSPKNYVPWQIEHSTTLETLITKLNGAEYLQGRKGDKTLIMKVNASYTTGYIRYYNEGEKKPISYVSIVFSKTELKFTELEKLLTTVHKGLLKALDLSMGQNIHVYSPIVSMQNIQKTPQTAKKALASRWLSWLSYLEDPRIRFFYDPQMPALKDLPAVDTGKDNKKHPSNFQHIFYTDGSAITSPTKEGHLNAGMGIVYFINKDGNLQKQQEWSISLGNHTAQFAEIAAFEFALKKCLPLGGNILVVTDSNYVAKAYNEELDVWASNGFVNNRKKPLKHISKWKSVADLKRLRPDVVVTHEPGHQKLDSSPHAYGNNLADQLATQASFKVHAGKRTADGSEFEKRTADGSEFESPKKKAKVE

SEQ ID NO: 1128 - protein, 2171 aa, synthetic construct
MPAAKRVKLDGGDKKYSIGLDIGTNSVGWAVITDEYKVPSKKFKVLGNTDRHSIKKNLIGALLFDSGETAEATRLKRTARRRYTRRKNRICYLQEIFSNEMAKVDDSFFHRLEESFLVEEDKKHERHPIFGNIVDEVAYHEKYPTIYHLRKKLVDSTDKADLRLIYLALAHMIKFRGHFLIEGDLNPDNSDVDKLFIQLVQTYNQLFEENPINASGVDAKAILSARLSKSRRLENLIAQLPGEKKNGLFGNLIALSLGLTPNFKSNFDLAEDAKLQLSKDTYDDDLDNLLAQIGDQYADLFLAAKNLSDAILLSDILRVNTEITKAPLSASMIKRYDEHHQDLTLLKALVRQQLPEKYKEIFFDQSKNGYAGYIDGGASQEEFYKFIKPILEKMDGTEELLVKLNREDLLRKQRTFDNGSIPHQIHLGELHAILRRQEDFYPFLKDNREKIEKILTFRIPYYVGPLARGNSRFAWMTRKSEETITPWNFEEVVDKGASAQSFIERMTNFDKNLPNEKVLPKHSLLYEYFTVYNELTKVKYVTEGMRKPAFLSGEQKKAIVDLLFKTNRKVTVKQLKEDYFKKIECFDSVEISGVEDRFNASLGTYHDLLKIIKDKDFLDNEENEDILEDIVLTLTLFEDREMIEERLKTYAHLFDDKVMKQLKRRRYTGWGRLSRKLINGIRDKQSGKTILDFLKSDGFANRNFMQLIHDDSLTFKEDIQKAQVSGQGDSLHEHIANLAGSPAIKKGILQTVKVVDELVKVMGRHKPENIVIEMARENQTTQKGQKNSRERMKRIEEGIKELGSQILKEHPVENTQLQNEKLYLYYLQNGRDMYVDQELDINRLSDYDVDHIVPQSFLKDDSIDNKVLTRSDKARGKSDNVPSEEVVKKMKNYWRQLLNAKLITQRKFDNLTKAERGGLSELDKAGFIKRQLVETRQITKHVAQILDSRMNTKYDENDKLIREVKVITLKSKLVSDFRKDFQFYKVREINNYHHAHDAYLNAVVGTALIKKYPKLESEFVYGDYKVYDVRKMIAKSEQEIGKATAKYFFYSNIMNFFKTEITLANGEIRKRPLIETNGETGEIVWDKGRDFATVRKVLSMPQVNIVKKTEVQTGGFSKESILPKRNSDKLIARKKDWDPKKYGGFDSPTVAYSVLVVAKVEKGKSKKLKSVKELLGITIMERSSFEKNPIDFLEAKGYKEVKKDLIIKLPKYSLFELENGRKRMLASAGELQKGNELALPSKYVNFLYLASHYEKLKGSPEDNEQKQLFVEQHKHYLDEIIEQISEFSKRVILADANLDKVLSAYNKHRDKPIREQAENIIHLFTLTNLGAPAAFKYFDTTIDRKRYTSTKEVLDATLIHQSITGLYETRIDLSQLGGDGGGGSGGGPAPGGMDLLKPLTVERKGVKIKGYWNSQADITCVPKDLLQGEEPVRQQNVTTIHGTQEGDVYYVNLKIDGRRINTEVIGTTLDYAIITPGDVPWILKKPLELTIKLDLEEQQGTLLNNSILSKKGKEELKQLFEKYSALWQSWENQVGHRRIRPHKIATGTVKPTPQKQYHINPKAKPDIQIVINDLLKQGVLIQKESTMNTPVYPVPKPNGRWRMVLDYRAVNKVTPLIAVQNQHSYGILGSLFKGRYKTTIDLSNGFWAHPIVPEDYWITAFTWQGKQYCWTVLPQGFLNSPGLFNGDVVDLLQGIPNVEVYVDDVYISHDSEKEHLEYLDILFNRLKEAGYIISLKKSNIANSIVDFLGFQITNEGRGLTDTFKEKLENITAPTTLKQLQSILGLLNFARNFIPDFTELIAPLYALIPKSPKNYVPWQIEHSTTLETLITKLNGAEYLQGRKGDKTLIMKVNASYTTGYIRYYNEGEKKPISYVSIVFSKTELKFTELEKLLTTVHKGLLKALDLSMGQNIHVYSPIVSMQNIQKTPQTAKKALASRWLSWLSYLEDPRIRFFYDPQMPALKDLPAVDTGKDNKKHPSNFQHIFYTDGSAITSPTKEGHLNAGMGIVYFINKDGNLQKQQEWSISLGNHTAQFAEIAAFEFALKKCLPLGGNILVVTDSNYVAKAYNEELDVWASNGFVNNRKKPLKHISKWKSVADLKRLRPDVVVTHEPGHQKLDSSPHAYGNNLADQLATQASFKVHAGKRTADGSEFEKRTADGSEFESPKKKAKVE

SEQ ID NO: 1129 - protein, 2208 aa, synthetic construct
MPAAKRVKLDGGDKKYSIGLDIGTNSVGWAVITDEYKVPSKKFKVLGNTDRHSIKKNLIGALLFDSGETAEATRLKRTARRRYTRRKNRICYLQEIFSNEMAKVDDSFFHRLEESFLVEEDKKHERHPIFGNIVDEVAYHEKYPTIYHLRKKLVDSTDKADLRLIYLALAHMIKFRGHFLIEGDLNPDNSDVDKLFIQLVQTYNQLFEENPINASGVDAKAILSARLSKSRRLENLIAQLPGEKKNGLFGNLIALSLGLTPNFKSNFDLAEDAKLQLSKDTYDDDLDNLLAQIGDQYADLFLAAKNLSDAILLSDILRVNTEITKAPLSASMIKRYDEHHQDLTLLKALVRQQLPEKYKEIFFDQSKNGYAGYIDGGASQEEFYKFIKPILEKMDGTEELLVKLNREDLLRKQRTFDNGSIPHQIHLGELHAILRRQEDFYPFLKDNREKIEKILTFRIPYYVGPLARGNSRFAWMTRKSEETITPWNFEEVVDKGASAQSFIERMTNFDKNLPNEKVLPKHSLLYEYFTVYNELTKVKYVTEGMRKPAFLSGEQKKAIVDLLFKTNRKVTVKQLKEDYFKKIECFDSVEISGVEDRFNASLGTYHDLLKIIKDKDFLDNEENEDILEDIVLTLTLFEDREMIEERLKTYAHLFDDKVMKQLKRRRYTGWGRLSRKLINGIRDKQSGKTILDFLKSDGFANRNFMQLIHDDSLTFKEDIQKAQVSGQGDSLHEHIANLAGSPAIKKGILQTVKVVDELVKVMGRHKPENIVIEMARENQTTQKGQKNSRERMKRIEEGIKELGSQILKEHPVENTQLQNEKLYLYYLQNGRDMYVDQELDINRLSDYDVDHIVPQSFLKDDSIDNKVLTRSDKARGKSDNVPSEEVVKKMKNYWRQLLNAKLITQRKFDNLTKAERGGLSELDKAGFIKRQLVETRQITKHVAQILDSRMNTKYDENDKLIREVKVITLKSKLVSDFRKDFQFYKVREINNYHHAHDAYLNAVVGTALIKKYPKLESEFVYGDYKVYDVRKMIAKSEQEIGKATAKYFFYSNIMNFFKTEITLANGEIRKRPLIETNGETGEIVWDKGRDFATVRKVLSMPQVNIVKKTEVQTGGFSKESILPKRNSDKLIARKKDWDPKKYGGFDSPTVAYSVLVVAKVEKGKSKKLKSVKELLGITIMERSSFEKNPIDFLEAKGYKEVKKDLIIKLPKYSLFELENGRKRMLASAGELQKGNELALPSKYVNFLYLASHYEKLKGSPEDNEQKQLFVEQHKHYLDEIIEQISEFSKRVILADANLDKVLSAYNKHRDKPIREQAENIIHLFTLTNLGAPAAFKYFDTTIDRKRYTSTKEVLDATLIHQSITGLYETRIDLSQLGGDGGAEAAAKEAAAKEAAAKEAAAKALEAEAAAKEAAAKEAAAKEAAAKAGGMDLLKPLTVERKGVKIKGYWNSQADITCVPKDLLQGEEPVRQQNVTTIHGTQEGDVYYVNLKIDGRRINTEVIGTTLDYAIITPGDVPWILKKPLELTIKLDLEEQQGTLLNNSILSKKGKEELKQLFEKYSALWQSWENQVGHRRIRPHKIATGTVKPTPQKQYHINPKAKPDIQIVINDLLKQGVLIQKESTMNTPVYPVPKPNGRWRMVLDYRAVNKVTPLIAVQNQHSYGILGSLFKGRYKTTIDLSNGFWAHPIVPEDYWITAFTWQGKQYCWTVLPQGFLNSPGLFNGDVVDLLQGIPNVEVYVDDVYISHDSEKEHLEYLDILFNRLKEAGYIISLKKSNIANSIVDFLGFQITNEGRGLTDTFKEKLENITAPTTLKQLQSILGKLNFARNFIPDFTELIAPLYALIPKSPKNYVPWQIEHSTTLETLITKLNGAEYLQGRKGDKTLIMKVNASYTTGYIRYYNEGEKKPISYVSIVFSKTELKFTELEKLLTTVHKGLLKALDLSMGQNIHVYSPIVSMQNIQKTPQTAKKALASRWLSWLSYLEDPRIRFFYDPQMPALKDLPAVDTGKDNKKHPSNFQHIFYTDGSAITSPTKEGHLNAGMGIVYFINKDGNLQKQQEWSISLGNHTAQFAEIAAFEFALKKCLPLGGNILVVTDSNYVAKAYNEELDVWASNGFVNNRKKPLKHISKWKSVADLKRLRPDVVVTHEPGHQKLDSSPHAYGNNLADQLATQASFKVHAGKRTADGSEFEKRTADGSEFESPKKKAKVE

SEQ ID NO: 1130 - protein, 2171 aa, synthetic construct
MPAAKRVKLDGGDKKYSIGLDIGTNSVGWAVITDEYKVPSKKFKVLGNTDRHSIKKNLIGALLFDSGETAEATRLKRTARRRYTRRKNRICYLQEIFSNEMAKVDDSFFHRLEESFLVEEDKKHERHPIFGNIVDEVAYHEKYPTIYHLRKKLVDSTDKADLRLIYLALAHMIKFRGHFLIEGDLNPDNSDVDKLFIQLVQTYNQLFEENPINASGVDAKAILSARLSKSRRLENLIAQLPGEKKNGLFGNLIALSLGLTPNFKSNFDLAEDAKLQLSKDTYDDDLDNLLAQIGDQYADLFLAAKNLSDAILLSDILRVNTEITKAPLSASMIKRYDEHHQDLTLLKALVRQQLPEKYKEIFFDQSKNGYAGYIDGGASQEEFYKFIKPILEKMDGTEELLVKLNREDLLRKQRTFDNGSIPHQIHLGELHAILRRQEDFYPFLKDNREKIEKILTFRIPYYVGPLARGNSRFAWMTRKSEETITPWNFEEVVDKGASAQSFIERMTNFDKNLPNEKVLPKHSLLYEYFTVYNELTKVKYVTEGMRKPAFLSGEQKKAIVDLLFKTNRKVTVKQLKEDYFKKIECFDSVEISGVEDRFNASLGTYHDLLKIIKDKDFLDNEENEDILEDIVLTLTLFEDREMIEERLKTYAHLFDDKVMKQLKRRRYTGWGRLSRKLINGIRDKQSGKTILDFLKSDGFANRNFMQLIHDDSLTFKEDIQKAQVSGQGDSLHEHIANLAGSPAIKKGILQTVKVVDELVKVMGRHKPENIVIEMARENQTTQKGQKNSRERMKRIEEGIKELGSQILKEHPVENTQLQNEKLYLYYLQNGRDMYVDQELDINRLSDYDVDHIVPQSFLKDDSIDNKVLTRSDKARGKSDNVPSEEVVKKMKNYWRQLLNAKLITQRKFDNLTKAERGGLSELDKAGFIKRQLVETRQITKHVAQILDSRMNTKYDENDKLIREVKVITLKSKLVSDFRKDFQFYKVREINNYHHAHDAYLNAVVGTALIKKYPKLESEFVYGDYKVYDVRKMIAKSEQEIGKATAKYFFYSNIMNFFKTEITLANGEIRKRPLIETNGETGEIVWDKGRDFATVRKVLSMPQVNIVKKTEVQTGGFSKESILPKRNSDKLIARKKDWDPKKYGGFDSPTVAYSVLVVAKVEKGKSKKLKSVKELLGITIMERSSFEKNPIDFLEAKGYKEVKKDLIIKLPKYSLFELENGRKRMLASAGELQKGNELALPSKYVNFLYLASHYEKLKGSPEDNEQKQLFVEQHKHYLDEIIEQISEFSKRVILADANLDKVLSAYNKHRDKPIREQAENIIHLFTLTNLGAPAAFKYFDTTIDRKRYTSTKEVLDATLIHQSITGLYETRIDLSQLGGDGGGSSPAPGGSGGMDLLKPLTVERKGVKIKGYWNSQADITCVPKDLLQGEEPVRQQNVTTIHGTQEGDVYYVNLKIDGRRINTEVIGTTLDYAIITPGDVPWILKKPLELTIKLDLEEQQGTLLNNSILSKKGKEELKQLFEKYSALWQSWENQVGHRRIRPHKIATGTVKPTPQKQYHINPKAKPDIQIVINDLLKQGVLIQKESTMNTPVYPVPKPNGRWRMVLDYRAVNKVTPLIAVQNQHSYGILGSLFKGRYKTTIDLSNGFWAHPIVPEDYWITAFTWQGKQYCWTVLPQGFLNSPGLFNGDVVDLLQGIPNVEVYVDDVYISHDSEKEHLEYLDILFNRLKEAGYIISLKKSNIANSIVDFLGFQITNEGRGLTDTFKEKLENITAPTTLKQLQSILGKLNFARNFIPDFTELIAPLYALIPKSPKNYVPWQIEHSTTLETLITKLNGAEYLQGRKGDKTLIMKVNASYTTGYIRYYNEGEKKPISYVSIVFSKTELKFTELEKLLTTVHKGLLKALDLSMGQNIHVYSPIVSMQNIQKTPQTAKKALASRWLSWLSYLEDPRIRFFYDPQMPALKDLPAVDTGKDNKKHPSNFQHIFYTDGSAITSPTKEGHLNAGMGIVYFINKDGNLQKQQEWSISLGNHTAQFAEIAAFEFALKKCLPLGGNILVVTDSNYVAKAYNEELDVWASNGFVNNRKKPLKHISKWKSVADLKRLRPDVVVTHEPGHQKLDSSPHAYGNNLADQLATQASFKVHAGKRTADGSEFEKRTADGSEFESPKKKAKVE

SEQ ID NO: 1131 - protein, 2182 aa, synthetic construct
MPAAKRVKLDGGDKKYSIGLDIGTNSVGWAVITDEYKVPSKKFKVLGNTDRHSIKKNLIGALLFDSGETAEATRLKRTARRRYTRRKNRICYLQEIFSNEMAKVDDSFFHRLEESFLVEEDKKHERHPIFGNIVDEVAYHEKYPTIYHLRKKLVDSTDKADLRLIYLALAHMIKFRGHFLIEGDLNPDNSDVDKLFIQLVQTYNQLFEENPINASGVDAKAILSARLSKSRRLENLIAQLPGEKKNGLFGNLIALSLGLTPNFKSNFDLAEDAKLQLSKDTYDDDLDNLLAQIGDQYADLFLAAKNLSDAILLSDILRVNTEITKAPLSASMIKRYDEHHQDLTLLKALVRQQLPEKYKEIFFDQSKNGYAGYIDGGASQEEFYKFIKPILEKMDGTEELLVKLNREDLLRKQRTFDNGSIPHQIHLGELHAILRRQEDFYPFLKDNREKIEKILTFRIPYYVGPLARGNSRFAWMTRKSEETITPWNFEEVVDKGASAQSFIERMTNFDKNLPNEKVLPKHSLLYEYFTVYNELTKVKYVTEGMRKPAFLSGEQKKAIVDLLFKTNRKVTVKQLKEDYFKKIECFDSVEISGVEDRFNASLGTYHDLLKIIKDKDFLDNEENEDILEDIVLTLTLFEDREMIEERLKTYAHLFDDKVMKQLKRRRYTGWGRLSRKLINGIRDKQSGKTILDFLKSDGFANRNFMQLIHDDSLTFKEDIQKAQVSGQGDSLHEHIANLAGSPAIKKGILQTVKVVDELVKVMGRHKPENIVIEMARENQTTQKGQKNSRERMKRIEEGIKELGSQILKEHPVENTQLQNEKLYLYYLQNGRDMYVDQELDINRLSDYDVDHIVPQSFLKDDSIDNKVLTRSDKARGKSDNVPSEEVVKKMKNYWRQLLNAKLITQRKFDNLTKAERGGLSELDKAGFIKRQLVETRQITKHVAQILDSRMNTKYDENDKLIREVKVITLKSKLVSDFRKDFQFYKVREINNYHHAHDAYLNAVVGTALIKKYPKLESEFVYGDYKVYDVRKMIAKSEQEIGKATAKYFFYSNIMNFFKTEITLANGEIRKRPLIETNGETGEIVWDKGRDFATVRKVLSMPQVNIVKKTEVQTGGFSKESILPKRNSDKLIARKKDWDPKKYGGFDSPTVAYSVLVVAKVEKGKSKKLKSVKELLGITIMERSSFEKNPIDFLEAKGYKEVKKDLIIKLPKYSLFELENGRKRMLASAGELQKGNELALPSKYVNFLYLASHYEKLKGSPEDNEQKQLFVEQHKHYLDEIIEQISEFSKRVILADANLDKVLSAYNKHRDKPIREQAENIIHLFTLTNLGAPAAFKYFDTTIDRKRYTSTKEVLDATLIHQSITGLYETRIDLSQLGGDGGGGGGSGGGGSGGGGSGGGGSGGMDLLKPLTVERKGVKIKGYWNSQADITCVPKDLLQGEEPVRQQNVTTIHGTQEGDVYYVNLKIDGRRINTEVIGTTLDYAIITPGDVPWILKKPLELTIKLDLEEQQGTLLNNSILSKKGKEELKQLFEKYSALWQSWENQVGHRRIRPHKIATGTVKPTPQKQYHINPKAKPDIQIVINDLLKQGVLIQKESTMNTPVYPVPKPNGRWRMVLDYRAVNKVTPLIAVQNQHSYGILGSLFKGRYKTTIDLSNGFWAHPIVPEDYWITAFTWQGKQYCWTVLPQGFLNSPGLFNGDVVDLLQGIPNVEVYVDDVYISHDSEKEHLEYLDILFNRLKEAGYIISLKKSNIANSIVDFLGFQITNEGRGLTDTFKEKLENITAPTTLKQLQSILGKLNFARNFIPDFTELIAPLYALIPKSPKNYVPWQIEHSTTLETLITKLNGAEYLQGRKGDKTLIMKVNASYTTGYIRYYNEGEKKPISYVSIVFSKTELKFTELEKLLTTVHKGLLKALDLSMGQNIHVYSPIVSMQNIQKTPQTAKKALASRWLSWLSYLEDPRIRFFYDPQMPALKDLPAVDTGKDNKKHPSNFQHIFYTDGSAITSPTKEGHLNAGMGIVYFINKDGNLQKQQEWSISLGNHTAQFAEIAAFEFALKKCLPLGGNILVVTDSNYVAKAYNEELDVWASNGFVNNRKKPLKHISKWKSVADLKRLRPDVVVTHEPGHQKLDSSPHAYGNNLADQLATQASFKVHAGKRTADGSEFEKRTADGSEFESPKKKAKVE

SEQ ID NO: 1132 - protein, 2167 aa, synthetic construct
MPAAKRVKLDGGDKKYSIGLDIGTNSVGWAVITDEYKVPSKKFKVLGNTDRHSIKKNLIGALLFDSGETAEATRLKRTARRRYTRRKNRICYLQEIFSNEMAKVDDSFFHRLEESFLVEEDKKHERHPIFGNIVDEVAYHEKYPTIYHLRKKLVDSTDKADLRLIYLALAHMIKFRGHFLIEGDLNPDNSDVDKLFIQLVQTYNQLFEENPINASGVDAKAILSARLSKSRRLENLIAQLPGEKKNGLFGNLIALSLGLTPNFKSNFDLAEDAKLQLSKDTYDDDLDNLLAQIGDQYADLFLAAKNLSDAILLSDILRVNTEITKAPLSASMIKRYDEHHQDLTLLKALVRQQLPEKYKEIFFDQSKNGYAGYIDGGASQEEFYKFIKPILEKMDGTEELLVKLNREDLLRKQRTFDNGSIPHQIHLGELHAILRRQEDFYPFLKDNREKIEKILTFRIPYYVGPLARGNSRFAWMTRKSEETITPWNFEEVVDKGASAQSFIERMTNFDKNLPNEKVLPKHSLLYEYFTVYNELTKVKYVTEGMRKPAFLSGEQKKAIVDLLFKTNRKVTVKQLKEDYFKKIECFDSVEISGVEDRFNASLGTYHDLLKIIKDKDFLDNEENEDILEDIVLTLTLFEDREMIEERLKTYAHLFDDKVMKQLKRRRYTGWGRLSRKLINGIRDKQSGKTILDFLKSDGFANRNFMQLIHDDSLTFKEDIQKAQVSGQGDSLHEHIANLAGSPAIKKGILQTVKVVDELVKVMGRHKPENIVIEMARENQTTQKGQKNSRERMKRIEEGIKELGSQILKEHPVENTQLQNEKLYLYYLQNGRDMYVDQELDINRLSDYDVDHIVPQSFLKDDSIDNKVLTRSDKARGKSDNVPSEEVVKKMKNYWRQLLNAKLITQRKFDNLTKAERGGLSELDKAGFIKRQLVETRQITKHVAQILDSRMNTKYDENDKLIREVKVITLKSKLVSDFRKDFQFYKVREINNYHHAHDAYLNAVVGTALIKKYPKLESEFVYGDYKVYDVRKMIAKSEQEIGKATAKYFFYSNIMNFFKTEITLANGEIRKRPLIETNGETGEIVWDKGRDFATVRKVLSMPQVNIVKKTEVQTGGFSKESILPKRNSDKLIARKKDWDPKKYGGFDSPTVAYSVLVVAKVEKGKSKKLKSVKELLGITIMERSSFEKNPIDFLEAKGYKEVKKDLIIKLPKYSLFELENGRKRMLASAGELQKGNELALPSKYVNFLYLASHYEKLKGSPEDNEQKQLFVEQHKHYLDEIIEQISEFSKRVILADANLDKVLSAYNKHRDKPIREQAENIIHLFTLTNLGAPAAFKYFDTTIDRKRYTSTKEVLDATLIHQSITGLYETRIDLSQLGGDGGEAAAKGGMDLLKPLTVERKGVKIKGYWNSQADITCVPKDLLQGEEPVRQQNVTTIHGTQEGDVYYVNLKIDGRRINTEVIGTTLDYAIITPGDVPWILKKPLELTIKLDLEEQQGTLLNNSILSKKGKEELKQLFEKYSALWQSWENQVGHRRIRPHKIATGTVKPTPQKQYHINPKAKPDIQIVINDLLKQGVLIQKESTMNTPVYPVPKPNGRWRMVLDYRAVNKVTPLIAVQNQHSYGILGSLFKGRYKTTIDLSNGFWAHPIVPEDYWITAFTWQGKQYCWTVLPQGFLNSPGLFNGDVVDLLQGIPNVEVYVDDVYISHDSEKEHLEYLDILFNRLKEAGYIISLKKSNIANSIVDFLGFQITNEGRGLTDTFKEKLENITAPTTLKQLQSILGKLNFARNFIPDFTELIAPLYALIPKSPKNYVPWQIEHSTTLETLITKLNGAEYLQGRKGDKTLIMKVNASYTTGYIRYYNEGEKKPISYVSIVFSKTELKFTELEKLLTTVHKGLLKALDLSMGQNIHVYSPIVSMQNIQKTPQTAKKALASRWLSWLSYLEDPRIRFFYDPQMPALKDLPAVDTGKDNKKHPSNFQHIFYTDGSAITSPTKEGHLNAGMGIVYFINKDGNLQKQQEWSISLGNHTAQFAEIAAFEFALKKCLPLGGNILVVTDSNYVAKAYNEELDVWASNGFVNNRKKPLKHISKWKSVADLKRLRPDVVVTHEPGHQKLDSSPHAYGNNLADQLATQASFKVHAGKRTADGSEFEKRTADGSEFESPKKKAKVE

SEQ ID NO: 1133 - protein, 2174 aa, synthetic construct
MPAAKRVKLDGGDKKYSIGLDIGTNSVGWAVITDEYKVPSKKFKVLGNTDRHSIKKNLIGALLFDSGETAEATRLKRTARRRYTRRKNRICYLQEIFSNEMAKVDDSFFHRLEESFLVEEDKKHERHPIFGNIVDEVAYHEKYPTIYHLRKKLVDSTDKADLRLIYLALAHMIKFRGHFLIEGDLNPDNSDVDKLFIQLVQTYNQLFEENPINASGVDAKAILSARLSKSRRLENLIAQLPGEKKNGLFGNLIALSLGLTPNFKSNFDLAEDAKLQLSKDTYDDDLDNLLAQIGDQYADLFLAAKNLSDAILLSDILRVNTEITKAPLSASMIKRYDEHHQDLTLLKALVRQQLPEKYKEIFFDQSKNGYAGYIDGGASQEEFYKFIKPILEKMDGTEELLVKLNREDLLRKQRTFDNGSIPHQIHLGELHAILRRQEDFYPFLKDNREKIEKILTFRIPYYVGPLARGNSRFAWMTRKSEETITPWNFEEVVDKGASAQSFIERMTNFDKNLPNEKVLPKHSLLYEYFTVYNELTKVKYVTEGMRKPAFLSGEQKKAIVDLLFKTNRKVTVKQLKEDYFKKIECFDSVEISGVEDRFNASLGTYHDLLKIIKDKDFLDNEENEDILEDIVLTLTLFEDREMIEERLKTYAHLFDDKVMKQLKRRRYTGWGRLSRKLINGIRDKQSGKTILDFLKSDGFANRNFMQLIHDDSLTFKEDIQKAQVSGQGDSLHEHIANLAGSPAIKKGILQTVKVVDELVKVMGRHKPENIVIEMARENQTTQKGQKNSRERMKRIEEGIKELGSQILKEHPVENTQLQNEKLYLYYLQNGRDMYVDQELDINRLSDYDVDHIVPQSFLKDDSIDNKVLTRSDKARGKSDNVPSEEVVKKMKNYWRQLLNAKLITQRKFDNLTKAERGGLSELDKAGFIKRQLVETRQITKHVAQILDSRMNTKYDENDKLIREVKVITLKSKLVSDFRKDFQFYKVREINNYHHAHDAYLNAVVGTALIKKYPKLESEFVYGDYKVYDVRKMIAKSEQEIGKATAKYFFYSNIMNFFKTEITLANGEIRKRPLIETNGETGEIVWDKGRDFATVRKVLSMPQVNIVKKTEVQTGGFSKESILPKRNSDKLIARKKDWDPKKYGGFDSPTVAYSVLVVAKVEKGKSKKLKSVKELLGITIMERSSFEKNPIDFLEAKGYKEVKKDLIIKLPKYSLFELENGRKRMLASAGELQKGNELALPSKYVNFLYLASHYEKLKGSPEDNEQKQLFVEQHKHYLDEIIEQISEFSKRVILADANLDKVLSAYNKHRDKPIREQAENIIHLFTLTNLGAPAAFKYFDTTIDRKRYTSTKEVLDATLIHQSITGLYETRIDLSQLGGDGGGSAGSAAGSGEFGGMDLLKPLTVERKGVKIKGYWNSQADITCVPKDLLQGEEPVRQQNVTTIHGTQEGDVYYVNLKIDGRRINTEVIGTTLDYAIITPGDVPWILKKPLELTIKLDLEEQQGTLLNNSILSKKGKEELKQLFEKYSALWQSWENQVGHRRIRPHKIATGTVKPTPQKQYHINPKAKPDIQIVINDLLKQGVLIQKESTMNTPVYPVPKPNGRWRMVLDYRAVNKVTPLIAVQNQHSYGILGSLFKGRYKTTIDLSNGFWAHPIVPEDYWITAFTWQGKQYCWTVLPQGFLNSPGLFNGDVVDLLQGIPNVEVYVDDVYISHDSEKEHLEYLDILFNRLKEAGYIISLKKSNIANSIVDFLGFQITNEGRGLTDTFKEKLENITAPTTLKQLQSILGKLNFARNFIPDFTELIAPLYALIPKSPKNYVPWQIEHSTTLETLITKLNGAEYLQGRKGDKTLIMKVNASYTTGYIRYYNEGEKKPISYVSIVFSKTELKFTELEKLLTTVHKGLLKALDLSMGQNIHVYSPIVSMQNIQKTPQTAKKALASRWLSWLSYLEDPRIRFFYDPQMPALKDLPAVDTGKDNKKHPSNFQHIFYTDGSAITSPTKEGHLNAGMGIVYFINKDGNLQKQQEWSISLGNHTAQFAEIAAFEFALKKCLPLGGNILVVTDSNYVAKAYNEELDVWASNGFVNNRKKPLKHISKWKSVADLKRLRPDVVVTHEPGHQKLDSSPHAYGNNLADQLATQASFKVHAGKRTADGSEFEKRTADGSEFESPKKKAKVE

SEQ ID NO: 1134 - protein, 2109 aa, synthetic construct
MPAAKRVKLDGGDKKYSIGLDIGTNSVGWAVITDEYKVPSKKFKVLGNTDRHSIKKNLIGALLFDSGETAEATRLKRTARRRYTRRKNRICYLQEIFSNEMAKVDDSFFHRLEESFLVEEDKKHERHPIFGNIVDEVAYHEKYPTIYHLRKKLVDSTDKADLRLIYLALAHMIKFRGHFLIEGDLNPDNSDVDKLFIQLVQTYNQLFEENPINASGVDAKAILSARLSKSRRLENLIAQLPGEKKNGLFGNLIALSLGLTPNFKSNFDLAEDAKLQLSKDTYDDDLDNLLAQIGDQYADLFLAAKNLSDAILLSDILRVNTEITKAPLSASMIKRYDEHHQDLTLLKALVRQQLPEKYKEIFFDQSKNGYAGYIDGGASQEEFYKFIKPILEKMDGTEELLVKLNREDLLRKQRTFDNGSIPHQIHLGELHAILRRQEDFYPFLKDNREKIEKILTFRIPYYVGPLARGNSRFAWMTRKSEETITPWNFEEVVDKGASAQSFIERMTNFDKNLPNEKVLPKHSLLYEYFTVYNELTKVKYVTEGMRKPAFLSGEQKKAIVDLLFKTNRKVTVKQLKEDYFKKIECFDSVEISGVEDRFNASLGTYHDLLKIIKDKDFLDNEENEDILEDIVLTLTLFEDREMIEERLKTYAHLFDDKVMKQLKRRRYTGWGRLSRKLINGIRDKQSGKTILDFLKSDGFANRNFMQLIHDDSLTFKEDIQKAQVSGQGDSLHEHIANLAGSPAIKKGILQTVKVVDELVKVMGRHKPENIVIEMARENQTTQKGQKNSRERMKRIEEGIKELGSQILKEHPVENTQLQNEKLYLYYLQNGRDMYVDQELDINRLSDYDVDHIVPQSFLKDDSIDNKVLTRSDKARGKSDNVPSEEVVKKMKNYWRQLLNAKLITQRKFDNLTKAERGGLSELDKAGFIKRQLVETRQITKHVAQILDSRMNTKYDENDKLIREVKVITLKSKLVSDFRKDFQFYKVREINNYHHAHDAYLNAVVGTALIKKYPKLESEFVYGDYKVYDVRKMIAKSEQEIGKATAKYFFYSNIMNFFKTEITLANGEIRKRPLIETNGETGEIVWDKGRDFATVRKVLSMPQVNIVKKTEVQTGGFSKESILPKRNSDKLIARKKDWDPKKYGGFDSPTVAYSVLVVAKVEKGKSKKLKSVKELLGITIMERSSFEKNPIDFLEAKGYKEVKKDLIIKLPKYSLFELENGRKRMLASAGELQKGNELALPSKYVNFLYLASHYEKLKGSPEDNEQKQLFVEQHKHYLDEIIEQISEFSKRVILADANLDKVLSAYNKHRDKPIREQAENIIHLFTLTNLGAPAAFKYFDTTIDRKRYTSTKEVLDATLIHQSITGLYETRIDLSQLGGDGGEAAAKEAAAKEAAAKEAAAKEAAAKGGTLQLEEEYRLFEPESTQKQEMDIWLKNFPQAWAETGGMGTAHCQAPVLIQLKATATPISIRQYPMPHEAYQGIKPHIRRMLDQGILKPCQSPWNTPLLPVKKPGTEDYRPVQDLREVNKRVEDIHPTVPNPYNLLSTLPPSHPWYTVLDLKDAFFCLRLHSESQLLFAFEWRDPEIGLSGQLTWTRLPQGFKNSPTLFDEALHSDLADFRVRYPALVLLQYVDDLLLAAATRTECLEGTKALLETLGNKGYRASAKKAQICLQEVTYLGYSLKDGQRWLTKARKEAILSIPVPKNSRQVREFLGTAGYCRLWIPGFAELAAPLYPLTRPGTLFQWGTEQQLAFEDIKKALLSSPALGLPDITKPFELFIDENSGFAKGVLVQKLGPWKRPVAYLSKKLDTVASGWPPCLRMVAAIAILVKDAGKLTLGQPLTILTSHPVEALVRQPPNKWLSNARMTHYQAMLLDAERVHFGPTVSLNPATLLPLPSGGNHHDCLQILAETHGTRPDLTDQPLPDADLTWYTDGSSFIRNGEREAGAAVTTESEVIWAAPLPPGTSAQRAELIALTQALKMAEGKKLTVYTDSRYAFATTHVHGEIYRRRGLLTSEGKEIKNKNEILALLEALFLPKRLSIIHCPGHQKGDSPQAKGNRLADDTAKKAATETHSSLTVLPAGKRTADGSEFEKRTADGSEFESPKKKAKVE

SEQ ID NO: 1135 - protein, 2095 aa, synthetic construct
MPAAKRVKLDGGDKKYSIGLDIGTNSVGWAVITDEYKVPSKKFKVLGNTDRHSIKKNLIGALLFDSGETAEATRLKRTARRRYTRRKNRICYLQEIFSNEMAKVDDSFFHRLEESFLVEEDKKHERHPIFGNIVDEVAYHEKYPTIYHLRKKLVDSTDKADLRLIYLALAHMIKFRGHFLIEGDLNPDNSDVDKLFIQLVQTYNQLFEENPINASGVDAKAILSARLSKSRRLENLIAQLPGEKKNGLFGNLIALSLGLTPNFKSNFDLAEDAKLQLSKDTYDDDLDNLLAQIGDQYADLFLAAKNLSDAILLSDILRVNTEITKAPLSASMIKRYDEHHQDLTLLKALVRQQLPEKYKEIFFDQSKNGYAGYIDGGASQEEFYKFIKPILEKMDGTEELLVKLNREDLLRKQRTFDNGSIPHQIHLGELHAILRRQEDFYPFLKDNREKIEKILTFRIPYYVGPLARGNSRFAWMTRKSEETITPWNFEEVVDKGASAQSFIERMTNFDKNLPNEKVLPKHSLLYEYFTVYNELTKVKYVTEGMRKPAFLSGEQKKAIVDLLFKTNRKVTVKQLKEDYFKKIECFDSVEISGVEDRFNASLGTYHDLLKIIKDKDFLDNEENEDILEDIVLTLTLFEDREMIEERLKTYAHLFDDKVMKQLKRRRYTGWGRLSRKLINGIRDKQSGKTILDFLKSDGFANRNFMQLIHDDSLTFKEDIQKAQVSGQGDSLHEHIANLAGSPAIKKGILQTVKVVDELVKVMGRHKPENIVIEMARENQTTQKGQKNSRERMKRIEEGIKELGSQILKEHPVENTQLQNEKLYLYYLQNGRDMYVDQELDINRLSDYDVDHIVPQSFLKDDSIDNKVLTRSDKARGKSDNVPSEEVVKKMKNYWRQLLNAKLITQRKFDNLTKAERGGLSELDKAGFIKRQLVETRQITKHVAQILDSRMNTKYDENDKLIREVKVITLKSKLVSDFRKDFQFYKVREINNYHHAHDAYLNAVVGTALIKKYPKLESEFVYGDYKVYDVRKMIAKSEQEIGKATAKYFFYSNIMNFFKTEITLANGEIRKRPLIETNGETGEIVWDKGRDFATVRKVLSMPQVNIVKKTEVQTGGFSKESILPKRNSDKLIARKKDWDPKKYGGFDSPTVAYSVLVVAKVEKGKSKKLKSVKELLGITIMERSSFEKNPIDFLEAKGYKEVKKDLIIKLPKYSLFELENGRKRMLASAGELQKGNELALPSKYVNFLYLASHYEKLKGSPEDNEQKQLFVEQHKHYLDEIIEQISEFSKRVILADANLDKVLSAYNKHRDKPIREQAENIIHLFTLTNLGAPAAFKYFDTTIDRKRYTSTKEVLDATLIHQSITGLYETRIDLSQLGGDGGGGSEAAAKPAPGGTLQLEEEYRLFEPESTQKQEMDIWLKNFPQAWAETGGMGTAHCQAPVLIQLKATATPISIRQYPMPHEAYQGIKPHIRRMLDQGILKPCQSPWNTPLLPVKKPGTEDYRPVQDLREVNKRVEDIHPTVPNPYNLLSTLPPSHPWYTVLDLKDAFFCLRLHSESQLLFAFEWRDPEIGLSGQLTWTRLPQGFKNSPTLFDEALHSDLADFRVRYPALVLLQYVDDLLLAAATRTECLEGTKALLETLGNKGYRASAKKAQICLQEVTYLGYSLKDGQRWLTKARKEAILSIPVPKNSRQVREFLGTAGYCRLWIPGFAELAAPLYPLTRPGTLFQWGTEQQLAFEDIKKALLSSPALGLPDITKPFELFIDENSGFAKGVLVQKLGPWKRPVAYLSKKLDTVASGWPPCLRMVAAIAILVKDAGKLTLGQPLTILTSHPVEALVRQPPNKWLSNARMTHYQAMLLDAERVHFGPTVSLNPATLLPLPSGGNHHDCLQILAETHGTRPDLTDQPLPDADLTWYTDGSSFIRNGEREAGAAVTTESEVIWAAPLPPGTSAQRAELIALTQALKMAEGKKLTVYTDSRYAFATTHVHGEIYRRRGLLTSEGKEIKNKNEILALLEALFLPKRLSIIHCPGHQKGDSPQAKGNRLADDTAKKAATETHSSLTVLPAGKRTADGSEFEKRTADGSEFESPKKKAKVE

SEQ ID NO: 1136 - protein, 2093 aa, synthetic construct
MPAAKRVKLDGGDKKYSIGLDIGTNSVGWAVITDEYKVPSKKFKVLGNTDRHSIKKNLIGALLFDSGETAEATRLKRTARRRYTRRKNRICYLQEIFSNEMAKVDDSFFHRLEESFLVEEDKKHERHPIFGNIVDEVAYHEKYPTIYHLRKKLVDSTDKADLRLIYLALAHMIKFRGHFLIEGDLNPDNSDVDKLFIQLVQTYNQLFEENPINASGVDAKAILSARLSKSRRLENLIAQLPGEKKNGLFGNLIALSLGLTPNFKSNFDLAEDAKLQLSKDTYDDDLDNLLAQIGDQYADLFLAAKNLSDAILLSDILRVNTEITKAPLSASMIKRYDEHHQDLTLLKALVRQQLPEKYKEIFFDQSKNGYAGYIDGGASQEEFYKFIKPILEKMDGTEELLVKLNREDLLRKQRTFDNGSIPHQIHLGELHAILRRQEDFYPFLKDNREKIEKILTFRIPYYVGPLARGNSRFAWMTRKSEETITPWNFEEVVDKGASAQSFIERMTNFDKNLPNEKVLPKHSLLYEYFTVYNELTKVKYVTEGMRKPAFLSGEQKKAIVDLLFKTNRKVTVKQLKEDYFKKIECFDSVEISGVEDRFNASLGTYHDLLKIIKDKDFLDNEENEDILEDIVLTLTLFEDREMIEERLKTYAHLFDDKVMKQLKRRRYTGWGRLSRKLINGIRDKQSGKTILDFLKSDGFANRNFMQLIHDDSLTFKEDIQKAQVSGQGDSLHEHIANLAGSPAIKKGILQTVKVVDELVKVMGRHKPENIVIEMARENQTTQKGQKNSRERMKRIEEGIKELGSQILKEHPVENTQLQNEKLYLYYLQNGRDMYVDQELDINRLSDYDVDHIVPQSFLKDDSIDNKVLTRSDKARGKSDNVPSEEVVKKMKNYWRQLLNAKLITQRKFDNLTKAERGGLSELDKAGFIKRQLVETRQITKHVAQILDSRMNTKYDENDKLIREVKVITLKSKLVSDFRKDFQFYKVREINNYHHAHDAYLNAVVGTALIKKYPKLESEFVYGDYKVYDVRKMIAKSEQEIGKATAKYFFYSNIMNFFKTEITLANGEIRKRPLIETNGETGEIVWDKGRDFATVRKVLSMPQVNIVKKTEVQTGGFSKESILPKRNSDKLIARKKDWDPKKYGGFDSPTVAYSVLVVAKVEKGKSKKLKSVKELLGITIMERSSFEKNPIDFLEAKGYKEVKKDLIIKLPKYSLFELENGRKRMLASAGELQKGNELALPSKYVNFLYLASHYEKLKGSPEDNEQKQLFVEQHKHYLDEIIEQISEFSKRVILADANLDKVLSAYNKHRDKPIREQAENIIHLFTLTNLGAPAAFKYFDTTIDRKRYTSTKEVLDATLIHQSITGLYETRIDLSQLGGDGGPAPGSSGGGGGTLQLEEEYRLFEPESTQKQEMDIWLKNFPQAWAETGGMGTAHCQAPVLIQLKATATPISIRQYPMPHEAYQGIKPHIRRMLDQGILKPCQSPWNTPLLPVKKPGTEDYRPVQDLREVNKRVEDIHPTVPNPYNLLSTLPPSHPWYTVLDLKDAFFCLRLHSESQLLFAFEWRDPEIGLSGQLTWTRLPQGFKNSPTLFDEALHSDLADFRVRYPALVLLQYVDDLLLAAATRTECLEGTKALLETLGNKGYRASAKKAQICLQEVTYLGYSLKDGQRWLTKARKEAILSIPVPKNSRQVREFLGTAGYCRLWIPGFAELAAPLYPLTRPGTLFQWGTEQQLAFEDIKKALLSSPALGLPDITKPFELFIDENSGFAKGVLVQKLGPWKRPVAYLSKKLDTVASGWPPCLRMVAAIAILVKDAGKLTLGQPLTILTSHPVEALVRQPPNKWLSNARMTHYQAMLLDAERVHFGPTVSLNPATLLPLPSGGNHHDCLQILAETHGTRPDLTDQPLPDADLTWYTDGSSFIRNGEREAGAAVTTESEVIWAAPLPPGTSAQRAELIALTQALKMAEGKKLTVYTDSRYAFATTHVHGEIYRRRGLLTSEGKEIKNKNEILALLEALFLPKRLSIIHCPGHQKGDSPQAKGNRLADDTAKKAATETHSSLTVLPAGKRTADGSEFEKRTADGSEFESPKKKAKVE

SEQ ID NO: 1137 - protein, 2107 aa, synthetic construct
MPAAKRVKLDGGDKKYSIGLDIGTNSVGWAVITDEYKVPSKKFKVLGNTDRHSIKKNLIGALLFDSGETAEATRLKRTARRRYTRRKNRICYLQEIFSNEMAKVDDSFFHRLEESFLVEEDKKHERHPIFGNIVDEVAYHEKYPTIYHLRKKLVDSTDKADLRLIYLALAHMIKFRGHFLIEGDLNPDNSDVDKLFIQLVQTYNQLFEENPINASGVDAKAILSARLSKSRRLENLIAQLPGEKKNGLFGNLIALSLGLTPNFKSNFDLAEDAKLQLSKDTYDDDLDNLLAQIGDQYADLFLAAKNLSDAILLSDILRVNTEITKAPLSASMIKRYDEHHQDLTLLKALVRQQLPEKYKEIFFDQSKNGYAGYIDGGASQEEFYKFIKPILEKMDGTEELLVKLNREDLLRKQRTFDNGSIPHQIHLGELHAILRRQEDFYPFLKDNREKIEKILTFRIPYYVGPLARGNSRFAWMTRKSEETITPWNFEEVVDKGASAQSFIERMTNFDKNLPNEKVLPKHSLLYEYFTVYNELTKVKYVTEGMRKPAFLSGEQKKAIVDLLFKTNRKVTVKQLKEDYFKKIECFDSVEISGVEDRFNASLGTYHDLLKIIKDKDFLDNEENEDILEDIVLTLTLFEDREMIEERLKTYAHLFDDKVMKQLKRRRYTGWGRLSRKLINGIRDKQSGKTILDFLKSDGFANRNFMQLIHDDSLTFKEDIQKAQVSGQGDSLHEHIANLAGSPAIKKGILQTVKVVDELVKVMGRHKPENIVIEMARENQTTQKGQKNSRERMKRIEEGIKELGSQILKEHPVENTQLQNEKLYLYYLQNGRDMYVDQELDINRLSDYDVDHIVPQSFLKDDSIDNKVLTRSDKARGKSDNVPSEEVVKKMKNYWRQLLNAKLITQRKFDNLTKAERGGLSELDKAGFIKRQLVETRQITKHVAQILDSRMNTKYDENDKLIREVKVITLKSKLVSDFRKDFQFYKVREINNYHHAHDAYLNAVVGTALIKKYPKLESEFVYGDYKVYDVRKMIAKSEQEIGKATAKYFFYSNIMNFFKTEITLANGEIRKRPLIETNGETGEIVWDKGRDFATVRKVLSMPQVNIVKKTEVQTGGFSKESILPKRNSDKLIARKKDWDPKKYGGFDSPTVAYSVLVVAKVEKGKSKKLKSVKELLGITIMERSSFEKNPIDFLEAKGYKEVKKDLIIKLPKYSLFELENGRKRMLASAGELQKGNELALPSKYVNFLYLASHYEKLKGSPEDNEQKQLFVEQHKHYLDEIIEQISEFSKRVILADANLDKVLSAYNKHRDKPIREQAENIIHLFTLTNLGAPAAFKYFDTTIDRKRYTSTKEVLDATLIHQSITGLYETRIDLSQLGGDGGEAAAKEAAAKEAAAKEAAAKGGTAPLEEEYRLFLEAPIQNVTLLEQWKREIPKVWAEINPPGLASTQAPIHVQLLSTALPVRVRQYPITLEAKRSLRETIRKFRAAGILRPVHSPWNTPLLPVRKSGTSEYRMVQDLREVNKRVETIHPTVPNPYTLLSLLPPDRIWYSVLDLKDAFFCIPLAPESQLIFAFEWADAEEGESGQLTWTRLPQGFKNSPTLFNEALNRDLQGFRLDHPSVSLLQYVDDLLIAADTQAACLSATRDLLMTLAELGYRVSGKKAQLCQEEVTYLGFKIHKGSRSLSNSRTQAILQIPVPKTKRQVREFLGTIGYCRLWIPGFAELAQPLYAATRPGNDPLVWGEKEEEAFQSLKLALTQPPALALPSLDKPFQLFVEETSGAAKGVLTQALGPWKRPVAYLSKRLDPVAAGWPRCLRAIAAAALLTREASKLTFGQDIEITSSHNLESLLRSPPDKWLTNARITQYQVLLLDPPRVRFKQTAALNPATLLPETDDTLPIHHCLDTLDSLTSTRPDLTDQPLAQAEATLFTDGSSYIRDGKRYAGAAVVTLDSVIWAEPLPIGTSAQKAELIALTKALEWSKDKSVNIYTDSRYAFATLHVHGMIYRERGWLTAGGKAIKNAPEILALLTAVWLPKRVAVMHCKGHQKDDAPTSTGNRRADEVAREVAIRPLSTQATISAGKRTADGSEFEKRTADGSEFESPKKKAKVE

SEQ ID NO: 1138 - protein, 2100 aa, synthetic construct
MPAAKRVKLDGGDKKYSIGLDIGTNSVGWAVITDEYKVPSKKFKVLGNTDRHSIKKNLIGALLFDSGETAEATRLKRTARRRYTRRKNRICYLQEIFSNEMAKVDDSFFHRLEESFLVEEDKKHERHPIFGNIVDEVAYHEKYPTIYHLRKKLVDSTDKADLRLIYLALAHMIKFRGHFLIEGDLNPDNSDVDKLFIQLVQTYNQLFEENPINASGVDAKAILSARLSKSRRLENLIAQLPGEKKNGLFGNLIALSLGLTPNFKSNFDLAEDAKLQLSKDTYDDDLDNLLAQIGDQYADLFLAAKNLSDAILLSDILRVNTEITKAPLSASMIKRYDEHHQDLTLLKALVRQQLPEKYKEIFFDQSKNGYAGYIDGGASQEEFYKFIKPILEKMDGTEELLVKLNREDLLRKQRTFDNGSIPHQIHLGELHAILRRQEDFYPFLKDNREKIEKILTFRIPYYVGPLARGNSRFAWMTRKSEETITPWNFEEVVDKGASAQSFIERMTNFDKNLPNEKVLPKHSLLYEYFTVYNELTKVKYVTEGMRKPAFLSGEQKKAIVDLLFKTNRKVTVKQLKEDYFKKIECFDSVEISGVEDRFNASLGTYHDLLKIIKDKDFLDNEENEDILEDIVLTLTLFEDREMIEERLKTYAHLFDDKVMKQLKRRRYTGWGRLSRKLINGIRDKQSGKTILDFLKSDGFANRNFMQLIHDDSLTFKEDIQKAQVSGQGDSLHEHIANLAGSPAIKKGILQTVKVVDELVKVMGRHKPENIVIEMARENQTTQKGQKNSRERMKRIEEGIKELGSQILKEHPVENTQLQNEKLYLYYLQNGRDMYVDQELDINRLSDYDVDHIVPQSFLKDDSIDNKVLTRSDKARGKSDNVPSEEVVKKMKNYWRQLLNAKLITQRKFDNLTKAERGGLSELDKAGFIKRQLVETRQITKHVAQILDSRMNTKYDENDKLIREVKVITLKSKLVSDFRKDFQFYKVREINNYHHAHDAYLNAVVGTALIKKYPKLESEFVYGDYKVYDVRKMIAKSEQEIGKATAKYFFYSNIMNFFKTEITLANGEIRKRPLIETNGETGEIVWDKGRDFATVRKVLSMPQVNIVKKTEVQTGGFSKESILPKRNSDKLIARKKDWDPKKYGGFDSPTVAYSVLVVAKVEKGKSKKLKSVKELLGITIMERSSFEKNPIDFLEAKGYKEVKKDLIIKLPKYSLFELENGRKRMLASAGELQKGNELALPSKYVNFLYLASHYEKLKGSPEDNEQKQLFVEQHKHYLDEIIEQISEFSKRVILADANLDKVLSAYNKHRDKPIREQAENIIHLFTLTNLGAPAAFKYFDTTIDRKRYTSTKEVLDATLIHQSITGLYETRIDLSQLGGDGGPAPAPAPAPAPAPGGTAPLEEEYRLFLEAPIQNVTLLEQWKREIPKVWAEINPPGLASTQAPIHVQLLSTALPVRVRQYPITLEAKRSLRETIRKFRAAGILRPVHSPWNTPLLPVRKSGTSEYRMVQDLREVNKRVETIHPTVPNPYTLLSLLPPDRIWYSVLDLKDAFFCIPLAPESQLIFAFEWADAEEGESGQLTWTRLPQGFKNSPTLFNEALNRDLQGFRLDHPSVSLLQYVDDLLIAADTQAACLSATRDLLMTLAELGYRVSGKKAQLCQEEVTYLGFKIHKGSRSLSNSRTQAILQIPVPKTKRQVREFLGTIGYCRLWIPGFAELAQPLYAATRPGNDPLVWGEKEEEAFQSLKLALTQPPALALPSLDKPFQLFVEETSGAAKGVLTQALGPWKRPVAYLSKRLDPVAAGWPRCLRAIAAAALLTREASKLTFGQDIEITSSHNLESLLRSPPDKWLTNARITQYQVLLLDPPRVRFKQTAALNPATLLPETDDTLPIHHCLDTLDSLTSTRPDLTDQPLAQAEATLFTDGSSYIRDGKRYAGAAVVTLDSVIWAEPLPIGTSAQKAELIALTKALEWSKDKSVNIYTDSRYAFATLHVHGMIYRERGWLTAGGKAIKNAPEILALLTAVWLPKRVAVMHCKGHQKDDAPTSTGNRRADEVAREVAIRPLSTQATISAGKRTADGSEFEKRTADGSEFESPKKKAKVE

SEQ ID NO: 1139 - protein, 2098 aa, synthetic construct
MPAAKRVKLDGGDKKYSIGLDIGTNSVGWAVITDEYKVPSKKFKVLGNTDRHSIKKNLIGALLFDSGETAEATRLKRTARRRYTRRKNRICYLQEIFSNEMAKVDDSFFHRLEESFLVEEDKKHERHPIFGNIVDEVAYHEKYPTIYHLRKKLVDSTDKADLRLIYLALAHMIKFRGHFLIEGDLNPDNSDVDKLFIQLVQTYNQLFEENPINASGVDAKAILSARLSKSRRLENLIAQLPGEKKNGLFGNLIALSLGLTPNFKSNFDLAEDAKLQLSKDTYDDDLDNLLAQIGDQYADLFLAAKNLSDAILLSDILRVNTEITKAPLSASMIKRYDEHHQDLTLLKALVRQQLPEKYKEIFFDQSKNGYAGYIDGGASQEEFYKFIKPILEKMDGTEELLVKLNREDLLRKQRTFDNGSIPHQIHLGELHAILRRQEDFYPFLKDNREKIEKILTFRIPYYVGPLARGNSRFAWMTRKSEETITPWNFEEVVDKGASAQSFIERMTNFDKNLPNEKVLPKHSLLYEYFTVYNELTKVKYVTEGMRKPAFLSGEQKKAIVDLLFKTNRKVTVKQLKEDYFKKIECFDSVEISGVEDRFNASLGTYHDLLKIIKDKDFLDNEENEDILEDIVLTLTLFEDREMIEERLKTYAHLFDDKVMKQLKRRRYTGWGRLSRKLINGIRDKQSGKTILDFLKSDGFANRNFMQLIHDDSLTFKEDIQKAQVSGQGDSLHEHIANLAGSPAIKKGILQTVKVVDELVKVMGRHKPENIVIEMARENQTTQKGQKNSRERMKRIEEGIKELGSQILKEHPVENTQLQNEKLYLYYLQNGRDMYVDQELDINRLSDYDVDHIVPQSFLKDDSIDNKVLTRSDKARGKSDNVPSEEVVKKMKNYWRQLLNAKLITQRKFDNLTKAERGGLSELDKAGFIKRQLVETRQITKHVAQILDSRMNTKYDENDKLIREVKVITLKSKLVSDFRKDFQFYKVREINNYHHAHDAYLNAVVGTALIKKYPKLESEFVYGDYKVYDVRKMIAKSEQEIGKATAKYFFYSNIMNFFKTEITLANGEIRKRPLIETNGETGEIVWDKGRDFATVRKVLSMPQVNIVKKTEVQTGGFSKESILPKRNSDKLIARKKDWDPKKYGGFDSPTVAYSVLVVAKVEKGKSKKLKSVKELLGITIMERSSFEKNPIDFLEAKGYKEVKKDLIIKLPKYSLFELENGRKRMLASAGELQKGNELALPSKYVNFLYLASHYEKLKGSPEDNEQKQLFVEQHKHYLDEIIEQISEFSKRVILADANLDKVLSAYNKHRDKPIREQAENIIHLFTLTNLGAPAAFKYFDTTIDRKRYTSTKEVLDATLIHQSITGLYETRIDLSQLGGDGGEAAAKGGSPAPGGTAPLEEEYRLFLEAPIQNVTLLEQWKREIPKVWAEINPPGLASTQAPIHVQLLSTALPVRVRQYPITLEAKRSLRETIRKFRAAGILRPVHSPWNTPLLPVRKSGTSEYRMVQDLREVNKRVETIHPTVPNPYTLLSLLPPDRIWYSVLDLKDAFFCIPLAPESQLIFAFEWADAEEGESGQLTWTRLPQGFKNSPTLFNEALNRDLQGFRLDHPSVSLLQYVDDLLIAADTQAACLSATRDLLMTLAELGYRVSGKKAQLCQEEVTYLGFKIHKGSRSLSNSRTQAILQIPVPKTKRQVREFLGTIGYCRLWIPGFAELAQPLYAATRPGNDPLVWGEKEEEAFQSLKLALTQPPALALPSLDKPFQLFVEETSGAAKGVLTQALGPWKRPVAYLSKRLDPVAAGWPRCLRAIAAAALLTREASKLTFGQDIEITSSHNLESLLRSPPDKWLTNARITQYQVLLLDPPRVRFKQTAALNPATLLPETDDTLPIHHCLDTLDSLTSTRPDLTDQPLAQAEATLFTDGSSYIRDGKRYAGAAVVTLDSVIWAEPLPIGTSAQKAELIALTKALEWSKDKSVNIYTDSRYAFATLHVHGMIYRERGWLTAGGKAIKNAPEILALLTAVWLPKRVAVMHCKGHQKDDAPTSTGNRRADEVAREVAIRPLSTQATISAGKRTADGSEFEKRTADGSEFESPKKKAKVE

SEQ ID NO: 1140 - protein, 2096 aa, synthetic construct
MPAAKRVKLDGGDKKYSIGLDIGTNSVGWAVITDEYKVPSKKFKVLGNTDRHSIKKNLIGALLFDSGETAEATRLKRTARRRYTRRKNRICYLQEIFSNEMAKVDDSFFHRLEESFLVEEDKKHERHPIFGNIVDEVAYHEKYPTIYHLRKKLVDSTDKADLRLIYLALAHMIKFRGHFLIEGDLNPDNSDVDKLFIQLVQTYNQLFEENPINASGVDAKAILSARLSKSRRLENLIAQLPGEKKNGLFGNLIALSLGLTPNFKSNFDLAEDAKLQLSKDTYDDDLDNLLAQIGDQYADLFLAAKNLSDAILLSDILRVNTEITKAPLSASMIKRYDEHHQDLTLLKALVRQQLPEKYKEIFFDQSKNGYAGYIDGGASQEEFYKFIKPILEKMDGTEELLVKLNREDLLRKQRTFDNGSIPHQIHLGELHAILRRQEDFYPFLKDNREKIEKILTFRIPYYVGPLARGNSRFAWMTRKSEETITPWNFEEVVDKGASAQSFIERMTNFDKNLPNEKVLPKHSLLYEYFTVYNELTKVKYVTEGMRKPAFLSGEQKKAIVDLLFKTNRKVTVKQLKEDYFKKIECFDSVEISGVEDRFNASLGTYHDLLKIIKDKDFLDNEENEDILEDIVLTLTLFEDREMIEERLKTYAHLFDDKVMKQLKRRRYTGWGRLSRKLINGIRDKQSGKTILDFLKSDGFANRNFMQLIHDDSLTFKEDIQKAQVSGQGDSLHEHIANLAGSPAIKKGILQTVKVVDELVKVMGRHKPENIVIEMARENQTTQKGQKNSRERMKRIEEGIKELGSQILKEHPVENTQLQNEKLYLYYLQNGRDMYVDQELDINRLSDYDVDHIVPQSFLKDDSIDNKVLTRSDKARGKSDNVPSEEVVKKMKNYWRQLLNAKLITQRKFDNLTKAERGGLSELDKAGFIKRQLVETRQITKHVAQILDSRMNTKYDENDKLIREVKVITLKSKLVSDFRKDFQFYKVREINNYHHAHDAYLNAVVGTALIKKYPKLESEFVYGDYKVYDVRKMIAKSEQEIGKATAKYFFYSNIMNFFKTEITLANGEIRKRPLIETNGETGEIVWDKGRDFATVRKVLSMPQVNIVKKTEVQTGGFSKESILPKRNSDKLIARKKDWDPKKYGGFDSPTVAYSVLVVAKVEKGKSKKLKSVKELLGITIMERSSFEKNPIDFLEAKGYKEVKKDLIIKLPKYSLFELENGRKRMLASAGELQKGNELALPSKYVNFLYLASHYEKLKGSPEDNEQKQLFVEQHKHYLDEIIEQISEFSKRVILADANLDKVLSAYNKHRDKPIREQAENIIHLFTLTNLGAPAAFKYFDTTIDRKRYTSTKEVLDATLIHQSITGLYETRIDLSQLGGDGGGGGPAPGSSGGTAPLEEEYRLFLEAPIQNVTLLEQWKREIPKVWAEINPPGLASTQAPIHVQLLSTALPVRVRQYPITLEAKRSLRETIRKFRAAGILRPVHSPWNTPLLPVRKSGTSEYRMVQDLREVNKRVETIHPTVPNPYTLLSLLPPDRIWYSVLDLKDAFFCIPLAPESQLIFAFEWADAEEGESGQLTWTRLPQGFKNSPTLFNEALNRDLQGFRLDHPSVSLLQYVDDLLIAADTQAACLSATRDLLMTLAELGYRVSGKKAQLCQEEVTYLGFKIHKGSRSLSNSRTQAILQIPVPKTKRQVREFLGTIGYCRLWIPGFAELAQPLYAATRPGNDPLVWGEKEEEAFQSLKLALTQPPALALPSLDKPFQLFVEETSGAAKGVLTQALGPWKRPVAYLSKRLDPVAAGWPRCLRAIAAAALLTREASKLTFGQDIEITSSHNLESLLRSPPDKWLTNARITQYQVLLLDPPRVRFKQTAALNPATLLPETDDTLPIHHCLDTLDSLTSTRPDLTDQPLAQAEATLFTDGSSYIRDGKRYAGAAVVTLDSVIWAEPLPIGTSAQKAELIALTKALEWSKDKSVNIYTDSRYAFATLHVHGMIYRERGWLTAGGKAIKNAPEILALLTAVWLPKRVAVMHCKGHQKDDAPTSTGNRRADEVAREVAIRPLSTQATISAGKRTADGSEFEKRTADGSEFESPKKKAKVE

SEQ ID NO: 1141 - protein, 2095 aa, synthetic construct
MPAAKRVKLDGGDKKYSIGLDIGTNSVGWAVITDEYKVPSKKFKVLGNTDRHSIKKNLIGALLFDSGETAEATRLKRTARRRYTRRKNRICYLQEIFSNEMAKVDDSFFHRLEESFLVEEDKKHERHPIFGNIVDEVAYHEKYPTIYHLRKKLVDSTDKADLRLIYLALAHMIKFRGHFLIEGDLNPDNSDVDKLFIQLVQTYNQLFEENPINASGVDAKAILSARLSKSRRLENLIAQLPGEKKNGLFGNLIALSLGLTPNFKSNFDLAEDAKLQLSKDTYDDDLDNLLAQIGDQYADLFLAAKNLSDAILLSDILRVNTEITKAPLSASMIKRYDEHHQDLTLLKALVRQQLPEKYKEIFFDQSKNGYAGYIDGGASQEEFYKFIKPILEKMDGTEELLVKLNREDLLRKQRTFDNGSIPHQIHLGELHAILRRQEDFYPFLKDNREKIEKILTFRIPYYVGPLARGNSRFAWMTRKSEETITPWNFEEVVDKGASAQSFIERMTNFDKNLPNEKVLPKHSLLYEYFTVYNELTKVKYVTEGMRKPAFLSGEQKKAIVDLLFKTNRKVTVKQLKEDYFKKIECFDSVEISGVEDRFNASLGTYHDLLKIIKDKDFLDNEENEDILEDIVLTLTLFEDREMIEERLKTYAHLFDDKVMKQLKRRRYTGWGRLSRKLINGIRDKQSGKTILDFLKSDGFANRNFMQLIHDDSLTFKEDIQKAQVSGQGDSLHEHIANLAGSPAIKKGILQTVKVVDELVKVMGRHKPENIVIEMARENQTTQKGQKNSRERMKRIEEGIKELGSQILKEHPVENTQLQNEKLYLYYLQNGRDMYVDQELDINRLSDYDVDHIVPQSFLKDDSIDNKVLTRSDKARGKSDNVPSEEVVKKMKNYWRQLLNAKLITQRKFDNLTKAERGGLSELDKAGFIKRQLVETRQITKHVAQILDSRMNTKYDENDKLIREVKVITLKSKLVSDFRKDFQFYKVREINNYHHAHDAYLNAVVGTALIKKYPKLESEFVYGDYKVYDVRKMIAKSEQEIGKATAKYFFYSNIMNFFKTEITLANGEIRKRPLIETNGETGEIVWDKGRDFATVRKVLSMPQVNIVKKTEVQTGGFSKESILPKRNSDKLIARKKDWDPKKYGGFDSPTVAYSVLVVAKVEKGKSKKLKSVKELLGITIMERSSFEKNPIDFLEAKGYKEVKKDLIIKLPKYSLFELENGRKRMLASAGELQKGNELALPSKYVNFLYLASHYEKLKGSPEDNEQKQLFVEQHKHYLDEIIEQISEFSKRVILADANLDKVLSAYNKHRDKPIREQAENIIHLFTLTNLGAPAAFKYFDTTIDRKRYTSTKEVLDATLIHQSITGLYETRIDLSQLGGDGGEAAAKGGGGGTAPLEEEYRLFLEAPIQNVTLLEQWKREIPKVWAEINPPGLASTQAPIHVQLLSTALPVRVRQYPITLEAKRSLRETIRKFRAAGILRPVHSPWNTPLLPVRKSGTSEYRMVQDLREVNKRVETIHPTVPNPYTLLSLLPPDRIWYSVLDLKDAFFCIPLAPESQLIFAFEWADAEEGESGQLTWTRLPQGFKNSPTLFNEALNRDLQGFRLDHPSVSLLQYVDDLLIAADTQAACLSATRDLLMTLAELGYRVSGKKAQLCQEEVTYLGFKIHKGSRSLSNSRTQAILQIPVPKTKRQVREFLGTIGYCRLWIPGFAELAQPLYAATRPGNDPLVWGEKEEEAFQSLKLALTQPPALALPSLDKPFQLFVEETSGAAKGVLTQALGPWKRPVAYLSKRLDPVAAGWPRCLRAIAAAALLTREASKLTFGQDIEITSSHNLESLLRSPPDKWLTNARITQYQVLLLDPPRVRFKQTAALNPATLLPETDDTLPIHHCLDTLDSLTSTRPDLTDQPLAQAEATLFTDGSSYIRDGKRYAGAAVVTLDSVIWAEPLPIGTSAQKAELIALTKALEWSKDKSVNIYTDSRYAFATLHVHGMIYRERGWLTAGGKAIKNAPEILALLTAVWLPKRVAVMHCKGHQKDDAPTSTGNRRADEVAREVAIRPLSTQATISAGKRTADGSEFEKRTADGSEFESPKKKAKVE

SEQ ID NO: 1142 - protein, 2098 aa, synthetic construct
MPAAKRVKLDGGDKKYSIGLDIGTNSVGWAVITDEYKVPSKKFKVLGNTDRHSIKKNLIGALLFDSGETAEATRLKRTARRRYTRRKNRICYLQEIFSNEMAKVDDSFFHRLEESFLVEEDKKHERHPIFGNIVDEVAYHEKYPTIYHLRKKLVDSTDKADLRLIYLALAHMIKFRGHFLIEGDLNPDNSDVDKLFIQLVQTYNQLFEENPINASGVDAKAILSARLSKSRRLENLIAQLPGEKKNGLFGNLIALSLGLTPNFKSNFDLAEDAKLQLSKDTYDDDLDNLLAQIGDQYADLFLAAKNLSDAILLSDILRVNTEITKAPLSASMIKRYDEHHQDLTLLKALVRQQLPEKYKEIFFDQSKNGYAGYIDGGASQEEFYKFIKPILEKMDGTEELLVKLNREDLLRKQRTFDNGSIPHQIHLGELHAILRRQEDFYPFLKDNREKIEKILTFRIPYYVGPLARGNSRFAWMTRKSEETITPWNFEEVVDKGASAQSFIERMTNFDKNLPNEKVLPKHSLLYEYFTVYNELTKVKYVTEGMRKPAFLSGEQKKAIVDLLFKTNRKVTVKQLKEDYFKKIECFDSVEISGVEDRFNASLGTYHDLLKIIKDKDFLDNEENEDILEDIVLTLTLFEDREMIEERLKTYAHLFDDKVMKQLKRRRYTGWGRLSRKLINGIRDKQSGKTILDFLKSDGFANRNFMQLIHDDSLTFKEDIQKAQVSGQGDSLHEHIANLAGSPAIKKGILQTVKVVDELVKVMGRHKPENIVIEMARENQTTQKGQKNSRERMKRIEEGIKELGSQILKEHPVENTQLQNEKLYLYYLQNGRDMYVDQELDINRLSDYDVDHIVPQSFLKDDSIDNKVLTRSDKARGKSDNVPSEEVVKKMKNYWRQLLNAKLITQRKFDNLTKAERGGLSELDKAGFIKRQLVETRQITKHVAQILDSRMNTKYDENDKLIREVKVITLKSKLVSDFRKDFQFYKVREINNYHHAHDAYLNAVVGTALIKKYPKLESEFVYGDYKVYDVRKMIAKSEQEIGKATAKYFFYSNIMNFFKTEITLANGEIRKRPLIETNGETGEIVWDKGRDFATVRKVLSMPQVNIVKKTEVQTGGFSKESILPKRNSDKLIARKKDWDPKKYGGFDSPTVAYSVLVVAKVEKGKSKKLKSVKELLGITIMERSSFEKNPIDFLEAKGYKEVKKDLIIKLPKYSLFELENGRKRMLASAGELQKGNELALPSKYVNFLYLASHYEKLKGSPEDNEQKQLFVEQHKHYLDEIIEQISEFSKRVILADANLDKVLSAYNKHRDKPIREQAENIIHLFTLTNLGAPAAFKYFDTTIDRKRYTSTKEVLDATLIHQSITGLYETRIDLSQLGGDGGGGGEAAAKGSSGGTAPLEEEYRLFLEAPIQNVTLLEQWKREIPKVWAEINPPGLASTQAPIHVQLLSTALPVRVRQYPITLEAKRSLRETIRKFRAAGILRPVHSPWNTPLLPVRKSGTSEYRMVQDLREVNKRVETIHPTVPNPYTLLSLLPPDRIWYSVLDLKDAFFCIPLAPESQLIFAFEWADAEEGESGQLTWTRLPQGFKNSPTLFNEALNRDLQGFRLDHPSVSLLQYVDDLLIAADTQAACLSATRDLLMTLAELGYRVSGKKAQLCQEEVTYLGFKIHKGSRSLSNSRTQAILQIPVPKTKRQVREFLGTIGYCRLWIPGFAELAQPLYAATRPGNDPLVWGEKEEEAFQSLKLALTQPPALALPSLDKPFQLFVEETSGAAKGVLTQALGPWKRPVAYLSKRLDPVAAGWPRCLRAIAAAALLTREASKLTFGQDIEITSSHNLESLLRSPPDKWLTNARITQYQVLLLDPPRVRFKQTAALNPATLLPETDDTLPIHHCLDTLDSLTSTRPDLTDQPLAQAEATLFTDGSSYIRDGKRYAGAAVVTLDSVIWAEPLPIGTSAQKAELIALTKALEWSKDKSVNIYTDSRYAFATLHVHGMIYRERGWLTAGGKAIKNAPEILALLTAVWLPKRVAVMHCKGHQKDDAPTSTGNRRADEVAREVAIRPLSTQATISAGKRTADGSEFEKRTADGSEFESPKKKAKVE

SEQ ID NO: 1143 - protein, 2102 aa, synthetic construct
MPAAKRVKLDGGDKKYSIGLDIGTNSVGWAVITDEYKVPSKKFKVLGNTDRHSIKKNLIGALLFDSGETAEATRLKRTARRRYTRRKNRICYLQEIFSNEMAKVDDSFFHRLEESFLVEEDKKHERHPIFGNIVDEVAYHEKYPTIYHLRKKLVDSTDKADLRLIYLALAHMIKFRGHFLIEGDLNPDNSDVDKLFIQLVQTYNQLFEENPINASGVDAKAILSARLSKSRRLENLIAQLPGEKKNGLFGNLIALSLGLTPNFKSNFDLAEDAKLQLSKDTYDDDLDNLLAQIGDQYADLFLAAKNLSDAILLSDILRVNTEITKAPLSASMIKRYDEHHQDLTLLKALVRQQLPEKYKEIFFDQSKNGYAGYIDGGASQEEFYKFIKPILEKMDGTEELLVKLNREDLLRKQRTFDNGSIPHQIHLGELHAILRRQEDFYPFLKDNREKIEKILTFRIPYYVGPLARGNSRFAWMTRKSEETITPWNFEEVVDKGASAQSFIERMTNFDKNLPNEKVLPKHSLLYEYFTVYNELTKVKYVTEGMRKPAFLSGEQKKAIVDLLFKTNRKVTVKQLKEDYFKKIECFDSVEISGVEDRFNASLGTYHDLLKIIKDKDFLDNEENEDILEDIVLTLTLFEDREMIEERLKTYAHLFDDKVMKQLKRRRYTGWGRLSRKLINGIRDKQSGKTILDFLKSDGFANRNFMQLIHDDSLTFKEDIQKAQVSGQGDSLHEHIANLAGSPAIKKGILQTVKVVDELVKVMGRHKPENIVIEMARENQTTQKGQKNSRERMKRIEEGIKELGSQILKEHPVENTQLQNEKLYLYYLQNGRDMYVDQELDINRLSDYDVDHIVPQSFLKDDSIDNKVLTRSDKARGKSDNVPSEEVVKKMKNYWRQLLNAKLITQRKFDNLTKAERGGLSELDKAGFIKRQLVETRQITKHVAQILDSRMNTKYDENDKLIREVKVITLKSKLVSDFRKDFQFYKVREINNYHHAHDAYLNAVVGTALIKKYPKLESEFVYGDYKVYDVRKMIAKSEQEIGKATAKYFFYSNIMNFFKTEITLANGEIRKRPLIETNGETGEIVWDKGRDFATVRKVLSMPQVNIVKKTEVQTGGFSKESILPKRNSDKLIARKKDWDPKKYGGFDSPTVAYSVLVVAKVEKGKSKKLKSVKELLGITIMERSSFEKNPIDFLEAKGYKEVKKDLIIKLPKYSLFELENGRKRMLASAGELQKGNELALPSKYVNFLYLASHYEKLKGSPEDNEQKQLFVEQHKHYLDEIIEQISEFSKRVILADANLDKVLSAYNKHRDKPIREQAENIIHLFTLTNLGAPAAFKYFDTTIDRKRYTSTKEVLDATLIHQSITGLYETRIDLSQLGGDGGGSSGSSGSSGSSGSSGGTAPLEEEYRLFLEAPIQNVTLLEQWKREIPKVWAEINPPGLASTQAPIHVQLLSTALPVRVRQYPITLEAKRSLRETIRKFRAAGILRPVHSPWNTPLLPVRKSGTSEYRMVQDLREVNKRVETIHPTVPNPYTLLSLLPPDRIWYSVLDLKDAFFCIPLAPESQLIFAFEWADAEEGESGQLTWTRLPQGFKNSPTLFNEALNRDLQGFRLDHPSVSLLQYVDDLLIAADTQAACLSATRDLLMTLAELGYRVSGKKAQLCQEEVTYLGFKIHKGSRSLSNSRTQAILQIPVPKTKRQVREFLGTIGYCRLWIPGFAELAQPLYAATRPGNDPLVWGEKEEEAFQSLKLALTQPPALALPSLDKPFQLFVEETSGAAKGVLTQALGPWKRPVAYLSKRLDPVAAGWPRCLRAIAAAALLTREASKLTFGQDIEITSSHNLESLLRSPPDKWLTNARITQYQVLLLDPPRVRFKQTAALNPATLLPETDDTLPIHHCLDTLDSLTSTRPDLTDQPLAQAEATLFTDGSSYIRDGKRYAGAAVVTLDSVIWAEPLPIGTSAQKAELIALTKALEWSKDKSVNIYTDSRYAFATLHVHGMIYRERGWLTAGGKAIKNAPEILALLTAVWLPKRVAVMHCKGHQKDDAPTSTGNRRADEVAREVAIRPLSTQATISAGKRTADGSEFEKRTADGSEFESPKKKAKVE

SEQ ID NO: 1144 - protein, 2090 aa, synthetic construct
MPAAKRVKLDGGDKKYSIGLDIGTNSVGWAVITDEYKVPSKKFKVLGNTDRHSIKKNLIGALLFDSGETAEATRLKRTARRRYTRRKNRICYLQEIFSNEMAKVDDSFFHRLEESFLVEEDKKHERHPIFGNIVDEVAYHEKYPTIYHLRKKLVDSTDKADLRLIYLALAHMIKFRGHFLIEGDLNPDNSDVDKLFIQLVQTYNQLFEENPINASGVDAKAILSARLSKSRRLENLIAQLPGEKKNGLFGNLIALSLGLTPNFKSNFDLAEDAKLQLSKDTYDDDLDNLLAQIGDQYADLFLAAKNLSDAILLSDILRVNTEITKAPLSASMIKRYDEHHQDLTLLKALVRQQLPEKYKEIFFDQSKNGYAGYIDGGASQEEFYKFIKPILEKMDGTEELLVKLNREDLLRKQRTFDNGSIPHQIHLGELHAILRRQEDFYPFLKDNREKIEKILTFRIPYYVGPLARGNSRFAWMTRKSEETITPWNFEEVVDKGASAQSFIERMTNFDKNLPNEKVLPKHSLLYEYFTVYNELTKVKYVTEGMRKPAFLSGEQKKAIVDLLFKTNRKVTVKQLKEDYFKKIECFDSVEISGVEDRFNASLGTYHDLLKIIKDKDFLDNEENEDILEDIVLTLTLFEDREMIEERLKTYAHLFDDKVMKQLKRRRYTGWGRLSRKLINGIRDKQSGKTILDFLKSDGFANRNFMQLIHDDSLTFKEDIQKAQVSGQGDSLHEHIANLAGSPAIKKGILQTVKVVDELVKVMGRHKPENIVIEMARENQTTQKGQKNSRERMKRIEEGIKELGSQILKEHPVENTQLQNEKLYLYYLQNGRDMYVDQELDINRLSDYDVDHIVPQSFLKDDSIDNKVLTRSDKARGKSDNVPSEEVVKKMKNYWRQLLNAKLITQRKFDNLTKAERGGLSELDKAGFIKRQLVETRQITKHVAQILDSRMNTKYDENDKLIREVKVITLKSKLVSDFRKDFQFYKVREINNYHHAHDAYLNAVVGTALIKKYPKLESEFVYGDYKVYDVRKMIAKSEQEIGKATAKYFFYSNIMNFFKTEITLANGEIRKRPLIETNGETGEIVWDKGRDFATVRKVLSMPQVNIVKKTEVQTGGFSKESILPKRNSDKLIARKKDWDPKKYGGFDSPTVAYSVLVVAKVEKGKSKKLKSVKELLGITIMERSSFEKNPIDFLEAKGYKEVKKDLIIKLPKYSLFELENGRKRMLASAGELQKGNELALPSKYVNFLYLASHYEKLKGSPEDNEQKQLFVEQHKHYLDEIIEQISEFSKRVILADANLDKVLSAYNKHRDKPIREQAENIIHLFTLTNLGAPAAFKYFDTTIDRKRYTSTKEVLDATLIHQSITGLYETRIDLSQLGGDGGGGSGGTAPLEEEYRLFLEAPIQNVTLLEQWKREIPKVWAEINPPGLASTQAPIHVQLLSTALPVRVRQYPITLEAKRSLRETIRKFRAAGILRPVHSPWNTPLLPVRKSGTSEYRMVQDLREVNKRVETIHPTVPNPYTLLSLLPPDRIWYSVLDLKDAFFCIPLAPESQLIFAFEWADAEEGESGQLTWTRLPQGFKNSPTLFNEALNRDLQGFRLDHPSVSLLQYVDDLLIAADTQAACLSATRDLLMTLAELGYRVSGKKAQLCQEEVTYLGFKIHKGSRSLSNSRTQAILQIPVPKTKRQVREFLGTIGYCRLWIPGFAELAQPLYAATRPGNDPLVWGEKEEEAFQSLKLALTQPPALALPSLDKPFQLFVEETSGAAKGVLTQALGPWKRPVAYLSKRLDPVAAGWPRCLRAIAAAALLTREASKLTFGQDIEITSSHNLESLLRSPPDKWLTNARITQYQVLLLDPPRVRFKQTAALNPATLLPETDDTLPIHHCLDTLDSLTSTRPDLTDQPLAQAEATLFTDGSSYIRDGKRYAGAAVVTLDSVIWAEPLPIGTSAQKAELIALTKALEWSKDKSVNIYTDSRYAFATLHVHGMIYRERGWLTAGGKAIKNAPEILALLTAVWLPKRVAVMHCKGHQKDDAPTSTGNRRADEVAREVAIRPLSTQATISAGKRTADGSEFEKRTADGSEFESPKKKAKVE

SEQ ID NO: 1145 - protein, 2098 aa, synthetic construct
MPAAKRVKLDGGDKKYSIGLDIGTNSVGWAVITDEYKVPSKKFKVLGNTDRHSIKKNLIGALLFDSGETAEATRLKRTARRRYTRRKNRICYLQEIFSNEMAKVDDSFFHRLEESFLVEEDKKHERHPIFGNIVDEVAYHEKYPTIYHLRKKLVDSTDKADLRLIYLALAHMIKFRGHFLIEGDLNPDNSDVDKLFIQLVQTYNQLFEENPINASGVDAKAILSARLSKSRRLENLIAQLPGEKKNGLFGNLIALSLGLTPNFKSNFDLAEDAKLQLSKDTYDDDLDNLLAQIGDQYADLFLAAKNLSDAILLSDILRVNTEITKAPLSASMIKRYDEHHQDLTLLKALVRQQLPEKYKEIFFDQSKNGYAGYIDGGASQEEFYKFIKPILEKMDGTEELLVKLNREDLLRKQRTFDNGSIPHQIHLGELHAILRRQEDFYPFLKDNREKIEKILTFRIPYYVGPLARGNSRFAWMTRKSEETITPWNFEEVVDKGASAQSFIERMTNFDKNLPNEKVLPKHSLLYEYFTVYNELTKVKYVTEGMRKPAFLSGEQKKAIVDLLFKTNRKVTVKQLKEDYFKKIECFDSVEISGVEDRFNASLGTYHDLLKIIKDKDFLDNEENEDILEDIVLTLTLFEDREMIEERLKTYAHLFDDKVMKQLKRRRYTGWGRLSRKLINGIRDKQSGKTILDFLKSDGFANRNFMQLIHDDSLTFKEDIQKAQVSGQGDSLHEHIANLAGSPAIKKGILQTVKVVDELVKVMGRHKPENIVIEMARENQTTQKGQKNSRERMKRIEEGIKELGSQILKEHPVENTQLQNEKLYLYYLQNGRDMYVDQELDINRLSDYDVDHIVPQSFLKDDSIDNKVLTRSDKARGKSDNVPSEEVVKKMKNYWRQLLNAKLITQRKFDNLTKAERGGLSELDKAGFIKRQLVETRQITKHVAQILDSRMNTKYDENDKLIREVKVITLKSKLVSDFRKDFQFYKVREINNYHHAHDAYLNAVVGTALIKKYPKLESEFVYGDYKVYDVRKMIAKSEQEIGKATAKYFFYSNIMNFFKTEITLANGEIRKRPLIETNGETGEIVWDKGRDFATVRKVLSMPQVNIVKKTEVQTGGFSKESILPKRNSDKLIARKKDWDPKKYGGFDSPTVAYSVLVVAKVEKGKSKKLKSVKELLGITIMERSSFEKNPIDFLEAKGYKEVKKDLIIKLPKYSLFELENGRKRMLASAGELQKGNELALPSKYVNFLYLASHYEKLKGSPEDNEQKQLFVEQHKHYLDEIIEQISEFSKRVILADANLDKVLSAYNKHRDKPIREQAENIIHLFTLTNLGAPAAFKYFDTTIDRKRYTSTKEVLDATLIHQSITGLYETRIDLSQLGGDGGEAAAKPAPGSSGGTAPLEEEYRLFLEAPIQNVTLLEQWKREIPKVWAEINPPGLASTQAPIHVQLLSTALPVRVRQYPITLEAKRSLRETIRKFRAAGILRPVHSPWNTPLLPVRKSGTSEYRMVQDLREVNKRVETIHPTVPNPYTLLSLLPPDRIWYSVLDLKDAFFCIPLAPESQLIFAFEWADAEEGESGQLTWTRLPQGFKNSPTLFNEALNRDLQGFRLDHPSVSLLQYVDDLLIAADTQAACLSATRDLLMTLAELGYRVSGKKAQLCQEEVTYLGFKIHKGSRSLSNSRTQAILQIPVPKTKRQVREFLGTIGYCRLWIPGFAELAQPLYAATRPGNDPLVWGEKEEEAFQSLKLALTQPPALALPSLDKPFQLFVEETSGAAKGVLTQALGPWKRPVAYLSKRLDPVAAGWPRCLRAIAAAALLTREASKLTFGQDIEITSSHNLESLLRSPPDKWLTNARITQYQVLLLDPPRVRFKQTAALNPATLLPETDDTLPIHHCLDTLDSLTSTRPDLTDQPLAQAEATLFTDGSSYIRDGKRYAGAAVVTLDSVIWAEPLPIGTSAQKAELIALTKALEWSKDKSVNIYTDSRYAFATLHVHGMIYRERGWLTAGGKAIKNAPEILALLTAVWLPKRVAVMHCKGHQKDDAPTSTGNRRADEVAREVAIRPLSTQATISAGKRTADGSEFEKRTADGSEFESPKKKAKVE

SEQ ID NO: 1146 - protein, 2133 aa, synthetic construct
MPAAKRVKLDGGDKKYSIGLDIGTNSVGWAVITDEYKVPSKKFKVLGNTDRHSIKKNLIGALLFDSGETAEATRLKRTARRRYTRRKNRICYLQEIFSNEMAKVDDSFFHRLEESFLVEEDKKHERHPIFGNIVDEVAYHEKYPTIYHLRKKLVDSTDKADLRLIYLALAHMIKFRGHFLIEGDLNPDNSDVDKLFIQLVQTYNQLFEENPINASGVDAKAILSARLSKSRRLENLIAQLPGEKKNGLFGNLIALSLGLTPNFKSNFDLAEDAKLQLSKDTYDDDLDNLLAQIGDQYADLFLAAKNLSDAILLSDILRVNTEITKAPLSASMIKRYDEHHQDLTLLKALVRQQLPEKYKEIFFDQSKNGYAGYIDGGASQEEFYKFIKPILEKMDGTEELLVKLNREDLLRKQRTFDNGSIPHQIHLGELHAILRRQEDFYPFLKDNREKIEKILTFRIPYYVGPLARGNSRFAWMTRKSEETITPWNFEEVVDKGASAQSFIERMTNFDKNLPNEKVLPKHSLLYEYFTVYNELTKVKYVTEGMRKPAFLSGEQKKAIVDLLFKTNRKVTVKQLKEDYFKKIECFDSVEISGVEDRFNASLGTYHDLLKIIKDKDFLDNEENEDILEDIVLTLTLFEDREMIEERLKTYAHLFDDKVMKQLKRRRYTGWGRLSRKLINGIRDKQSGKTILDFLKSDGFANRNFMQLIHDDSLTFKEDIQKAQVSGQGDSLHEHIANLAGSPAIKKGILQTVKVVDELVKVMGRHKPENIVIEMARENQTTQKGQKNSRERMKRIEEGIKELGSQILKEHPVENTQLQNEKLYLYYLQNGRDMYVDQELDINRLSDYDVDHIVPQSFLKDDSIDNKVLTRSDKARGKSDNVPSEEVVKKMKNYWRQLLNAKLITQRKFDNLTKAERGGLSELDKAGFIKRQLVETRQITKHVAQILDSRMNTKYDENDKLIREVKVITLKSKLVSDFRKDFQFYKVREINNYHHAHDAYLNAVVGTALIKKYPKLESEFVYGDYKVYDVRKMIAKSEQEIGKATAKYFFYSNIMNFFKTEITLANGEIRKRPLIETNGETGEIVWDKGRDFATVRKVLSMPQVNIVKKTEVQTGGFSKESILPKRNSDKLIARKKDWDPKKYGGFDSPTVAYSVLVVAKVEKGKSKKLKSVKELLGITIMERSSFEKNPIDFLEAKGYKEVKKDLIIKLPKYSLFELENGRKRMLASAGELQKGNELALPSKYVNFLYLASHYEKLKGSPEDNEQKQLFVEQHKHYLDEIIEQISEFSKRVILADANLDKVLSAYNKHRDKPIREQAENIIHLFTLTNLGAPAAFKYFDTTIDRKRYTSTKEVLDATLIHQSITGLYETRIDLSQLGGDGGAEAAAKEAAAKEAAAKEAAAKALEAEAAAKEAAAKEAAAKEAAAKAGGTAPLEEEYRLFLEAPIQNVTLLEQWKREIPKVWAEINPPGLASTQAPIHVQLLSTALPVRVRQYPITLEAKRSLRETIRKFRAAGILRPVHSPWNTPLLPVRKSGTSEYRMVQDLREVNKRVETIHPTVPNPYTLLSLLPPDRIWYSVLDLKDAFFCIPLAPESQLIFAFEWADAEEGESGQLTWTRLPQGFKNSPTLFNEALNRDLQGFRLDHPSVSLLQYVDDLLIAADTQAACLSATRDLLMTLAELGYRVSGKKAQLCQEEVTYLGFKIHKGSRSLSNSRTQAILQIPVPKTKRQVREFLGTIGYCRLWIPGFAELAQPLYAATRPGNDPLVWGEKEEEAFQSLKLALTQPPALALPSLDKPFQLFVEETSGAAKGVLTQALGPWKRPVAYLSKRLDPVAAGWPRCLRAIAAAALLTREASKLTFGQDIEITSSHNLESLLRSPPDKWLTNARITQYQVLLLDPPRVRFKQTAALNPATLLPETDDTLPIHHCLDTLDSLTSTRPDLTDQPLAQAEATLFTDGSSYIRDGKRYAGAAVVTLDSVIWAEPLPIGTSAQKAELIALTKALEWSKDKSVNIYTDSRYAFATLHVHGMIYRERGWLTAGGKAIKNAPEILALLTAVWLPKRVAVMHCKGHQKDDAPTSTGNRRADEVAREVAIRPLSTQATISAGKRTADGSEFEKRTADGSEFESPKKKAKVE

SEQ ID NO: 1147 - protein, 2098 aa, synthetic construct
MPAAKRVKLDGGDKKYSIGLDIGTNSVGWAVITDEYKVPSKKFKVLGNTDRHSIKKNLIGALLFDSGETAEATRLKRTARRRYTRRKNRICYLQEIFSNEMAKVDDSFFHRLEESFLVEEDKKHERHPIFGNIVDEVAYHEKYPTIYHLRKKLVDSTDKADLRLIYLALAHMIKFRGHFLIEGDLNPDNSDVDKLFIQLVQTYNQLFEENPINASGVDAKAILSARLSKSRRLENLIAQLPGEKKNGLFGNLIALSLGLTPNFKSNFDLAEDAKLQLSKDTYDDDLDNLLAQIGDQYADLFLAAKNLSDAILLSDILRVNTEITKAPLSASMIKRYDEHHQDLTLLKALVRQQLPEKYKEIFFDQSKNGYAGYIDGGASQEEFYKFIKPILEKMDGTEELLVKLNREDLLRKQRTFDNGSIPHQIHLGELHAILRRQEDFYPFLKDNREKIEKILTFRIPYYVGPLARGNSRFAWMTRKSEETITPWNFEEVVDKGASAQSFIERMTNFDKNLPNEKVLPKHSLLYEYFTVYNELTKVKYVTEGMRKPAFLSGEQKKAIVDLLFKTNRKVTVKQLKEDYFKKIECFDSVEISGVEDRFNASLGTYHDLLKIIKDKDFLDNEENEDILEDIVLTLTLFEDREMIEERLKTYAHLFDDKVMKQLKRRRYTGWGRLSRKLINGIRDKQSGKTILDFLKSDGFANRNFMQLIHDDSLTFKEDIQKAQVSGQGDSLHEHIANLAGSPAIKKGILQTVKVVDELVKVMGRHKPENIVIEMARENQTTQKGQKNSRERMKRIEEGIKELGSQILKEHPVENTQLQNEKLYLYYLQNGRDMYVDQELDINRLSDYDVDHIVPQSFLKDDSIDNKVLTRSDKARGKSDNVPSEEVVKKMKNYWRQLLNAKLITQRKFDNLTKAERGGLSELDKAGFIKRQLVETRQITKHVAQILDSRMNTKYDENDKLIREVKVITLKSKLVSDFRKDFQFYKVREINNYHHAHDAYLNAVVGTALIKKYPKLESEFVYGDYKVYDVRKMIAKSEQEIGKATAKYFFYSNIMNFFKTEITLANGEIRKRPLIETNGETGEIVWDKGRDFATVRKVLSMPQVNIVKKTEVQTGGFSKESILPKRNSDKLIARKKDWDPKKYGGFDSPTVAYSVLVVAKVEKGKSKKLKSVKELLGITIMERSSFEKNPIDFLEAKGYKEVKKDLIIKLPKYSLFELENGRKRMLASAGELQKGNELALPSKYVNFLYLASHYEKLKGSPEDNEQKQLFVEQHKHYLDEIIEQISEFSKRVILADANLDKVLSAYNKHRDKPIREQAENIIHLFTLTNLGAPAAFKYFDTTIDRKRYTSTKEVLDATLIHQSITGLYETRIDLSQLGGDGGGGSEAAAKPAPGGTAPLEEEYRLFLEAPIQNVTLLEQWKREIPKVWAEINPPGLASTQAPIHVQLLSTALPVRVRQYPITLEAKRSLRETIRKFRAAGILRPVHSPWNTPLLPVRKSGTSEYRMVQDLREVNKRVETIHPTVPNPYTLLSLLPPDRIWYSVLDLKDAFFCIPLAPESQLIFAFEWADAEEGESGQLTWTRLPQGFKNSPTLFNEALNRDLQGFRLDHPSVSLLQYVDDLLIAADTQAACLSATRDLLMTLAELGYRVSGKKAQLCQEEVTYLGFKIHKGSRSLSNSRTQAILQIPVPKTKRQVREFLGTIGYCRLWIPGFAELAQPLYAATRPGNDPLVWGEKEEEAFQSLKLALTQPPALALPSLDKPFQLFVEETSGAAKGVLTQALGPWKRPVAYLSKRLDPVAAGWPRCLRAIAAAALLTREASKLTFGQDIEITSSHNLESLLRSPPDKWLTNARITQYQVLLLDPPRVRFKQTAALNPATLLPETDDTLPIHHCLDTLDSLTSTRPDLTDQPLAQAEATLFTDGSSYIRDGKRYAGAAVVTLDSVIWAEPLPIGTSAQKAELIALTKALEWSKDKSVNIYTDSRYAFATLHVHGMIYRERGWLTAGGKAIKNAPEILALLTAVWLPKRVAVMHCKGHQKDDAPTSTGNRRADEVAREVAIRPLSTQATISAGKRTADGSEFEKRTADGSEFESPKKKAKVE

SEQ ID NO: 1148 - protein, 2090 aa, synthetic construct
MPAAKRVKLDGGDKKYSIGLDIGTNSVGWAVITDEYKVPSKKFKVLGNTDRHSIKKNLIGALLFDSGETAEATRLKRTARRRYTRRKNRICYLQEIFSNEMAKVDDSFFHRLEESFLVEEDKKHERHPIFGNIVDEVAYHEKYPTIYHLRKKLVDSTDKADLRLIYLALAHMIKFRGHFLIEGDLNPDNSDVDKLFIQLVQTYNQLFEENPINASGVDAKAILSARLSKSRRLENLIAQLPGEKKNGLFGNLIALSLGLTPNFKSNFDLAEDAKLQLSKDTYDDDLDNLLAQIGDQYADLFLAAKNLSDAILLSDILRVNTEITKAPLSASMIKRYDEHHQDLTLLKALVRQQLPEKYKEIFFDQSKNGYAGYIDGGASQEEFYKFIKPILEKMDGTEELLVKLNREDLLRKQRTFDNGSIPHQIHLGELHAILRRQEDFYPFLKDNREKIEKILTFRIPYYVGPLARGNSRFAWMTRKSEETITPWNFEEVVDKGASAQSFIERMTNFDKNLPNEKVLPKHSLLYEYFTVYNELTKVKYVTEGMRKPAFLSGEQKKAIVDLLFKTNRKVTVKQLKEDYFKKIECFDSVEISGVEDRFNASLGTYHDLLKIIKDKDFLDNEENEDILEDIVLTLTLFEDREMIEERLKTYAHLFDDKVMKQLKRRRYTGWGRLSRKLINGIRDKQSGKTILDFLKSDGFANRNFMQLIHDDSLTFKEDIQKAQVSGQGDSLHEHIANLAGSPAIKKGILQTVKVVDELVKVMGRHKPENIVIEMARENQTTQKGQKNSRERMKRIEEGIKELGSQILKEHPVENTQLQNEKLYLYYLQNGRDMYVDQELDINRLSDYDVDHIVPQSFLKDDSIDNKVLTRSDKARGKSDNVPSEEVVKKMKNYWRQLLNAKLITQRKFDNLTKAERGGLSELDKAGFIKRQLVETRQITKHVAQILDSRMNTKYDENDKLIREVKVITLKSKLVSDFRKDFQFYKVREINNYHHAHDAYLNAVVGTALIKKYPKLESEFVYGDYKVYDVRKMIAKSEQEIGKATAKYFFYSNIMNFFKTEITLANGEIRKRPLIETNGETGEIVWDKGRDFATVRKVLSMPQVNIVKKTEVQTGGFSKESILPKRNSDKLIARKKDWDPKKYGGFDSPTVAYSVLVVAKVEKGKSKKLKSVKELLGITIMERSSFEKNPIDFLEAKGYKEVKKDLIIKLPKYSLFELENGRKRMLASAGELQKGNELALPSKYVNFLYLASHYEKLKGSPEDNEQKQLFVEQHKHYLDEIIEQISEFSKRVILADANLDKVLSAYNKHRDKPIREQAENIIHLFTLTNLGAPAAFKYFDTTIDRKRYTSTKEVLDATLIHQSITGLYETRIDLSQLGGDGGPAPGGTAPLEEEYRLFLEAPIQNVTLLEQWKREIPKVWAEINPPGLASTQAPIHVQLLSTALPVRVRQYPITLEAKRSLRETIRKFRAAGILRPVHSPWNTPLLPVRKSGTSEYRMVQDLREVNKRVETIHPTVPNPYTLLSLLPPDRIWYSVLDLKDAFFCIPLAPESQLIFAFEWADAEEGESGQLTWTRLPQGFKNSPTLFNEALNRDLQGFRLDHPSVSLLQYVDDLLIAADTQAACLSATRDLLMTLAELGYRVSGKKAQLCQEEVTYLGFKIHKGSRSLSNSRTQAILQIPVPKTKRQVREFLGTIGYCRLWIPGFAELAQPLYAATRPGNDPLVWGEKEEEAFQSLKLALTQPPALALPSLDKPFQLFVEETSGAAKGVLTQALGPWKRPVAYLSKRLDPVAAGWPRCLRAIAAAALLTREASKLTFGQDIEITSSHNLESLLRSPPDKWLTNARITQYQVLLLDPPRVRFKQTAALNPATLLPETDDTLPIHHCLDTLDSLTSTRPDLTDQPLAQAEATLFTDGSSYIRDGKRYAGAAVVTLDSVIWAEPLPIGTSAQKAELIALTKALEWSKDKSVNIYTDSRYAFATLHVHGMIYRERGWLTAGGKAIKNAPEILALLTAVWLPKRVAVMHCKGHQKDDAPTSTGNRRADEVAREVAIRPLSTQATISAGKRTADGSEFEKRTADGSEFESPKKKAKVE

SEQ ID NO: 1149 - protein, 2092 aa, synthetic construct
MPAAKRVKLDGGDKKYSIGLDIGTNSVGWAVITDEYKVPSKKFKVLGNTDRHSIKKNLIGALLFDSGETAEATRLKRTARRRYTRRKNRICYLQEIFSNEMAKVDDSFFHRLEESFLVEEDKKHERHPIFGNIVDEVAYHEKYPTIYHLRKKLVDSTDKADLRLIYLALAHMIKFRGHFLIEGDLNPDNSDVDKLFIQLVQTYNQLFEENPINASGVDAKAILSARLSKSRRLENLIAQLPGEKKNGLFGNLIALSLGLTPNFKSNFDLAEDAKLQLSKDTYDDDLDNLLAQIGDQYADLFLAAKNLSDAILLSDILRVNTEITKAPLSASMIKRYDEHHQDLTLLKALVRQQLPEKYKEIFFDQSKNGYAGYIDGGASQEEFYKFIKPILEKMDGTEELLVKLNREDLLRKQRTFDNGSIPHQIHLGELHAILRRQEDFYPFLKDNREKIEKILTFRIPYYVGPLARGNSRFAWMTRKSEETITPWNFEEVVDKGASAQSFIERMTNFDKNLPNEKVLPKHSLLYEYFTVYNELTKVKYVTEGMRKPAFLSGEQKKAIVDLLFKTNRKVTVKQLKEDYFKKIECFDSVEISGVEDRFNASLGTYHDLLKIIKDKDFLDNEENEDILEDIVLTLTLFEDREMIEERLKTYAHLFDDKVMKQLKRRRYTGWGRLSRKLINGIRDKQSGKTILDFLKSDGFANRNFMQLIHDDSLTFKEDIQKAQVSGQGDSLHEHIANLAGSPAIKKGILQTVKVVDELVKVMGRHKPENIVIEMARENQTTQKGQKNSRERMKRIEEGIKELGSQILKEHPVENTQLQNEKLYLYYLQNGRDMYVDQELDINRLSDYDVDHIVPQSFLKDDSIDNKVLTRSDKARGKSDNVPSEEVVKKMKNYWRQLLNAKLITQRKFDNLTKAERGGLSELDKAGFIKRQLVETRQITKHVAQILDSRMNTKYDENDKLIREVKVITLKSKLVSDFRKDFQFYKVREINNYHHAHDAYLNAVVGTALIKKYPKLESEFVYGDYKVYDVRKMIAKSEQEIGKATAKYFFYSNIMNFFKTEITLANGEIRKRPLIETNGETGEIVWDKGRDFATVRKVLSMPQVNIVKKTEVQTGGFSKESILPKRNSDKLIARKKDWDPKKYGGFDSPTVAYSVLVVAKVEKGKSKKLKSVKELLGITIMERSSFEKNPIDFLEAKGYKEVKKDLIIKLPKYSLFELENGRKRMLASAGELQKGNELALPSKYVNFLYLASHYEKLKGSPEDNEQKQLFVEQHKHYLDEIIEQISEFSKRVILADANLDKVLSAYNKHRDKPIREQAENIIHLFTLTNLGAPAAFKYFDTTIDRKRYTSTKEVLDATLIHQSITGLYETRIDLSQLGGDGGPAPAPGGTAPLEEEYRLFLEAPIQNVTLLEQWKREIPKVWAEINPPGLASTQAPIHVQLLSTALPVRVRQYPITLEAKRSLRETIRKFRAAGILRPVHSPWNTPLLPVRKSGTSEYRMVQDLREVNKRVETIHPTVPNPYTLLSLLPPDRIWYSVLDLKDAFFCIPLAPESQLIFAFEWADAEEGESGQLTWTRLPQGFKNSPTLFNEALNRDLQGFRLDHPSVSLLQYVDDLLIAADTQAACLSATRDLLMTLAELGYRVSGKKAQLCQEEVTYLGFKIHKGSRSLSNSRTQAILQIPVPKTKRQVREFLGTIGYCRLWIPGFAELAQPLYAATRPGNDPLVWGEKEEEAFQSLKLALTQPPALALPSLDKPFQLFVEETSGAAKGVLTQALGPWKRPVAYLSKRLDPVAAGWPRCLRAIAAAALLTREASKLTFGQDIEITSSHNLESLLRSPPDKWLTNARITQYQVLLLDPPRVRFKQTAALNPATLLPETDDTLPIHHCLDTLDSLTSTRPDLTDQPLAQAEATLFTDGSSYIRDGKRYAGAAVVTLDSVIWAEPLPIGTSAQKAELIALTKALEWSKDKSVNIYTDSRYAFATLHVHGMIYRERGWLTAGGKAIKNAPEILALLTAVWLPKRVAVMHCKGHQKDDAPTSTGNRRADEVAREVAIRPLSTQATISAGKRTADGSEFEKRTADGSEFESPKKKAKVE

SEQ ID NO: 1150 - protein, 2096 aa, synthetic construct
MPAAKRVKLDGGDKKYSIGLDIGTNSVGWAVITDEYKVPSKKFKVLGNTDRHSIKKNLIGALLFDSGETAEATRLKRTARRRYTRRKNRICYLQEIFSNEMAKVDDSFFHRLEESFLVEEDKKHERHPIFGNIVDEVAYHEKYPTIYHLRKKLVDSTDKADLRLIYLALAHMIKFRGHFLIEGDLNPDNSDVDKLFIQLVQTYNQLFEENPINASGVDAKAILSARLSKSRRLENLIAQLPGEKKNGLFGNLIALSLGLTPNFKSNFDLAEDAKLQLSKDTYDDDLDNLLAQIGDQYADLFLAAKNLSDAILLSDILRVNTEITKAPLSASMIKRYDEHHQDLTLLKALVRQQLPEKYKEIFFDQSKNGYAGYIDGGASQEEFYKFIKPILEKMDGTEELLVKLNREDLLRKQRTFDNGSIPHQIHLGELHAILRRQEDFYPFLKDNREKIEKILTFRIPYYVGPLARGNSRFAWMTRKSEETITPWNFEEVVDKGASAQSFIERMTNFDKNLPNEKVLPKHSLLYEYFTVYNELTKVKYVTEGMRKPAFLSGEQKKAIVDLLFKTNRKVTVKQLKEDYFKKIECFDSVEISGVEDRFNASLGTYHDLLKIIKDKDFLDNEENEDILEDIVLTLTLFEDREMIEERLKTYAHLFDDKVMKQLKRRRYTGWGRLSRKLINGIRDKQSGKTILDFLKSDGFANRNFMQLIHDDSLTFKEDIQKAQVSGQGDSLHEHIANLAGSPAIKKGILQTVKVVDELVKVMGRHKPENIVIEMARENQTTQKGQKNSRERMKRIEEGIKELGSQILKEHPVENTQLQNEKLYLYYLQNGRDMYVDQELDINRLSDYDVDHIVPQSFLKDDSIDNKVLTRSDKARGKSDNVPSEEVVKKMKNYWRQLLNAKLITQRKFDNLTKAERGGLSELDKAGFIKRQLVETRQITKHVAQILDSRMNTKYDENDKLIREVKVITLKSKLVSDFRKDFQFYKVREINNYHHAHDAYLNAVVGTALIKKYPKLESEFVYGDYKVYDVRKMIAKSEQEIGKATAKYFFYSNIMNFFKTEITLANGEIRKRPLIETNGETGEIVWDKGRDFATVRKVLSMPQVNIVKKTEVQTGGFSKESILPKRNSDKLIARKKDWDPKKYGGFDSPTVAYSVLVVAKVEKGKSKKLKSVKELLGITIMERSSFEKNPIDFLEAKGYKEVKKDLIIKLPKYSLFELENGRKRMLASAGELQKGNELALPSKYVNFLYLASHYEKLKGSPEDNEQKQLFVEQHKHYLDEIIEQISEFSKRVILADANLDKVLSAYNKHRDKPIREQAENIIHLFTLTNLGAPAAFKYFDTTIDRKRYTSTKEVLDATLIHQSITGLYETRIDLSQLGGDGGGGSPAPGGGGGTAPLEEEYRLFLEAPIQNVTLLEQWKREIPKVWAEINPPGLASTQAPIHVQLLSTALPVRVRQYPITLEAKRSLRETIRKFRAAGILRPVHSPWNTPLLPVRKSGTSEYRMVQDLREVNKRVETIHPTVPNPYTLLSLLPPDRIWYSVLDLKDAFFCIPLAPESQLIFAFEWADAEEGESGQLTWTRLPQGFKNSPTLFNEALNRDLQGFRLDHPSVSLLQYVDDLLIAADTQAACLSATRDLLMTLAELGYRVSGKKAQLCQEEVTYLGFKIHKGSRSLSNSRTQAILQIPVPKTKRQVREFLGTIGYCRLWIPGFAELAQPLYAATRPGNDPLVWGEKEEEAFQSLKLALTQPPALALPSLDKPFQLFVEETSGAAKGVLTQALGPWKRPVAYLSKRLDPVAAGWPRCLRAIAAAALLTREASKLTFGQDIEITSSHNLESLLRSPPDKWLTNARITQYQVLLLDPPRVRFKQTAALNPATLLPETDDTLPIHHCLDTLDSLTSTRPDLTDQPLAQAEATLFTDGSSYIRDGKRYAGAAVVTLDSVIWAEPLPIGTSAQKAELIALTKALEWSKDKSVNIYTDSRYAFATLHVHGMIYRERGWLTAGGKAIKNAPEILALLTAVWLPKRVAVMHCKGHQKDDAPTSTGNRRADEVAREVAIRPLSTQATISAGKRTADGSEFEKRTADGSEFESPKKKAKVE

SEQ ID NO: 1151 - protein, 2098 aa, synthetic construct
MPAAKRVKLDGGDKKYSIGLDIGTNSVGWAVITDEYKVPSKKFKVLGNTDRHSIKKNLIGALLFDSGETAEATRLKRTARRRYTRRKNRICYLQEIFSNEMAKVDDSFFHRLEESFLVEEDKKHERHPIFGNIVDEVAYHEKYPTIYHLRKKLVDSTDKADLRLIYLALAHMIKFRGHFLIEGDLNPDNSDVDKLFIQLVQTYNQLFEENPINASGVDAKAILSARLSKSRRLENLIAQLPGEKKNGLFGNLIALSLGLTPNFKSNFDLAEDAKLQLSKDTYDDDLDNLLAQIGDQYADLFLAAKNLSDAILLSDILRVNTEITKAPLSASMIKRYDEHHQDLTLLKALVRQQLPEKYKEIFFDQSKNGYAGYIDGGASQEEFYKFIKPILEKMDGTEELLVKLNREDLLRKQRTFDNGSIPHQIHLGELHAILRRQEDFYPFLKDNREKIEKILTFRIPYYVGPLARGNSRFAWMTRKSEETITPWNFEEVVDKGASAQSFIERMTNFDKNLPNEKVLPKHSLLYEYFTVYNELTKVKYVTEGMRKPAFLSGEQKKAIVDLLFKTNRKVTVKQLKEDYFKKIECFDSVEISGVEDRFNASLGTYHDLLKIIKDKDFLDNEENEDILEDIVLTLTLFEDREMIEERLKTYAHLFDDKVMKQLKRRRYTGWGRLSRKLINGIRDKQSGKTILDFLKSDGFANRNFMQLIHDDSLTFKEDIQKAQVSGQGDSLHEHIANLAGSPAIKKGILQTVKVVDELVKVMGRHKPENIVIEMARENQTTQKGQKNSRERMKRIEEGIKELGSQILKEHPVENTQLQNEKLYLYYLQNGRDMYVDQELDINRLSDYDVDHIVPQSFLKDDSIDNKVLTRSDKARGKSDNVPSEEVVKKMKNYWRQLLNAKLITQRKFDNLTKAERGGLSELDKAGFIKRQLVETRQITKHVAQILDSRMNTKYDENDKLIREVKVITLKSKLVSDFRKDFQFYKVREINNYHHAHDAYLNAVVGTALIKKYPKLESEFVYGDYKVYDVRKMIAKSEQEIGKATAKYFFYSNIMNFFKTEITLANGEIRKRPLIETNGETGEIVWDKGRDFATVRKVLSMPQVNIVKKTEVQTGGFSKESILPKRNSDKLIARKKDWDPKKYGGFDSPTVAYSVLVVAKVEKGKSKKLKSVKELLGITIMERSSFEKNPIDFLEAKGYKEVKKDLIIKLPKYSLFELENGRKRMLASAGELQKGNELALPSKYVNFLYLASHYEKLKGSPEDNEQKQLFVEQHKHYLDEIIEQISEFSKRVILADANLDKVLSAYNKHRDKPIREQAENIIHLFTLTNLGAPAAFKYFDTTIDRKRYTSTKEVLDATLIHQSITGLYETRIDLSQLGGDGGGSSGGGEAAAKGGTAPLEEEYRLFLEAPIQNVTLLEQWKREIPKVWAEINPPGLASTQAPIHVQLLSTALPVRVRQYPITLEAKRSLRETIRKFRAAGILRPVHSPWNTPLLPVRKSGTSEYRMVQDLREVNKRVETIHPTVPNPYTLLSLLPPDRIWYSVLDLKDAFFCIPLAPESQLIFAFEWADAEEGESGQLTWTRLPQGFKNSPTLFNEALNRDLQGFRLDHPSVSLLQYVDDLLIAADTQAACLSATRDLLMTLAELGYRVSGKKAQLCQEEVTYLGFKIHKGSRSLSNSRTQAILQIPVPKTKRQVREFLGTIGYCRLWIPGFAELAQPLYAATRPGNDPLVWGEKEEEAFQSLKLALTQPPALALPSLDKPFQLFVEETSGAAKGVLTQALGPWKRPVAYLSKRLDPVAAGWPRCLRAIAAAALLTREASKLTFGQDIEITSSHNLESLLRSPPDKWLTNARITQYQVLLLDPPRVRFKQTAALNPATLLPETDDTLPIHHCLDTLDSLTSTRPDLTDQPLAQAEATLFTDGSSYIRDGKRYAGAAVVTLDSVIWAEPLPIGTSAQKAELIALTKALEWSKDKSVNIYTDSRYAFATLHVHGMIYRERGWLTAGGKAIKNAPEILALLTAVWLPKRVAVMHCKGHQKDDAPTSTGNRRADEVAREVAIRPLSTQATISAGKRTADGSEFEKRTADGSEFESPKKKAKVE

SEQ ID NO: 1152 - protein, 2097 aa, synthetic construct
MPAAKRVKLDGGDKKYSIGLDIGTNSVGWAVITDEYKVPSKKFKVLGNTDRHSIKKNLIGALLFDSGETAEATRLKRTARRRYTRRKNRICYLQEIFSNEMAKVDDSFFHRLEESFLVEEDKKHERHPIFGNIVDEVAYHEKYPTIYHLRKKLVDSTDKADLRLIYLALAHMIKFRGHFLIEGDLNPDNSDVDKLFIQLVQTYNQLFEENPINASGVDAKAILSARLSKSRRLENLIAQLPGEKKNGLFGNLIALSLGLTPNFKSNFDLAEDAKLQLSKDTYDDDLDNLLAQIGDQYADLFLAAKNLSDAILLSDILRVNTEITKAPLSASMIKRYDEHHQDLTLLKALVRQQLPEKYKEIFFDQSKNGYAGYIDGGASQEEFYKFIKPILEKMDGTEELLVKLNREDLLRKQRTFDNGSIPHQIHLGELHAILRRQEDFYPFLKDNREKIEKILTFRIPYYVGPLARGNSRFAWMTRKSEETITPWNFEEVVDKGASAQSFIERMTNFDKNLPNEKVLPKHSLLYEYFTVYNELTKVKYVTEGMRKPAFLSGEQKKAIVDLLFKTNRKVTVKQLKEDYFKKIECFDSVEISGVEDRFNASLGTYHDLLKIIKDKDFLDNEENEDILEDIVLTLTLFEDREMIEERLKTYAHLFDDKVMKQLKRRRYTGWGRLSRKLINGIRDKQSGKTILDFLKSDGFANRNFMQLIHDDSLTFKEDIQKAQVSGQGDSLHEHIANLAGSPAIKKGILQTVKVVDELVKVMGRHKPENIVIEMARENQTTQKGQKNSRERMKRIEEGIKELGSQILKEHPVENTQLQNEKLYLYYLQNGRDMYVDQELDINRLSDYDVDHIVPQSFLKDDSIDNKVLTRSDKARGKSDNVPSEEVVKKMKNYWRQLLNAKLITQRKFDNLTKAERGGLSELDKAGFIKRQLVETRQITKHVAQILDSRMNTKYDENDKLIREVKVITLKSKLVSDFRKDFQFYKVREINNYHHAHDAYLNAVVGTALIKKYPKLESEFVYGDYKVYDVRKMIAKSEQEIGKATAKYFFYSNIMNFFKTEITLANGEIRKRPLIETNGETGEIVWDKGRDFATVRKVLSMPQVNIVKKTEVQTGGFSKESILPKRNSDKLIARKKDWDPKKYGGFDSPTVAYSVLVVAKVEKGKSKKLKSVKELLGITIMERSSFEKNPIDFLEAKGYKEVKKDLIIKLPKYSLFELENGRKRMLASAGELQKGNELALPSKYVNFLYLASHYEKLKGSPEDNEQKQLFVEQHKHYLDEIIEQISEFSKRVILADANLDKVLSAYNKHRDKPIREQAENIIHLFTLTNLGAPAAFKYFDTTIDRKRYTSTKEVLDATLIHQSITGLYETRIDLSQLGGDGGEAAAKEAAAKGGTAPLEEEYRLFLEAPIQNVTLLEQWKREIPKVWAEINPPGLASTQAPIHVQLLSTALPVRVRQYPITLEAKRSLRETIRKFRAAGILRPVHSPWNTPLLPVRKSGTSEYRMVQDLREVNKRVETIHPTVPNPYTLLSLLPPDRIWYSVLDLKDAFFCIPLAPESQLIFAFEWADAEEGESGQLTWTRLPQGFKNSPTLFNEALNRDLQGFRLDHPSVSLLQYVDDLLIAADTQAACLSATRDLLMTLAELGYRVSGKKAQLCQEEVTYLGFKIHKGSRSLSNSRTQAILQIPVPKTKRQVREFLGTIGYCRLWIPGFAELAQPLYAATRPGNDPLVWGEKEEEAFQSLKLALTQPPALALPSLDKPFQLFVEETSGAAKGVLTQALGPWKRPVAYLSKRLDPVAAGWPRCLRAIAAAALLTREASKLTFGQDIEITSSHNLESLLRSPPDKWLTNARITQYQVLLLDPPRVRFKQTAALNPATLLPETDDTLPIHHCLDTLDSLTSTRPDLTDQPLAQAEATLFTDGSSYIRDGKRYAGAAVVTLDSVIWAEPLPIGTSAQKAELIALTKALEWSKDKSVNIYTDSRYAFATLHVHGMIYRERGWLTAGGKAIKNAPEILALLTAVWLPKRVAVMHCKGHQKDDAPTSTGNRRADEVAREVAIRPLSTQATISAGKRTADGSEFEKRTADGSEFESPKKKAKVE

SEQ ID NO: 1153 - protein, 2096 aa, synthetic construct
MPAAKRVKLDGGDKKYSIGLDIGTNSVGWAVITDEYKVPSKKFKVLGNTDRHSIKKNLIGALLFDSGETAEATRLKRTARRRYTRRKNRICYLQEIFSNEMAKVDDSFFHRLEESFLVEEDKKHERHPIFGNIVDEVAYHEKYPTIYHLRKKLVDSTDKADLRLIYLALAHMIKFRGHFLIEGDLNPDNSDVDKLFIQLVQTYNQLFEENPINASGVDAKAILSARLSKSRRLENLIAQLPGEKKNGLFGNLIALSLGLTPNFKSNFDLAEDAKLQLSKDTYDDDLDNLLAQIGDQYADLFLAAKNLSDAILLSDILRVNTEITKAPLSASMIKRYDEHHQDLTLLKALVRQQLPEKYKEIFFDQSKNGYAGYIDGGASQEEFYKFIKPILEKMDGTEELLVKLNREDLLRKQRTFDNGSIPHQIHLGELHAILRRQEDFYPFLKDNREKIEKILTFRIPYYVGPLARGNSRFAWMTRKSEETITPWNFEEVVDKGASAQSFIERMTNFDKNLPNEKVLPKHSLLYEYFTVYNELTKVKYVTEGMRKPAFLSGEQKKAIVDLLFKTNRKVTVKQLKEDYFKKIECFDSVEISGVEDRFNASLGTYHDLLKIIKDKDFLDNEENEDILEDIVLTLTLFEDREMIEERLKTYAHLFDDKVMKQLKRRRYTGWGRLSRKLINGIRDKQSGKTILDFLKSDGFANRNFMQLIHDDSLTFKEDIQKAQVSGQGDSLHEHIANLAGSPAIKKGILQTVKVVDELVKVMGRHKPENIVIEMARENQTTQKGQKNSRERMKRIEEGIKELGSQILKEHPVENTQLQNEKLYLYYLQNGRDMYVDQELDINRLSDYDVDHIVPQSFLKDDSIDNKVLTRSDKARGKSDNVPSEEVVKKMKNYWRQLLNAKLITQRKFDNLTKAERGGLSELDKAGFIKRQLVETRQITKHVAQILDSRMNTKYDENDKLIREVKVITLKSKLVSDFRKDFQFYKVREINNYHHAHDAYLNAVVGTALIKKYPKLESEFVYGDYKVYDVRKMIAKSEQEIGKATAKYFFYSNIMNFFKTEITLANGEIRKRPLIETNGETGEIVWDKGRDFATVRKVLSMPQVNIVKKTEVQTGGFSKESILPKRNSDKLIARKKDWDPKKYGGFDSPTVAYSVLVVAKVEKGKSKKLKSVKELLGITIMERSSFEKNPIDFLEAKGYKEVKKDLIIKLPKYSLFELENGRKRMLASAGELQKGNELALPSKYVNFLYLASHYEKLKGSPEDNEQKQLFVEQHKHYLDEIIEQISEFSKRVILADANLDKVLSAYNKHRDKPIREQAENIIHLFTLTNLGAPAAFKYFDTTIDRKRYTSTKEVLDATLIHQSITGLYETRIDLSQLGGDGGGGSPAPGSSGGTAPLEEEYRLFLEAPIQNVTLLEQWKREIPKVWAEINPPGLASTQAPIHVQLLSTALPVRVRQYPITLEAKRSLRETIRKFRAAGILRPVHSPWNTPLLPVRKSGTSEYRMVQDLREVNKRVETIHPTVPNPYTLLSLLPPDRIWYSVLDLKDAFFCIPLAPESQLIFAFEWADAEEGESGQLTWTRLPQGFKNSPTLFNEALNRDLQGFRLDHPSVSLLQYVDDLLIAADTQAACLSATRDLLMTLAELGYRVSGKKAQLCQEEVTYLGFKIHKGSRSLSNSRTQAILQIPVPKTKRQVREFLGTIGYCRLWIPGFAELAQPLYAATRPGNDPLVWGEKEEEAFQSLKLALTQPPALALPSLDKPFQLFVEETSGAAKGVLTQALGPWKRPVAYLSKRLDPVAAGWPRCLRAIAAAALLTREASKLTFGQDIEITSSHNLESLLRSPPDKWLTNARITQYQVLLLDPPRVRFKQTAALNPATLLPETDDTLPIHHCLDTLDSLTSTRPDLTDQPLAQAEATLFTDGSSYIRDGKRYAGAAVVTLDSVIWAEPLPIGTSAQKAELIALTKALEWSKDKSVNIYTDSRYAFATLHVHGMIYRERGWLTAGGKAIKNAPEILALLTAVWLPKRVAVMHCKGHQKDDAPTSTGNRRADEVAREVAIRPLSTQATISAGKRTADGSEFEKRTADGSEFESPKKKAKVE

SEQ ID NO: 1154 - protein, 2098 aa, synthetic construct
MPAAKRVKLDGGDKKYSIGLDIGTNSVGWAVITDEYKVPSKKFKVLGNTDRHSIKKNLIGALLFDSGETAEATRLKRTARRRYTRRKNRICYLQEIFSNEMAKVDDSFFHRLEESFLVEEDKKHERHPIFGNIVDEVAYHEKYPTIYHLRKKLVDSTDKADLRLIYLALAHMIKFRGHFLIEGDLNPDNSDVDKLFIQLVQTYNQLFEENPINASGVDAKAILSARLSKSRRLENLIAQLPGEKKNGLFGNLIALSLGLTPNFKSNFDLAEDAKLQLSKDTYDDDLDNLLAQIGDQYADLFLAAKNLSDAILLSDILRVNTEITKAPLSASMIKRYDEHHQDLTLLKALVRQQLPEKYKEIFFDQSKNGYAGYIDGGASQEEFYKFIKPILEKMDGTEELLVKLNREDLLRKQRTFDNGSIPHQIHLGELHAILRRQEDFYPFLKDNREKIEKILTFRIPYYVGPLARGNSRFAWMTRKSEETITPWNFEEVVDKGASAQSFIERMTNFDKNLPNEKVLPKHSLLYEYFTVYNELTKVKYVTEGMRKPAFLSGEQKKAIVDLLFKTNRKVTVKQLKEDYFKKIECFDSVEISGVEDRFNASLGTYHDLLKIIKDKDFLDNEENEDILEDIVLTLTLFEDREMIEERLKTYAHLFDDKVMKQLKRRRYTGWGRLSRKLINGIRDKQSGKTILDFLKSDGFANRNFMQLIHDDSLTFKEDIQKAQVSGQGDSLHEHIANLAGSPAIKKGILQTVKVVDELVKVMGRHKPENIVIEMARENQTTQKGQKNSRERMKRIEEGIKELGSQILKEHPVENTQLQNEKLYLYYLQNGRDMYVDQELDINRLSDYDVDHIVPQSFLKDDSIDNKVLTRSDKARGKSDNVPSEEVVKKMKNYWRQLLNAKLITQRKFDNLTKAERGGLSELDKAGFIKRQLVETRQITKHVAQILDSRMNTKYDENDKLIREVKVITLKSKLVSDFRKDFQFYKVREINNYHHAHDAYLNAVVGTALIKKYPKLESEFVYGDYKVYDVRKMIAKSEQEIGKATAKYFFYSNIMNFFKTEITLANGEIRKRPLIETNGETGEIVWDKGRDFATVRKVLSMPQVNIVKKTEVQTGGFSKESILPKRNSDKLIARKKDWDPKKYGGFDSPTVAYSVLVVAKVEKGKSKKLKSVKELLGITIMERSSFEKNPIDFLEAKGYKEVKKDLIIKLPKYSLFELENGRKRMLASAGELQKGNELALPSKYVNFLYLASHYEKLKGSPEDNEQKQLFVEQHKHYLDEIIEQISEFSKRVILADANLDKVLSAYNKHRDKPIREQAENIIHLFTLTNLGAPAAFKYFDTTIDRKRYTSTKEVLDATLIHQSITGLYETRIDLSQLGGDGGGGGEAAAKGGSGGTAPLEEEYRLFLEAPIQNVTLLEQWKREIPKVWAEINPPGLASTQAPIHVQLLSTALPVRVRQYPITLEAKRSLRETIRKFRAAGILRPVHSPWNTPLLPVRKSGTSEYRMVQDLREVNKRVETIHPTVPNPYTLLSLLPPDRIWYSVLDLKDAFFCIPLAPESQLIFAFEWADAEEGESGQLTWTRLPQGFKNSPTLFNEALNRDLQGFRLDHPSVSLLQYVDDLLIAADTQAACLSATRDLLMTLAELGYRVSGKKAQLCQEEVTYLGFKIHKGSRSLSNSRTQAILQIPVPKTKRQVREFLGTIGYCRLWIPGFAELAQPLYAATRPGNDPLVWGEKEEEAFQSLKLALTQPPALALPSLDKPFQLFVEETSGAAKGVLTQALGPWKRPVAYLSKRLDPVAAGWPRCLRAIAAAALLTREASKLTFGQDIEITSSHNLESLLRSPPDKWLTNARITQYQVLLLDPPRVRFKQTAALNPATLLPETDDTLPIHHCLDTLDSLTSTRPDLTDQPLAQAEATLFTDGSSYIRDGKRYAGAAVVTLDSVIWAEPLPIGTSAQKAELIALTKALEWSKDKSVNIYTDSRYAFATLHVHGMIYRERGWLTAGGKAIKNAPEILALLTAVWLPKRVAVMHCKGHQKDDAPTSTGNRRADEVAREVAIRPLSTQATISAGKRTADGSEFEKRTADGSEFESPKKKAKVE

SEQ ID NO: 1155 - protein, 2098 aa, synthetic construct
MPAAKRVKLDGGDKKYSIGLDIGTNSVGWAVITDEYKVPSKKFKVLGNTDRHSIKKNLIGALLFDSGETAEATRLKRTARRRYTRRKNRICYLQEIFSNEMAKVDDSFFHRLEESFLVEEDKKHERHPIFGNIVDEVAYHEKYPTIYHLRKKLVDSTDKADLRLIYLALAHMIKFRGHFLIEGDLNPDNSDVDKLFIQLVQTYNQLFEENPINASGVDAKAILSARLSKSRRLENLIAQLPGEKKNGLFGNLIALSLGLTPNFKSNFDLAEDAKLQLSKDTYDDDLDNLLAQIGDQYADLFLAAKNLSDAILLSDILRVNTEITKAPLSASMIKRYDEHHQDLTLLKALVRQQLPEKYKEIFFDQSKNGYAGYIDGGASQEEFYKFIKPILEKMDGTEELLVKLNREDLLRKQRTFDNGSIPHQIHLGELHAILRRQEDFYPFLKDNREKIEKILTFRIPYYVGPLARGNSRFAWMTRKSEETITPWNFEEVVDKGASAQSFIERMTNFDKNLPNEKVLPKHSLLYEYFTVYNELTKVKYVTEGMRKPAFLSGEQKKAIVDLLFKTNRKVTVKQLKEDYFKKIECFDSVEISGVEDRFNASLGTYHDLLKIIKDKDFLDNEENEDILEDIVLTLTLFEDREMIEERLKTYAHLFDDKVMKQLKRRRYTGWGRLSRKLINGIRDKQSGKTILDFLKSDGFANRNFMQLIHDDSLTFKEDIQKAQVSGQGDSLHEHIANLAGSPAIKKGILQTVKVVDELVKVMGRHKPENIVIEMARENQTTQKGQKNSRERMKRIEEGIKELGSQILKEHPVENTQLQNEKLYLYYLQNGRDMYVDQELDINRLSDYDVDHIVPQSFLKDDSIDNKVLTRSDKARGKSDNVPSEEVVKKMKNYWRQLLNAKLITQRKFDNLTKAERGGLSELDKAGFIKRQLVETRQITKHVAQILDSRMNTKYDENDKLIREVKVITLKSKLVSDFRKDFQFYKVREINNYHHAHDAYLNAVVGTALIKKYPKLESEFVYGDYKVYDVRKMIAKSEQEIGKATAKYFFYSNIMNFFKTEITLANGEIRKRPLIETNGETGEIVWDKGRDFATVRKVLSMPQVNIVKKTEVQTGGFSKESILPKRNSDKLIARKKDWDPKKYGGFDSPTVAYSVLVVAKVEKGKSKKLKSVKELLGITIMERSSFEKNPIDFLEAKGYKEVKKDLIIKLPKYSLFELENGRKRMLASAGELQKGNELALPSKYVNFLYLASHYEKLKGSPEDNEQKQLFVEQHKHYLDEIIEQISEFSKRVILADANLDKVLSAYNKHRDKPIREQAENIIHLFTLTNLGAPAAFKYFDTTIDRKRYTSTKEVLDATLIHQSITGLYETRIDLSQLGGDGGGGGEAAAKPAPGGTAPLEEEYRLFLEAPIQNVTLLEQWKREIPKVWAEINPPGLASTQAPIHVQLLSTALPVRVRQYPITLEAKRSLRETIRKFRAAGILRPVHSPWNTPLLPVRKSGTSEYRMVQDLREVNKRVETIHPTVPNPYTLLSLLPPDRIWYSVLDLKDAFFCIPLAPESQLIFAFEWADAEEGESGQLTWTRLPQGFKNSPTLFNEALNRDLQGFRLDHPSVSLLQYVDDLLIAADTQAACLSATRDLLMTLAELGYRVSGKKAQLCQEEVTYLGFKIHKGSRSLSNSRTQAILQIPVPKTKRQVREFLGTIGYCRLWIPGFAELAQPLYAATRPGNDPLVWGEKEEEAFQSLKLALTQPPALALPSLDKPFQLFVEETSGAAKGVLTQALGPWKRPVAYLSKRLDPVAAGWPRCLRAIAAAALLTREASKLTFGQDIEITSSHNLESLLRSPPDKWLTNARITQYQVLLLDPPRVRFKQTAALNPATLLPETDDTLPIHHCLDTLDSLTSTRPDLTDQPLAQAEATLFTDGSSYIRDGKRYAGAAVVTLDSVIWAEPLPIGTSAQKAELIALTKALEWSKDKSVNIYTDSRYAFATLHVHGMIYRERGWLTAGGKAIKNAPEILALLTAVWLPKRVAVMHCKGHQKDDAPTSTGNRRADEVAREVAIRPLSTQATISAGKRTADGSEFEKRTADGSEFESPKKKAKVE

SEQ ID NO: 1156 - protein, 2098 aa, synthetic construct
MPAAKRVKLDGGDKKYSIGLDIGTNSVGWAVITDEYKVPSKKFKVLGNTDRHSIKKNLIGALLFDSGETAEATRLKRTARRRYTRRKNRICYLQEIFSNEMAKVDDSFFHRLEESFLVEEDKKHERHPIFGNIVDEVAYHEKYPTIYHLRKKLVDSTDKADLRLIYLALAHMIKFRGHFLIEGDLNPDNSDVDKLFIQLVQTYNQLFEENPINASGVDAKAILSARLSKSRRLENLIAQLPGEKKNGLFGNLIALSLGLTPNFKSNFDLAEDAKLQLSKDTYDDDLDNLLAQIGDQYADLFLAAKNLSDAILLSDILRVNTEITKAPLSASMIKRYDEHHQDLTLLKALVRQQLPEKYKEIFFDQSKNGYAGYIDGGASQEEFYKFIKPILEKMDGTEELLVKLNREDLLRKQRTFDNGSIPHQIHLGELHAILRRQEDFYPFLKDNREKIEKILTFRIPYYVGPLARGNSRFAWMTRKSEETITPWNFEEVVDKGASAQSFIERMTNFDKNLPNEKVLPKHSLLYEYFTVYNELTKVKYVTEGMRKPAFLSGEQKKAIVDLLFKTNRKVTVKQLKEDYFKKIECFDSVEISGVEDRFNASLGTYHDLLKIIKDKDFLDNEENEDILEDIVLTLTLFEDREMIEERLKTYAHLFDDKVMKQLKRRRYTGWGRLSRKLINGIRDKQSGKTILDFLKSDGFANRNFMQLIHDDSLTFKEDIQKAQVSGQGDSLHEHIANLAGSPAIKKGILQTVKVVDELVKVMGRHKPENIVIEMARENQTTQKGQKNSRERMKRIEEGIKELGSQILKEHPVENTQLQNEKLYLYYLQNGRDMYVDQELDINRLSDYDVDHIVPQSFLKDDSIDNKVLTRSDKARGKSDNVPSEEVVKKMKNYWRQLLNAKLITQRKFDNLTKAERGGLSELDKAGFIKRQLVETRQITKHVAQILDSRMNTKYDENDKLIREVKVITLKSKLVSDFRKDFQFYKVREINNYHHAHDAYLNAVVGTALIKKYPKLESEFVYGDYKVYDVRKMIAKSEQEIGKATAKYFFYSNIMNFFKTEITLANGEIRKRPLIETNGETGEIVWDKGRDFATVRKVLSMPQVNIVKKTEVQTGGFSKESILPKRNSDKLIARKKDWDPKKYGGFDSPTVAYSVLVVAKVEKGKSKKLKSVKELLGITIMERSSFEKNPIDFLEAKGYKEVKKDLIIKLPKYSLFELENGRKRMLASAGELQKGNELALPSKYVNFLYLASHYEKLKGSPEDNEQKQLFVEQHKHYLDEIIEQISEFSKRVILADANLDKVLSAYNKHRDKPIREQAENIIHLFTLTNLGAPAAFKYFDTTIDRKRYTSTKEVLDATLIHQSITGLYETRIDLSQLGGDGGEAAAKPAPGGSGGTAPLEEEYRLFLEAPIQNVTLLEQWKREIPKVWAEINPPGLASTQAPIHVQLLSTALPVRVRQYPITLEAKRSLRETIRKFRAAGILRPVHSPWNTPLLPVRKSGTSEYRMVQDLREVNKRVETIHPTVPNPYTLLSLLPPDRIWYSVLDLKDAFFCIPLAPESQLIFAFEWADAEEGESGQLTWTRLPQGFKNSPTLFNEALNRDLQGFRLDHPSVSLLQYVDDLLIAADTQAACLSATRDLLMTLAELGYRVSGKKAQLCQEEVTYLGFKIHKGSRSLSNSRTQAILQIPVPKTKRQVREFLGTIGYCRLWIPGFAELAQPLYAATRPGNDPLVWGEKEEEAFQSLKLALTQPPALALPSLDKPFQLFVEETSGAAKGVLTQALGPWKRPVAYLSKRLDPVAAGWPRCLRAIAAAALLTREASKLTFGQDIEITSSHNLESLLRSPPDKWLTNARITQYQVLLLDPPRVRFKQTAALNPATLLPETDDTLPIHHCLDTLDSLTSTRPDLTDQPLAQAEATLFTDGSSYIRDGKRYAGAAVVTLDSVIWAEPLPIGTSAQKAELIALTKALEWSKDKSVNIYTDSRYAFATLHVHGMIYRERGWLTAGGKAIKNAPEILALLTAVWLPKRVAVMHCKGHQKDDAPTSTGNRRADEVAREVAIRPLSTQATISAGKRTADGSEFEKRTADGSEFESPKKKAKVE

SEQ ID NO: 1157 - protein, 2098 aa, synthetic construct
MPAAKRVKLDGGDKKYSIGLDIGTNSVGWAVITDEYKVPSKKFKVLGNTDRHSIKKNLIGALLFDSGETAEATRLKRTARRRYTRRKNRICYLQEIFSNEMAKVDDSFFHRLEESFLVEEDKKHERHPIFGNIVDEVAYHEKYPTIYHLRKKLVDSTDKADLRLIYLALAHMIKFRGHFLIEGDLNPDNSDVDKLFIQLVQTYNQLFEENPINASGVDAKAILSARLSKSRRLENLIAQLPGEKKNGLFGNLIALSLGLTPNFKSNFDLAEDAKLQLSKDTYDDDLDNLLAQIGDQYADLFLAAKNLSDAILLSDILRVNTEITKAPLSASMIKRYDEHHQDLTLLKALVRQQLPEKYKEIFFDQSKNGYAGYIDGGASQEEFYKFIKPILEKMDGTEELLVKLNREDLLRKQRTFDNGSIPHQIHLGELHAILRRQEDFYPFLKDNREKIEKILTFRIPYYVGPLARGNSRFAWMTRKSEETITPWNFEEVVDKGASAQSFIERMTNFDKNLPNEKVLPKHSLLYEYFTVYNELTKVKYVTEGMRKPAFLSGEQKKAIVDLLFKTNRKVTVKQLKEDYFKKIECFDSVEISGVEDRFNASLGTYHDLLKIIKDKDFLDNEENEDILEDIVLTLTLFEDREMIEERLKTYAHLFDDKVMKQLKRRRYTGWGRLSRKLINGIRDKQSGKTILDFLKSDGFANRNFMQLIHDDSLTFKEDIQKAQVSGQGDSLHEHIANLAGSPAIKKGILQTVKVVDELVKVMGRHKPENIVIEMARENQTTQKGQKNSRERMKRIEEGIKELGSQILKEHPVENTQLQNEKLYLYYLQNGRDMYVDQELDINRLSDYDVDHIVPQSFLKDDSIDNKVLTRSDKARGKSDNVPSEEVVKKMKNYWRQLLNAKLITQRKFDNLTKAERGGLSELDKAGFIKRQLVETRQITKHVAQILDSRMNTKYDENDKLIREVKVITLKSKLVSDFRKDFQFYKVREINNYHHAHDAYLNAVVGTALIKKYPKLESEFVYGDYKVYDVRKMIAKSEQEIGKATAKYFFYSNIMNFFKTEITLANGEIRKRPLIETNGETGEIVWDKGRDFATVRKVLSMPQVNIVKKTEVQTGGFSKESILPKRNSDKLIARKKDWDPKKYGGFDSPTVAYSVLVVAKVEKGKSKKLKSVKELLGITIMERSSFEKNPIDFLEAKGYKEVKKDLIIKLPKYSLFELENGRKRMLASAGELQKGNELALPSKYVNFLYLASHYEKLKGSPEDNEQKQLFVEQHKHYLDEIIEQISEFSKRVILADANLDKVLSAYNKHRDKPIREQAENIIHLFTLTNLGAPAAFKYFDTTIDRKRYTSTKEVLDATLIHQSITGLYETRIDLSQLGGDGGEAAAKGGGGGSGGTAPLEEEYRLFLEAPIQNVTLLEQWKREIPKVWAEINPPGLASTQAPIHVQLLSTALPVRVRQYPITLEAKRSLRETIRKFRAAGILRPVHSPWNTPLLPVRKSGTSEYRMVQDLREVNKRVETIHPTVPNPYTLLSLLPPDRIWYSVLDLKDAFFCIPLAPESQLIFAFEWADAEEGESGQLTWTRLPQGFKNSPTLFNEALNRDLQGFRLDHPSVSLLQYVDDLLIAADTQAACLSATRDLLMTLAELGYRVSGKKAQLCQEEVTYLGFKIHKGSRSLSNSRTQAILQIPVPKTKRQVREFLGTIGYCRLWIPGFAELAQPLYAATRPGNDPLVWGEKEEEAFQSLKLALTQPPALALPSLDKPFQLFVEETSGAAKGVLTQALGPWKRPVAYLSKRLDPVAAGWPRCLRAIAAAALLTREASKLTFGQDIEITSSHNLESLLRSPPDKWLTNARITQYQVLLLDPPRVRFKQTAALNPATLLPETDDTLPIHHCLDTLDSLTSTRPDLTDQPLAQAEATLFTDGSSYIRDGKRYAGAAVVTLDSVIWAEPLPIGTSAQKAELIALTKALEWSKDKSVNIYTDSRYAFATLHVHGMIYRERGWLTAGGKAIKNAPEILALLTAVWLPKRVAVMHCKGHQKDDAPTSTGNRRADEVAREVAIRPLSTQATISAGKRTADGSEFEKRTADGSEFESPKKKAKVE

SEQ ID NO: 1158 - protein, 2102 aa, synthetic construct
MPAAKRVKLDGGDKKYSIGLDIGTNSVGWAVITDEYKVPSKKFKVLGNTDRHSIKKNLIGALLFDSGETAEATRLKRTARRRYTRRKNRICYLQEIFSNEMAKVDDSFFHRLEESFLVEEDKKHERHPIFGNIVDEVAYHEKYPTIYHLRKKLVDSTDKADLRLIYLALAHMIKFRGHFLIEGDLNPDNSDVDKLFIQLVQTYNQLFEENPINASGVDAKAILSARLSKSRRLENLIAQLPGEKKNGLFGNLIALSLGLTPNFKSNFDLAEDAKLQLSKDTYDDDLDNLLAQIGDQYADLFLAAKNLSDAILLSDILRVNTEITKAPLSASMIKRYDEHHQDLTLLKALVRQQLPEKYKEIFFDQSKNGYAGYIDGGASQEEFYKFIKPILEKMDGTEELLVKLNREDLLRKQRTFDNGSIPHQIHLGELHAILRRQEDFYPFLKDNREKIEKILTFRIPYYVGPLARGNSRFAWMTRKSEETITPWNFEEVVDKGASAQSFIERMTNFDKNLPNEKVLPKHSLLYEYFTVYNELTKVKYVTEGMRKPAFLSGEQKKAIVDLLFKTNRKVTVKQLKEDYFKKIECFDSVEISGVEDRFNASLGTYHDLLKIIKDKDFLDNEENEDILEDIVLTLTLFEDREMIEERLKTYAHLFDDKVMKQLKRRRYTGWGRLSRKLINGIRDKQSGKTILDFLKSDGFANRNFMQLIHDDSLTFKEDIQKAQVSGQGDSLHEHIANLAGSPAIKKGILQTVKVVDELVKVMGRHKPENIVIEMARENQTTQKGQKNSRERMKRIEEGIKELGSQILKEHPVENTQLQNEKLYLYYLQNGRDMYVDQELDINRLSDYDVDHIVPQSFLKDDSIDNKVLTRSDKARGKSDNVPSEEVVKKMKNYWRQLLNAKLITQRKFDNLTKAERGGLSELDKAGFIKRQLVETRQITKHVAQILDSRMNTKYDENDKLIREVKVITLKSKLVSDFRKDFQFYKVREINNYHHAHDAYLNAVVGTALIKKYPKLESEFVYGDYKVYDVRKMIAKSEQEIGKATAKYFFYSNIMNFFKTEITLANGEIRKRPLIETNGETGEIVWDKGRDFATVRKVLSMPQVNIVKKTEVQTGGFSKESILPKRNSDKLIARKKDWDPKKYGGFDSPTVAYSVLVVAKVEKGKSKKLKSVKELLGITIMERSSFEKNPIDFLEAKGYKEVKKDLIIKLPKYSLFELENGRKRMLASAGELQKGNELALPSKYVNFLYLASHYEKLKGSPEDNEQKQLFVEQHKHYLDEIIEQISEFSKRVILADANLDKVLSAYNKHRDKPIREQAENIIHLFTLTNLGAPAAFKYFDTTIDRKRYTSTKEVLDATLIHQSITGLYETRIDLSQLGGDGGGGGGSEAAAKGGGGSGGTAPLEEEYRLFLEAPIQNVTLLEQWKREIPKVWAEINPPGLASTQAPIHVQLLSTALPVRVRQYPITLEAKRSLRETIRKFRAAGILRPVHSPWNTPLLPVRKSGTSEYRMVQDLREVNKRVETIHPTVPNPYTLLSLLPPDRIWYSVLDLKDAFFCIPLAPESQLIFAFEWADAEEGESGQLTWTRLPQGFKNSPTLFNEALNRDLQGFRLDHPSVSLLQYVDDLLIAADTQAACLSATRDLLMTLAELGYRVSGKKAQLCQEEVTYLGFKIHKGSRSLSNSRTQAILQIPVPKTKRQVREFLGTIGYCRLWIPGFAELAQPLYAATRPGNDPLVWGEKEEEAFQSLKLALTQPPALALPSLDKPFQLFVEETSGAAKGVLTQALGPWKRPVAYLSKRLDPVAAGWPRCLRAIAAAALLTREASKLTFGQDIEITSSHNLESLLRSPPDKWLTNARITQYQVLLLDPPRVRFKQTAALNPATLLPETDDTLPIHHCLDTLDSLTSTRPDLTDQPLAQAEATLFTDGSSYIRDGKRYAGAAVVTLDSVIWAEPLPIGTSAQKAELIALTKALEWSKDKSVNIYTDSRYAFATLHVHGMIYRERGWLTAGGKAIKNAPEILALLTAVWLPKRVAVMHCKGHQKDDAPTSTGNRRADEVAREVAIRPLSTQATISAGKRTADGSEFEKRTADGSEFESPKKKAKVE

SEQ ID NO: 1159 - protein, 2096 aa, synthetic construct
MPAAKRVKLDGGDKKYSIGLDIGTNSVGWAVITDEYKVPSKKFKVLGNTDRHSIKKNLIGALLFDSGETAEATRLKRTARRRYTRRKNRICYLQEIFSNEMAKVDDSFFHRLEESFLVEEDKKHERHPIFGNIVDEVAYHEKYPTIYHLRKKLVDSTDKADLRLIYLALAHMIKFRGHFLIEGDLNPDNSDVDKLFIQLVQTYNQLFEENPINASGVDAKAILSARLSKSRRLENLIAQLPGEKKNGLFGNLIALSLGLTPNFKSNFDLAEDAKLQLSKDTYDDDLDNLLAQIGDQYADLFLAAKNLSDAILLSDILRVNTEITKAPLSASMIKRYDEHHQDLTLLKALVRQQLPEKYKEIFFDQSKNGYAGYIDGGASQEEFYKFIKPILEKMDGTEELLVKLNREDLLRKQRTFDNGSIPHQIHLGELHAILRRQEDFYPFLKDNREKIEKILTFRIPYYVGPLARGNSRFAWMTRKSEETITPWNFEEVVDKGASAQSFIERMTNFDKNLPNEKVLPKHSLLYEYFTVYNELTKVKYVTEGMRKPAFLSGEQKKAIVDLLFKTNRKVTVKQLKEDYFKKIECFDSVEISGVEDRFNASLGTYHDLLKIIKDKDFLDNEENEDILEDIVLTLTLFEDREMIEERLKTYAHLFDDKVMKQLKRRRYTGWGRLSRKLINGIRDKQSGKTILDFLKSDGFANRNFMQLIHDDSLTFKEDIQKAQVSGQGDSLHEHIANLAGSPAIKKGILQTVKVVDELVKVMGRHKPENIVIEMARENQTTQKGQKNSRERMKRIEEGIKELGSQILKEHPVENTQLQNEKLYLYYLQNGRDMYVDQELDINRLSDYDVDHIVPQSFLKDDSIDNKVLTRSDKARGKSDNVPSEEVVKKMKNYWRQLLNAKLITQRKFDNLTKAERGGLSELDKAGFIKRQLVETRQITKHVAQILDSRMNTKYDENDKLIREVKVITLKSKLVSDFRKDFQFYKVREINNYHHAHDAYLNAVVGTALIKKYPKLESEFVYGDYKVYDVRKMIAKSEQEIGKATAKYFFYSNIMNFFKTEITLANGEIRKRPLIETNGETGEIVWDKGRDFATVRKVLSMPQVNIVKKTEVQTGGFSKESILPKRNSDKLIARKKDWDPKKYGGFDSPTVAYSVLVVAKVEKGKSKKLKSVKELLGITIMERSSFEKNPIDFLEAKGYKEVKKDLIIKLPKYSLFELENGRKRMLASAGELQKGNELALPSKYVNFLYLASHYEKLKGSPEDNEQKQLFVEQHKHYLDEIIEQISEFSKRVILADANLDKVLSAYNKHRDKPIREQAENIIHLFTLTNLGAPAAFKYFDTTIDRKRYTSTKEVLDATLIHQSITGLYETRIDLSQLGGDGGPAPGGGGGSGGTAPLEEEYRLFLEAPIQNVTLLEQWKREIPKVWAEINPPGLASTQAPIHVQLLSTALPVRVRQYPITLEAKRSLRETIRKFRAAGILRPVHSPWNTPLLPVRKSGTSEYRMVQDLREVNKRVETIHPTVPNPYTLLSLLPPDRIWYSVLDLKDAFFCIPLAPESQLIFAFEWADAEEGESGQLTWTRLPQGFKNSPTLFNEALNRDLQGFRLDHPSVSLLQYVDDLLIAADTQAACLSATRDLLMTLAELGYRVSGKKAQLCQEEVTYLGFKIHKGSRSLSNSRTQAILQIPVPKTKRQVREFLGTIGYCRLWIPGFAELAQPLYAATRPGNDPLVWGEKEEEAFQSLKLALTQPPALALPSLDKPFQLFVEETSGAAKGVLTQALGPWKRPVAYLSKRLDPVAAGWPRCLRAIAAAALLTREASKLTFGQDIEITSSHNLESLLRSPPDKWLTNARITQYQVLLLDPPRVRFKQTAALNPATLLPETDDTLPIHHCLDTLDSLTSTRPDLTDQPLAQAEATLFTDGSSYIRDGKRYAGAAVVTLDSVIWAEPLPIGTSAQKAELIALTKALEWSKDKSVNIYTDSRYAFATLHVHGMIYRERGWLTAGGKAIKNAPEILALLTAVWLPKRVAVMHCKGHQKDDAPTSTGNRRADEVAREVAIRPLSTQATISAGKRTADGSEFEKRTADGSEFESPKKKAKVE

SEQ ID NO: 1160 - protein, 2098 aa, synthetic construct
MPAAKRVKLDGGDKKYSIGLDIGTNSVGWAVITDEYKVPSKKFKVLGNTDRHSIKKNLIGALLFDSGETAEATRLKRTARRRYTRRKNRICYLQEIFSNEMAKVDDSFFHRLEESFLVEEDKKHERHPIFGNIVDEVAYHEKYPTIYHLRKKLVDSTDKADLRLIYLALAHMIKFRGHFLIEGDLNPDNSDVDKLFIQLVQTYNQLFEENPINASGVDAKAILSARLSKSRRLENLIAQLPGEKKNGLFGNLIALSLGLTPNFKSNFDLAEDAKLQLSKDTYDDDLDNLLAQIGDQYADLFLAAKNLSDAILLSDILRVNTEITKAPLSASMIKRYDEHHQDLTLLKALVRQQLPEKYKEIFFDQSKNGYAGYIDGGASQEEFYKFIKPILEKMDGTEELLVKLNREDLLRKQRTFDNGSIPHQIHLGELHAILRRQEDFYPFLKDNREKIEKILTFRIPYYVGPLARGNSRFAWMTRKSEETITPWNFEEVVDKGASAQSFIERMTNFDKNLPNEKVLPKHSLLYEYFTVYNELTKVKYVTEGMRKPAFLSGEQKKAIVDLLFKTNRKVTVKQLKEDYFKKIECFDSVEISGVEDRFNASLGTYHDLLKIIKDKDFLDNEENEDILEDIVLTLTLFEDREMIEERLKTYAHLFDDKVMKQLKRRRYTGWGRLSRKLINGIRDKQSGKTILDFLKSDGFANRNFMQLIHDDSLTFKEDIQKAQVSGQGDSLHEHIANLAGSPAIKKGILQTVKVVDELVKVMGRHKPENIVIEMARENQTTQKGQKNSRERMKRIEEGIKELGSQILKEHPVENTQLQNEKLYLYYLQNGRDMYVDQELDINRLSDYDVDHIVPQSFLKDDSIDNKVLTRSDKARGKSDNVPSEEVVKKMKNYWRQLLNAKLITQRKFDNLTKAERGGLSELDKAGFIKRQLVETRQITKHVAQILDSRMNTKYDENDKLIREVKVITLKSKLVSDFRKDFQFYKVREINNYHHAHDAYLNAVVGTALIKKYPKLESEFVYGDYKVYDVRKMIAKSEQEIGKATAKYFFYSNIMNFFKTEITLANGEIRKRPLIETNGETGEIVWDKGRDFATVRKVLSMPQVNIVKKTEVQTGGFSKESILPKRNSDKLIARKKDWDPKKYGGFDSPTVAYSVLVVAKVEKGKSKKLKSVKELLGITIMERSSFEKNPIDFLEAKGYKEVKKDLIIKLPKYSLFELENGRKRMLASAGELQKGNELALPSKYVNFLYLASHYEKLKGSPEDNEQKQLFVEQHKHYLDEIIEQISEFSKRVILADANLDKVLSAYNKHRDKPIREQAENIIHLFTLTNLGAPAAFKYFDTTIDRKRYTSTKEVLDATLIHQSITGLYETRIDLSQLGGDGGGGSPAPEAAAKGGTAPLEEEYRLFLEAPIQNVTLLEQWKREIPKVWAEINPPGLASTQAPIHVQLLSTALPVRVRQYPITLEAKRSLRETIRKFRAAGILRPVHSPWNTPLLPVRKSGTSEYRMVQDLREVNKRVETIHPTVPNPYTLLSLLPPDRIWYSVLDLKDAFFCIPLAPESQLIFAFEWADAEEGESGQLTWTRLPQGFKNSPTLFNEALNRDLQGFRLDHPSVSLLQYVDDLLIAADTQAACLSATRDLLMTLAELGYRVSGKKAQLCQEEVTYLGFKIHKGSRSLSNSRTQAILQIPVPKTKRQVREFLGTIGYCRLWIPGFAELAQPLYAATRPGNDPLVWGEKEEEAFQSLKLALTQPPALALPSLDKPFQLFVEETSGAAKGVLTQALGPWKRPVAYLSKRLDPVAAGWPRCLRAIAAAALLTREASKLTFGQDIEITSSHNLESLLRSPPDKWLTNARITQYQVLLLDPPRVRFKQTAALNPATLLPETDDTLPIHHCLDTLDSLTSTRPDLTDQPLAQAEATLFTDGSSYIRDGKRYAGAAVVTLDSVIWAEPLPIGTSAQKAELIALTKALEWSKDKSVNIYTDSRYAFATLHVHGMIYRERGWLTAGGKAIKNAPEILALLTAVWLPKRVAVMHCKGHQKDDAPTSTGNRRADEVAREVAIRPLSTQATISAGKRTADGSEFEKRTADGSEFESPKKKAKVE

SEQ ID NO: 1161 - protein, 2098 aa, synthetic construct
MPAAKRVKLDGGDKKYSIGLDIGTNSVGWAVITDEYKVPSKKFKVLGNTDRHSIKKNLIGALLFDSGETAEATRLKRTARRRYTRRKNRICYLQEIFSNEMAKVDDSFFHRLEESFLVEEDKKHERHPIFGNIVDEVAYHEKYPTIYHLRKKLVDSTDKADLRLIYLALAHMIKFRGHFLIEGDLNPDNSDVDKLFIQLVQTYNQLFEENPINASGVDAKAILSARLSKSRRLENLIAQLPGEKKNGLFGNLIALSLGLTPNFKSNFDLAEDAKLQLSKDTYDDDLDNLLAQIGDQYADLFLAAKNLSDAILLSDILRVNTEITKAPLSASMIKRYDEHHQDLTLLKALVRQQLPEKYKEIFFDQSKNGYAGYIDGGASQEEFYKFIKPILEKMDGTEELLVKLNREDLLRKQRTFDNGSIPHQIHLGELHAILRRQEDFYPFLKDNREKIEKILTFRIPYYVGPLARGNSRFAWMTRKSEETITPWNFEEVVDKGASAQSFIERMTNFDKNLPNEKVLPKHSLLYEYFTVYNELTKVKYVTEGMRKPAFLSGEQKKAIVDLLFKTNRKVTVKQLKEDYFKKIECFDSVEISGVEDRFNASLGTYHDLLKIIKDKDFLDNEENEDILEDIVLTLTLFEDREMIEERLKTYAHLFDDKVMKQLKRRRYTGWGRLSRKLINGIRDKQSGKTILDFLKSDGFANRNFMQLIHDDSLTFKEDIQKAQVSGQGDSLHEHIANLAGSPAIKKGILQTVKVVDELVKVMGRHKPENIVIEMARENQTTQKGQKNSRERMKRIEEGIKELGSQILKEHPVENTQLQNEKLYLYYLQNGRDMYVDQELDINRLSDYDVDHIVPQSFLKDDSIDNKVLTRSDKARGKSDNVPSEEVVKKMKNYWRQLLNAKLITQRKFDNLTKAERGGLSELDKAGFIKRQLVETRQITKHVAQILDSRMNTKYDENDKLIREVKVITLKSKLVSDFRKDFQFYKVREINNYHHAHDAYLNAVVGTALIKKYPKLESEFVYGDYKVYDVRKMIAKSEQEIGKATAKYFFYSNIMNFFKTEITLANGEIRKRPLIETNGETGEIVWDKGRDFATVRKVLSMPQVNIVKKTEVQTGGFSKESILPKRNSDKLIARKKDWDPKKYGGFDSPTVAYSVLVVAKVEKGKSKKLKSVKELLGITIMERSSFEKNPIDFLEAKGYKEVKKDLIIKLPKYSLFELENGRKRMLASAGELQKGNELALPSKYVNFLYLASHYEKLKGSPEDNEQKQLFVEQHKHYLDEIIEQISEFSKRVILADANLDKVLSAYNKHRDKPIREQAENIIHLFTLTNLGAPAAFKYFDTTIDRKRYTSTKEVLDATLIHQSITGLYETRIDLSQLGGDGGPAPEAAAKGGSGGTAPLEEEYRLFLEAPIQNVTLLEQWKREIPKVWAEINPPGLASTQAPIHVQLLSTALPVRVRQYPITLEAKRSLRETIRKFRAAGILRPVHSPWNTPLLPVRKSGTSEYRMVQDLREVNKRVETIHPTVPNPYTLLSLLPPDRIWYSVLDLKDAFFCIPLAPESQLIFAFEWADAEEGESGQLTWTRLPQGFKNSPTLFNEALNRDLQGFRLDHPSVSLLQYVDDLLIAADTQAACLSATRDLLMTLAELGYRVSGKKAQLCQEEVTYLGFKIHKGSRSLSNSRTQAILQIPVPKTKRQVREFLGTIGYCRLWIPGFAELAQPLYAATRPGNDPLVWGEKEEEAFQSLKLALTQPPALALPSLDKPFQLFVEETSGAAKGVLTQALGPWKRPVAYLSKRLDPVAAGWPRCLRAIAAAALLTREASKLTFGQDIEITSSHNLESLLRSPPDKWLTNARITQYQVLLLDPPRVRFKQTAALNPATLLPETDDTLPIHHCLDTLDSLTSTRPDLTDQPLAQAEATLFTDGSSYIRDGKRYAGAAVVTLDSVIWAEPLPIGTSAQKAELIALTKALEWSKDKSVNIYTDSRYAFATLHVHGMIYRERGWLTAGGKAIKNAPEILALLTAVWLPKRVAVMHCKGHQKDDAPTSTGNRRADEVAREVAIRPLSTQATISAGKRTADGSEFEKRTADGSEFESPKKKAKVE

SEQ ID NO: 1162 - protein, 2098 aa, synthetic construct
MPAAKRVKLDGGDKKYSIGLDIGTNSVGWAVITDEYKVPSKKFKVLGNTDRHSIKKNLIGALLFDSGETAEATRLKRTARRRYTRRKNRICYLQEIFSNEMAKVDDSFFHRLEESFLVEEDKKHERHPIFGNIVDEVAYHEKYPTIYHLRKKLVDSTDKADLRLIYLALAHMIKFRGHFLIEGDLNPDNSDVDKLFIQLVQTYNQLFEENPINASGVDAKAILSARLSKSRRLENLIAQLPGEKKNGLFGNLIALSLGLTPNFKSNFDLAEDAKLQLSKDTYDDDLDNLLAQIGDQYADLFLAAKNLSDAILLSDILRVNTEITKAPLSASMIKRYDEHHQDLTLLKALVRQQLPEKYKEIFFDQSKNGYAGYIDGGASQEEFYKFIKPILEKMDGTEELLVKLNREDLLRKQRTFDNGSIPHQIHLGELHAILRRQEDFYPFLKDNREKIEKILTFRIPYYVGPLARGNSRFAWMTRKSEETITPWNFEEVVDKGASAQSFIERMTNFDKNLPNEKVLPKHSLLYEYFTVYNELTKVKYVTEGMRKPAFLSGEQKKAIVDLLFKTNRKVTVKQLKEDYFKKIECFDSVEISGVEDRFNASLGTYHDLLKIIKDKDFLDNEENEDILEDIVLTLTLFEDREMIEERLKTYAHLFDDKVMKQLKRRRYTGWGRLSRKLINGIRDKQSGKTILDFLKSDGFANRNFMQLIHDDSLTFKEDIQKAQVSGQGDSLHEHIANLAGSPAIKKGILQTVKVVDELVKVMGRHKPENIVIEMARENQTTQKGQKNSRERMKRIEEGIKELGSQILKEHPVENTQLQNEKLYLYYLQNGRDMYVDQELDINRLSDYDVDHIVPQSFLKDDSIDNKVLTRSDKARGKSDNVPSEEVVKKMKNYWRQLLNAKLITQRKFDNLTKAERGGLSELDKAGFIKRQLVETRQITKHVAQILDSRMNTKYDENDKLIREVKVITLKSKLVSDFRKDFQFYKVREINNYHHAHDAYLNAVVGTALIKKYPKLESEFVYGDYKVYDVRKMIAKSEQEIGKATAKYFFYSNIMNFFKTEITLANGEIRKRPLIETNGETGEIVWDKGRDFATVRKVLSMPQVNIVKKTEVQTGGFSKESILPKRNSDKLIARKKDWDPKKYGGFDSPTVAYSVLVVAKVEKGKSKKLKSVKELLGITIMERSSFEKNPIDFLEAKGYKEVKKDLIIKLPKYSLFELENGRKRMLASAGELQKGNELALPSKYVNFLYLASHYEKLKGSPEDNEQKQLFVEQHKHYLDEIIEQISEFSKRVILADANLDKVLSAYNKHRDKPIREQAENIIHLFTLTNLGAPAAFKYFDTTIDRKRYTSTKEVLDATLIHQSITGLYETRIDLSQLGGDGGGSSEAAAKGGGGGTAPLEEEYRLFLEAPIQNVTLLEQWKREIPKVWAEINPPGLASTQAPIHVQLLSTALPVRVRQYPITLEAKRSLRETIRKFRAAGILRPVHSPWNTPLLPVRKSGTSEYRMVQDLREVNKRVETIHPTVPNPYTLLSLLPPDRIWYSVLDLKDAFFCIPLAPESQLIFAFEWADAEEGESGQLTWTRLPQGFKNSPTLFNEALNRDLQGFRLDHPSVSLLQYVDDLLIAADTQAACLSATRDLLMTLAELGYRVSGKKAQLCQEEVTYLGFKIHKGSRSLSNSRTQAILQIPVPKTKRQVREFLGTIGYCRLWIPGFAELAQPLYAATRPGNDPLVWGEKEEEAFQSLKLALTQPPALALPSLDKPFQLFVEETSGAAKGVLTQALGPWKRPVAYLSKRLDPVAAGWPRCLRAIAAAALLTREASKLTFGQDIEITSSHNLESLLRSPPDKWLTNARITQYQVLLLDPPRVRFKQTAALNPATLLPETDDTLPIHHCLDTLDSLTSTRPDLTDQPLAQAEATLFTDGSSYIRDGKRYAGAAVVTLDSVIWAEPLPIGTSAQKAELIALTKALEWSKDKSVNIYTDSRYAFATLHVHGMIYRERGWLTAGGKAIKNAPEILALLTAVWLPKRVAVMHCKGHQKDDAPTSTGNRRADEVAREVAIRPLSTQATISAGKRTADGSEFEKRTADGSEFESPKKKAKVE

SEQ ID NO: 1163 - protein, 2096 aa, synthetic construct
MPAAKRVKLDGGDKKYSIGLDIGTNSVGWAVITDEYKVPSKKFKVLGNTDRHSIKKNLIGALLFDSGETAEATRLKRTARRRYTRRKNRICYLQEIFSNEMAKVDDSFFHRLEESFLVEEDKKHERHPIFGNIVDEVAYHEKYPTIYHLRKKLVDSTDKADLRLIYLALAHMIKFRGHFLIEGDLNPDNSDVDKLFIQLVQTYNQLFEENPINASGVDAKAILSARLSKSRRLENLIAQLPGEKKNGLFGNLIALSLGLTPNFKSNFDLAEDAKLQLSKDTYDDDLDNLLAQIGDQYADLFLAAKNLSDAILLSDILRVNTEITKAPLSASMIKRYDEHHQDLTLLKALVRQQLPEKYKEIFFDQSKNGYAGYIDGGASQEEFYKFIKPILEKMDGTEELLVKLNREDLLRKQRTFDNGSIPHQIHLGELHAILRRQEDFYPFLKDNREKIEKILTFRIPYYVGPLARGNSRFAWMTRKSEETITPWNFEEVVDKGASAQSFIERMTNFDKNLPNEKVLPKHSLLYEYFTVYNELTKVKYVTEGMRKPAFLSGEQKKAIVDLLFKTNRKVTVKQLKEDYFKKIECFDSVEISGVEDRFNASLGTYHDLLKIIKDKDFLDNEENEDILEDIVLTLTLFEDREMIEERLKTYAHLFDDKVMKQLKRRRYTGWGRLSRKLINGIRDKQSGKTILDFLKSDGFANRNFMQLIHDDSLTFKEDIQKAQVSGQGDSLHEHIANLAGSPAIKKGILQTVKVVDELVKVMGRHKPENIVIEMARENQTTQKGQKNSRERMKRIEEGIKELGSQILKEHPVENTQLQNEKLYLYYLQNGRDMYVDQELDINRLSDYDVDHIVPQSFLKDDSIDNKVLTRSDKARGKSDNVPSEEVVKKMKNYWRQLLNAKLITQRKFDNLTKAERGGLSELDKAGFIKRQLVETRQITKHVAQILDSRMNTKYDENDKLIREVKVITLKSKLVSDFRKDFQFYKVREINNYHHAHDAYLNAVVGTALIKKYPKLESEFVYGDYKVYDVRKMIAKSEQEIGKATAKYFFYSNIMNFFKTEITLANGEIRKRPLIETNGETGEIVWDKGRDFATVRKVLSMPQVNIVKKTEVQTGGFSKESILPKRNSDKLIARKKDWDPKKYGGFDSPTVAYSVLVVAKVEKGKSKKLKSVKELLGITIMERSSFEKNPIDFLEAKGYKEVKKDLIIKLPKYSLFELENGRKRMLASAGELQKGNELALPSKYVNFLYLASHYEKLKGSPEDNEQKQLFVEQHKHYLDEIIEQISEFSKRVILADANLDKVLSAYNKHRDKPIREQAENIIHLFTLTNLGAPAAFKYFDTTIDRKRYTSTKEVLDATLIHQSITGLYETRIDLSQLGGDGGGGGGGSPAPGGTAPLEEEYRLFLEAPIQNVTLLEQWKREIPKVWAEINPPGLASTQAPIHVQLLSTALPVRVRQYPITLEAKRSLRETIRKFRAAGILRPVHSPWNTPLLPVRKSGTSEYRMVQDLREVNKRVETIHPTVPNPYTLLSLLPPDRIWYSVLDLKDAFFCIPLAPESQLIFAFEWADAEEGESGQLTWTRLPQGFKNSPTLFNEALNRDLQGFRLDHPSVSLLQYVDDLLIAADTQAACLSATRDLLMTLAELGYRVSGKKAQLCQEEVTYLGFKIHKGSRSLSNSRTQAILQIPVPKTKRQVREFLGTIGYCRLWIPGFAELAQPLYAATRPGNDPLVWGEKEEEAFQSLKLALTQPPALALPSLDKPFQLFVEETSGAAKGVLTQALGPWKRPVAYLSKRLDPVAAGWPRCLRAIAAAALLTREASKLTFGQDIEITSSHNLESLLRSPPDKWLTNARITQYQVLLLDPPRVRFKQTAALNPATLLPETDDTLPIHHCLDTLDSLTSTRPDLTDQPLAQAEATLFTDGSSYIRDGKRYAGAAVVTLDSVIWAEPLPIGTSAQKAELIALTKALEWSKDKSVNIYTDSRYAFATLHVHGMIYRERGWLTAGGKAIKNAPEILALLTAVWLPKRVAVMHCKGHQKDDAPTSTGNRRADEVAREVAIRPLSTQATISAGKRTADGSEFEKRTADGSEFESPKKKAKVE

SEQ ID NO: 1164 - protein, 2098 aa, synthetic construct
MPAAKRVKLDGGDKKYSIGLDIGTNSVGWAVITDEYKVPSKKFKVLGNTDRHSIKKNLIGALLFDSGETAEATRLKRTARRRYTRRKNRICYLQEIFSNEMAKVDDSFFHRLEESFLVEEDKKHERHPIFGNIVDEVAYHEKYPTIYHLRKKLVDSTDKADLRLIYLALAHMIKFRGHFLIEGDLNPDNSDVDKLFIQLVQTYNQLFEENPINASGVDAKAILSARLSKSRRLENLIAQLPGEKKNGLFGNLIALSLGLTPNFKSNFDLAEDAKLQLSKDTYDDDLDNLLAQIGDQYADLFLAAKNLSDAILLSDILRVNTEITKAPLSASMIKRYDEHHQDLTLLKALVRQQLPEKYKEIFFDQSKNGYAGYIDGGASQEEFYKFIKPILEKMDGTEELLVKLNREDLLRKQRTFDNGSIPHQIHLGELHAILRRQEDFYPFLKDNREKIEKILTFRIPYYVGPLARGNSRFAWMTRKSEETITPWNFEEVVDKGASAQSFIERMTNFDKNLPNEKVLPKHSLLYEYFTVYNELTKVKYVTEGMRKPAFLSGEQKKAIVDLLFKTNRKVTVKQLKEDYFKKIECFDSVEISGVEDRFNASLGTYHDLLKIIKDKDFLDNEENEDILEDIVLTLTLFEDREMIEERLKTYAHLFDDKVMKQLKRRRYTGWGRLSRKLINGIRDKQSGKTILDFLKSDGFANRNFMQLIHDDSLTFKEDIQKAQVSGQGDSLHEHIANLAGSPAIKKGILQTVKVVDELVKVMGRHKPENIVIEMARENQTTQKGQKNSRERMKRIEEGIKELGSQILKEHPVENTQLQNEKLYLYYLQNGRDMYVDQELDINRLSDYDVDHIVPQSFLKDDSIDNKVLTRSDKARGKSDNVPSEEVVKKMKNYWRQLLNAKLITQRKFDNLTKAERGGLSELDKAGFIKRQLVETRQITKHVAQILDSRMNTKYDENDKLIREVKVITLKSKLVSDFRKDFQFYKVREINNYHHAHDAYLNAVVGTALIKKYPKLESEFVYGDYKVYDVRKMIAKSEQEIGKATAKYFFYSNIMNFFKTEITLANGEIRKRPLIETNGETGEIVWDKGRDFATVRKVLSMPQVNIVKKTEVQTGGFSKESILPKRNSDKLIARKKDWDPKKYGGFDSPTVAYSVLVVAKVEKGKSKKLKSVKELLGITIMERSSFEKNPIDFLEAKGYKEVKKDLIIKLPKYSLFELENGRKRMLASAGELQKGNELALPSKYVNFLYLASHYEKLKGSPEDNEQKQLFVEQHKHYLDEIIEQISEFSKRVILADANLDKVLSAYNKHRDKPIREQAENIIHLFTLTNLGAPAAFKYFDTTIDRKRYTSTKEVLDATLIHQSITGLYETRIDLSQLGGDGGGSSPAPEAAAKGGTAPLEEEYRLFLEAPIQNVTLLEQWKREIPKVWAEINPPGLASTQAPIHVQLLSTALPVRVRQYPITLEAKRSLRETIRKFRAAGILRPVHSPWNTPLLPVRKSGTSEYRMVQDLREVNKRVETIHPTVPNPYTLLSLLPPDRIWYSVLDLKDAFFCIPLAPESQLIFAFEWADAEEGESGQLTWTRLPQGFKNSPTLFNEALNRDLQGFRLDHPSVSLLQYVDDLLIAADTQAACLSATRDLLMTLAELGYRVSGKKAQLCQEEVTYLGFKIHKGSRSLSNSRTQAILQIPVPKTKRQVREFLGTIGYCRLWIPGFAELAQPLYAATRPGNDPLVWGEKEEEAFQSLKLALTQPPALALPSLDKPFQLFVEETSGAAKGVLTQALGPWKRPVAYLSKRLDPVAAGWPRCLRAIAAAALLTREASKLTFGQDIEITSSHNLESLLRSPPDKWLTNARITQYQVLLLDPPRVRFKQTAALNPATLLPETDDTLPIHHCLDTLDSLTSTRPDLTDQPLAQAEATLFTDGSSYIRDGKRYAGAAVVTLDSVIWAEPLPIGTSAQKAELIALTKALEWSKDKSVNIYTDSRYAFATLHVHGMIYRERGWLTAGGKAIKNAPEILALLTAVWLPKRVAVMHCKGHQKDDAPTSTGNRRADEVAREVAIRPLSTQATISAGKRTADGSEFEKRTADGSEFESPKKKAKVE

SEQ ID NO: 1165 - protein, 2096 aa, synthetic construct
MPAAKRVKLDGGDKKYSIGLDIGTNSVGWAVITDEYKVPSKKFKVLGNTDRHSIKKNLIGALLFDSGETAEATRLKRTARRRYTRRKNRICYLQEIFSNEMAKVDDSFFHRLEESFLVEEDKKHERHPIFGNIVDEVAYHEKYPTIYHLRKKLVDSTDKADLRLIYLALAHMIKFRGHFLIEGDLNPDNSDVDKLFIQLVQTYNQLFEENPINASGVDAKAILSARLSKSRRLENLIAQLPGEKKNGLFGNLIALSLGLTPNFKSNFDLAEDAKLQLSKDTYDDDLDNLLAQIGDQYADLFLAAKNLSDAILLSDILRVNTEITKAPLSASMIKRYDEHHQDLTLLKALVRQQLPEKYKEIFFDQSKNGYAGYIDGGASQEEFYKFIKPILEKMDGTEELLVKLNREDLLRKQRTFDNGSIPHQIHLGELHAILRRQEDFYPFLKDNREKIEKILTFRIPYYVGPLARGNSRFAWMTRKSEETITPWNFEEVVDKGASAQSFIERMTNFDKNLPNEKVLPKHSLLYEYFTVYNELTKVKYVTEGMRKPAFLSGEQKKAIVDLLFKTNRKVTVKQLKEDYFKKIECFDSVEISGVEDRFNASLGTYHDLLKIIKDKDFLDNEENEDILEDIVLTLTLFEDREMIEERLKTYAHLFDDKVMKQLKRRRYTGWGRLSRKLINGIRDKQSGKTILDFLKSDGFANRNFMQLIHDDSLTFKEDIQKAQVSGQGDSLHEHIANLAGSPAIKKGILQTVKVVDELVKVMGRHKPENIVIEMARENQTTQKGQKNSRERMKRIEEGIKELGSQILKEHPVENTQLQNEKLYLYYLQNGRDMYVDQELDINRLSDYDVDHIVPQSFLKDDSIDNKVLTRSDKARGKSDNVPSEEVVKKMKNYWRQLLNAKLITQRKFDNLTKAERGGLSELDKAGFIKRQLVETRQITKHVAQILDSRMNTKYDENDKLIREVKVITLKSKLVSDFRKDFQFYKVREINNYHHAHDAYLNAVVGTALIKKYPKLESEFVYGDYKVYDVRKMIAKSEQEIGKATAKYFFYSNIMNFFKTEITLANGEIRKRPLIETNGETGEIVWDKGRDFATVRKVLSMPQVNIVKKTEVQTGGFSKESILPKRNSDKLIARKKDWDPKKYGGFDSPTVAYSVLVVAKVEKGKSKKLKSVKELLGITIMERSSFEKNPIDFLEAKGYKEVKKDLIIKLPKYSLFELENGRKRMLASAGELQKGNELALPSKYVNFLYLASHYEKLKGSPEDNEQKQLFVEQHKHYLDEIIEQISEFSKRVILADANLDKVLSAYNKHRDKPIREQAENIIHLFTLTNLGAPAAFKYFDTTIDRKRYTSTKEVLDATLIHQSITGLYETRIDLSQLGGDGGGSSGGSPAPGGTAPLEEEYRLFLEAPIQNVTLLEQWKREIPKVWAEINPPGLASTQAPIHVQLLSTALPVRVRQYPITLEAKRSLRETIRKFRAAGILRPVHSPWNTPLLPVRKSGTSEYRMVQDLREVNKRVETIHPTVPNPYTLLSLLPPDRIWYSVLDLKDAFFCIPLAPESQLIFAFEWADAEEGESGQLTWTRLPQGFKNSPTLFNEALNRDLQGFRLDHPSVSLLQYVDDLLIAADTQAACLSATRDLLMTLAELGYRVSGKKAQLCQEEVTYLGFKIHKGSRSLSNSRTQAILQIPVPKTKRQVREFLGTIGYCRLWIPGFAELAQPLYAATRPGNDPLVWGEKEEEAFQSLKLALTQPPALALPSLDKPFQLFVEETSGAAKGVLTQALGPWKRPVAYLSKRLDPVAAGWPRCLRAIAAAALLTREASKLTFGQDIEITSSHNLESLLRSPPDKWLTNARITQYQVLLLDPPRVRFKQTAALNPATLLPETDDTLPIHHCLDTLDSLTSTRPDLTDQPLAQAEATLFTDGSSYIRDGKRYAGAAVVTLDSVIWAEPLPIGTSAQKAELIALTKALEWSKDKSVNIYTDSRYAFATLHVHGMIYRERGWLTAGGKAIKNAPEILALLTAVWLPKRVAVMHCKGHQKDDAPTSTGNRRADEVAREVAIRPLSTQATISAGKRTADGSEFEKRTADGSEFESPKKKAKVE

SEQ ID NO: 1166 - protein, 2093 aa, synthetic construct
MPAAKRVKLDGGDKKYSIGLDIGTNSVGWAVITDEYKVPSKKFKVLGNTDRHSIKKNLIGALLFDSGETAEATRLKRTARRRYTRRKNRICYLQEIFSNEMAKVDDSFFHRLEESFLVEEDKKHERHPIFGNIVDEVAYHEKYPTIYHLRKKLVDSTDKADLRLIYLALAHMIKFRGHFLIEGDLNPDNSDVDKLFIQLVQTYNQLFEENPINASGVDAKAILSARLSKSRRLENLIAQLPGEKKNGLFGNLIALSLGLTPNFKSNFDLAEDAKLQLSKDTYDDDLDNLLAQIGDQYADLFLAAKNLSDAILLSDILRVNTEITKAPLSASMIKRYDEHHQDLTLLKALVRQQLPEKYKEIFFDQSKNGYAGYIDGGASQEEFYKFIKPILEKMDGTEELLVKLNREDLLRKQRTFDNGSIPHQIHLGELHAILRRQEDFYPFLKDNREKIEKILTFRIPYYVGPLARGNSRFAWMTRKSEETITPWNFEEVVDKGASAQSFIERMTNFDKNLPNEKVLPKHSLLYEYFTVYNELTKVKYVTEGMRKPAFLSGEQKKAIVDLLFKTNRKVTVKQLKEDYFKKIECFDSVEISGVEDRFNASLGTYHDLLKIIKDKDFLDNEENEDILEDIVLTLTLFEDREMIEERLKTYAHLFDDKVMKQLKRRRYTGWGRLSRKLINGIRDKQSGKTILDFLKSDGFANRNFMQLIHDDSLTFKEDIQKAQVSGQGDSLHEHIANLAGSPAIKKGILQTVKVVDELVKVMGRHKPENIVIEMARENQTTQKGQKNSRERMKRIEEGIKELGSQILKEHPVENTQLQNEKLYLYYLQNGRDMYVDQELDINRLSDYDVDHIVPQSFLKDDSIDNKVLTRSDKARGKSDNVPSEEVVKKMKNYWRQLLNAKLITQRKFDNLTKAERGGLSELDKAGFIKRQLVETRQITKHVAQILDSRMNTKYDENDKLIREVKVITLKSKLVSDFRKDFQFYKVREINNYHHAHDAYLNAVVGTALIKKYPKLESEFVYGDYKVYDVRKMIAKSEQEIGKATAKYFFYSNIMNFFKTEITLANGEIRKRPLIETNGETGEIVWDKGRDFATVRKVLSMPQVNIVKKTEVQTGGFSKESILPKRNSDKLIARKKDWDPKKYGGFDSPTVAYSVLVVAKVEKGKSKKLKSVKELLGITIMERSSFEKNPIDFLEAKGYKEVKKDLIIKLPKYSLFELENGRKRMLASAGELQKGNELALPSKYVNFLYLASHYEKLKGSPEDNEQKQLFVEQHKHYLDEIIEQISEFSKRVILADANLDKVLSAYNKHRDKPIREQAENIIHLFTLTNLGAPAAFKYFDTTIDRKRYTSTKEVLDATLIHQSITGLYETRIDLSQLGGDGGGGSGSSGGTAPLEEEYRLFLEAPIQNVTLLEQWKREIPKVWAEINPPGLASTQAPIHVQLLSTALPVRVRQYPITLEAKRSLRETIRKFRAAGILRPVHSPWNTPLLPVRKSGTSEYRMVQDLREVNKRVETIHPTVPNPYTLLSLLPPDRIWYSVLDLKDAFFCIPLAPESQLIFAFEWADAEEGESGQLTWTRLPQGFKNSPTLFNEALNRDLQGFRLDHPSVSLLQYVDDLLIAADTQAACLSATRDLLMTLAELGYRVSGKKAQLCQEEVTYLGFKIHKGSRSLSNSRTQAILQIPVPKTKRQVREFLGTIGYCRLWIPGFAELAQPLYAATRPGNDPLVWGEKEEEAFQSLKLALTQPPALALPSLDKPFQLFVEETSGAAKGVLTQALGPWKRPVAYLSKRLDPVAAGWPRCLRAIAAAALLTREASKLTFGQDIEITSSHNLESLLRSPPDKWLTNARITQYQVLLLDPPRVRFKQTAALNPATLLPETDDTLPIHHCLDTLDSLTSTRPDLTDQPLAQAEATLFTDGSSYIRDGKRYAGAAVVTLDSVIWAEPLPIGTSAQKAELIALTKALEWSKDKSVNIYTDSRYAFATLHVHGMIYRERGWLTAGGKAIKNAPEILALLTAVWLPKRVAVMHCKGHQKDDAPTSTGNRRADEVAREVAIRPLSTQATISAGKRTADGSEFEKRTADGSEFESPKKKAKVE

SEQ ID NO: 1167 - protein, 2098 aa, synthetic construct
MPAAKRVKLDGGDKKYSIGLDIGTNSVGWAVITDEYKVPSKKFKVLGNTDRHSIKKNLIGALLFDSGETAEATRLKRTARRRYTRRKNRICYLQEIFSNEMAKVDDSFFHRLEESFLVEEDKKHERHPIFGNIVDEVAYHEKYPTIYHLRKKLVDSTDKADLRLIYLALAHMIKFRGHFLIEGDLNPDNSDVDKLFIQLVQTYNQLFEENPINASGVDAKAILSARLSKSRRLENLIAQLPGEKKNGLFGNLIALSLGLTPNFKSNFDLAEDAKLQLSKDTYDDDLDNLLAQIGDQYADLFLAAKNLSDAILLSDILRVNTEITKAPLSASMIKRYDEHHQDLTLLKALVRQQLPEKYKEIFFDQSKNGYAGYIDGGASQEEFYKFIKPILEKMDGTEELLVKLNREDLLRKQRTFDNGSIPHQIHLGELHAILRRQEDFYPFLKDNREKIEKILTFRIPYYVGPLARGNSRFAWMTRKSEETITPWNFEEVVDKGASAQSFIERMTNFDKNLPNEKVLPKHSLLYEYFTVYNELTKVKYVTEGMRKPAFLSGEQKKAIVDLLFKTNRKVTVKQLKEDYFKKIECFDSVEISGVEDRFNASLGTYHDLLKIIKDKDFLDNEENEDILEDIVLTLTLFEDREMIEERLKTYAHLFDDKVMKQLKRRRYTGWGRLSRKLINGIRDKQSGKTILDFLKSDGFANRNFMQLIHDDSLTFKEDIQKAQVSGQGDSLHEHIANLAGSPAIKKGILQTVKVVDELVKVMGRHKPENIVIEMARENQTTQKGQKNSRERMKRIEEGIKELGSQILKEHPVENTQLQNEKLYLYYLQNGRDMYVDQELDINRLSDYDVDHIVPQSFLKDDSIDNKVLTRSDKARGKSDNVPSEEVVKKMKNYWRQLLNAKLITQRKFDNLTKAERGGLSELDKAGFIKRQLVETRQITKHVAQILDSRMNTKYDENDKLIREVKVITLKSKLVSDFRKDFQFYKVREINNYHHAHDAYLNAVVGTALIKKYPKLESEFVYGDYKVYDVRKMIAKSEQEIGKATAKYFFYSNIMNFFKTEITLANGEIRKRPLIETNGETGEIVWDKGRDFATVRKVLSMPQVNIVKKTEVQTGGFSKESILPKRNSDKLIARKKDWDPKKYGGFDSPTVAYSVLVVAKVEKGKSKKLKSVKELLGITIMERSSFEKNPIDFLEAKGYKEVKKDLIIKLPKYSLFELENGRKRMLASAGELQKGNELALPSKYVNFLYLASHYEKLKGSPEDNEQKQLFVEQHKHYLDEIIEQISEFSKRVILADANLDKVLSAYNKHRDKPIREQAENIIHLFTLTNLGAPAAFKYFDTTIDRKRYTSTKEVLDATLIHQSITGLYETRIDLSQLGGDGGEAAAKPAPGGGGGTAPLEEEYRLFLEAPIQNVTLLEQWKREIPKVWAEINPPGLASTQAPIHVQLLSTALPVRVRQYPITLEAKRSLRETIRKFRAAGILRPVHSPWNTPLLPVRKSGTSEYRMVQDLREVNKRVETIHPTVPNPYTLLSLLPPDRIWYSVLDLKDAFFCIPLAPESQLIFAFEWADAEEGESGQLTWTRLPQGFKNSPTLFNEALNRDLQGFRLDHPSVSLLQYVDDLLIAADTQAACLSATRDLLMTLAELGYRVSGKKAQLCQEEVTYLGFKIHKGSRSLSNSRTQAILQIPVPKTKRQVREFLGTIGYCRLWIPGFAELAQPLYAATRPGNDPLVWGEKEEEAFQSLKLALTQPPALALPSLDKPFQLFVEETSGAAKGVLTQALGPWKRPVAYLSKRLDPVAAGWPRCLRAIAAAALLTREASKLTFGQDIEITSSHNLESLLRSPPDKWLTNARITQYQVLLLDPPRVRFKQTAALNPATLLPETDDTLPIHHCLDTLDSLTSTRPDLTDQPLAQAEATLFTDGSSYIRDGKRYAGAAVVTLDSVIWAEPLPIGTSAQKAELIALTKALEWSKDKSVNIYTDSRYAFATLHVHGMIYRERGWLTAGGKAIKNAPEILALLTAVWLPKRVAVMHCKGHQKDDAPTSTGNRRADEVAREVAIRPLSTQATISAGKRTADGSEFEKRTADGSEFESPKKKAKVE

SEQ ID NO: 1168 - protein, 2093 aa, synthetic construct
MPAAKRVKLDGGDKKYSIGLDIGTNSVGWAVITDEYKVPSKKFKVLGNTDRHSIKKNLIGALLFDSGETAEATRLKRTARRRYTRRKNRICYLQEIFSNEMAKVDDSFFHRLEESFLVEEDKKHERHPIFGNIVDEVAYHEKYPTIYHLRKKLVDSTDKADLRLIYLALAHMIKFRGHFLIEGDLNPDNSDVDKLFIQLVQTYNQLFEENPINASGVDAKAILSARLSKSRRLENLIAQLPGEKKNGLFGNLIALSLGLTPNFKSNFDLAEDAKLQLSKDTYDDDLDNLLAQIGDQYADLFLAAKNLSDAILLSDILRVNTEITKAPLSASMIKRYDEHHQDLTLLKALVRQQLPEKYKEIFFDQSKNGYAGYIDGGASQEEFYKFIKPILEKMDGTEELLVKLNREDLLRKQRTFDNGSIPHQIHLGELHAILRRQEDFYPFLKDNREKIEKILTFRIPYYVGPLARGNSRFAWMTRKSEETITPWNFEEVVDKGASAQSFIERMTNFDKNLPNEKVLPKHSLLYEYFTVYNELTKVKYVTEGMRKPAFLSGEQKKAIVDLLFKTNRKVTVKQLKEDYFKKIECFDSVEISGVEDRFNASLGTYHDLLKIIKDKDFLDNEENEDILEDIVLTLTLFEDREMIEERLKTYAHLFDDKVMKQLKRRRYTGWGRLSRKLINGIRDKQSGKTILDFLKSDGFANRNFMQLIHDDSLTFKEDIQKAQVSGQGDSLHEHIANLAGSPAIKKGILQTVKVVDELVKVMGRHKPENIVIEMARENQTTQKGQKNSRERMKRIEEGIKELGSQILKEHPVENTQLQNEKLYLYYLQNGRDMYVDQELDINRLSDYDVDHIVPQSFLKDDSIDNKVLTRSDKARGKSDNVPSEEVVKKMKNYWRQLLNAKLITQRKFDNLTKAERGGLSELDKAGFIKRQLVETRQITKHVAQILDSRMNTKYDENDKLIREVKVITLKSKLVSDFRKDFQFYKVREINNYHHAHDAYLNAVVGTALIKKYPKLESEFVYGDYKVYDVRKMIAKSEQEIGKATAKYFFYSNIMNFFKTEITLANGEIRKRPLIETNGETGEIVWDKGRDFATVRKVLSMPQVNIVKKTEVQTGGFSKESILPKRNSDKLIARKKDWDPKKYGGFDSPTVAYSVLVVAKVEKGKSKKLKSVKELLGITIMERSSFEKNPIDFLEAKGYKEVKKDLIIKLPKYSLFELENGRKRMLASAGELQKGNELALPSKYVNFLYLASHYEKLKGSPEDNEQKQLFVEQHKHYLDEIIEQISEFSKRVILADANLDKVLSAYNKHRDKPIREQAENIIHLFTLTNLGAPAAFKYFDTTIDRKRYTSTKEVLDATLIHQSITGLYETRIDLSQLGGDGGGGGGGSPAPGGTLQLEEEYRLFEPESTQKQEMDIWLKNFPQAWAETGGMGTAHCQAPVLIQLKATATPISIRQYPMPHEAYQGIKPHIRRMLDQGILKPCQSPWNTPLLPVKKPGTEDYRPVQDLREVNKRVEDIHPTVPNPYNLLSTLPPSHPWYTVLDLKDAFFCLRLHSESQLLFAFEWRDPEIGLSGQLTWTRLPQGFKNSPTLFNEALHSDLADFRVRYPALVLLQYVDDLLLAAATRTECLEGTKALLETLGNKGYRASAKKAQICLQEVTYLGYSLKDGQRWLTKARKEAILSIPVPKNSRQVREFLGTAGYCRLWIPGFAELAAPLYPLTRPGTLFQWGTEQQLAFEDIKKALLSSPALGLPDITKPFELFIDENSGFAKGVLVQKLGPWKRPVAYLSKKLDTVASGWPPCLRMVAAIAILVKDAGKLTLGQPLTILTSHPVEALVRQPPNKWLSNARMTHYQAMLLDAERVHFGPTVSLNPATLLPLPSGGNHHDCLQILAETHGTRPDLTDQPLPDADLTWYTDGSSFIRNGEREAGAAVTTESEVIWAAPLPPGTSAQRAELIALTQALKMAEGKKLTVYTDSRYAFATTHVHGEIYRRRGWLTSEGKEIKNKNEILALLEALFLPKRLSIIHCPGHQKGDSPQAKGNRLADDTAKKAATETHSSLTVLPAGKRTADGSEFEKRTADGSEFESPKKKAKVE

SEQ ID NO: 1169 - protein, 2117 aa, synthetic construct
MPAAKRVKLDGGDKKYSIGLDIGTNSVGWAVITDEYKVPSKKFKVLGNTDRHSIKKNLIGALLFDSGETAEATRLKRTARRRYTRRKNRICYLQEIFSNEMAKVDDSFFHRLEESFLVEEDKKHERHPIFGNIVDEVAYHEKYPTIYHLRKKLVDSTDKADLRLIYLALAHMIKFRGHFLIEGDLNPDNSDVDKLFIQLVQTYNQLFEENPINASGVDAKAILSARLSKSRRLENLIAQLPGEKKNGLFGNLIALSLGLTPNFKSNFDLAEDAKLQLSKDTYDDDLDNLLAQIGDQYADLFLAAKNLSDAILLSDILRVNTEITKAPLSASMIKRYDEHHQDLTLLKALVRQQLPEKYKEIFFDQSKNGYAGYIDGGASQEEFYKFIKPILEKMDGTEELLVKLNREDLLRKQRTFDNGSIPHQIHLGELHAILRRQEDFYPFLKDNREKIEKILTFRIPYYVGPLARGNSRFAWMTRKSEETITPWNFEEVVDKGASAQSFIERMTNFDKNLPNEKVLPKHSLLYEYFTVYNELTKVKYVTEGMRKPAFLSGEQKKAIVDLLFKTNRKVTVKQLKEDYFKKIECFDSVEISGVEDRFNASLGTYHDLLKIIKDKDFLDNEENEDILEDIVLTLTLFEDREMIEERLKTYAHLFDDKVMKQLKRRRYTGWGRLSRKLINGIRDKQSGKTILDFLKSDGFANRNFMQLIHDDSLTFKEDIQKAQVSGQGDSLHEHIANLAGSPAIKKGILQTVKVVDELVKVMGRHKPENIVIEMARENQTTQKGQKNSRERMKRIEEGIKELGSQILKEHPVENTQLQNEKLYLYYLQNGRDMYVDQELDINRLSDYDVDHIVPQSFLKDDSIDNKVLTRSDKARGKSDNVPSEEVVKKMKNYWRQLLNAKLITQRKFDNLTKAERGGLSELDKAGFIKRQLVETRQITKHVAQILDSRMNTKYDENDKLIREVKVITLKSKLVSDFRKDFQFYKVREINNYHHAHDAYLNAVVGTALIKKYPKLESEFVYGDYKVYDVRKMIAKSEQEIGKATAKYFFYSNIMNFFKTEITLANGEIRKRPLIETNGETGEIVWDKGRDFATVRKVLSMPQVNIVKKTEVQTGGFSKESILPKRNSDKLIARKKDWDPKKYGGFDSPTVAYSVLVVAKVEKGKSKKLKSVKELLGITIMERSSFEKNPIDFLEAKGYKEVKKDLIIKLPKYSLFELENGRKRMLASAGELQKGNELALPSKYVNFLYLASHYEKLKGSPEDNEQKQLFVEQHKHYLDEIIEQISEFSKRVILADANLDKVLSAYNKHRDKPIREQAENIIHLFTLTNLGAPAAFKYFDTTIDRKRYTSTKEVLDATLIHQSITGLYETRIDLSQLGGDGGSGGSSGGSSGSETPGTSESATPESSGGSSGGSSGGTLQLEEEYRLFEPESTQKQEMDIWLKNFPQAWAETGGMGTAHCQAPVLIQLKATATPISIRQYPMPHEAYQGIKPHIRRMLDQGILKPCQSPWNTPLLPVKKPGTEDYRPVQDLREVNKRVEDIHPTVPNPYNLLSTLPPSHPWYTVLDLKDAFFCLRLHSESQLLFAFEWRDPEIGLSGQLTWTRLPQGFKNSPTLFNEALHSDLADFRVRYPALVLLQYVDDLLLAAATRTECLEGTKALLETLGNKGYRASAKKAQICLQEVTYLGYSLKDGQRWLTKARKEAILSIPVPKNSRQVREFLGTAGYCRLWIPGFAELAAPLYPLTRPGTLFQWGTEQQLAFEDIKKALLSSPALGLPDITKPFELFIDENSGFAKGVLVQKLGPWKRPVAYLSKKLDTVASGWPPCLRMVAAIAILVKDAGKLTLGQPLTILTSHPVEALVRQPPNKWLSNARMTHYQAMLLDAERVHFGPTVSLNPATLLPLPSGGNHHDCLQILAETHGTRPDLTDQPLPDADLTWYTDGSSFIRNGEREAGAAVTTESEVIWAAPLPPGTSAQRAELIALTQALKMAEGKKLTVYTDSRYAFATTHVHGEIYRRRGWLTSEGKEIKNKNEILALLEALFLPKRLSIIHCPGHQKGDSPQAKGNRLADDTAKKAATETHSSLTVLPAGKRTADGSEFEKRTADGSEFESPKKKAKVE

SEQ ID NO: 1170 - protein, 2130 aa, synthetic construct
MPAAKRVKLDGGDKKYSIGLDIGTNSVGWAVITDEYKVPSKKFKVLGNTDRHSIKKNLIGALLFDSGETAEATRLKRTARRRYTRRKNRICYLQEIFSNEMAKVDDSFFHRLEESFLVEEDKKHERHPIFGNIVDEVAYHEKYPTIYHLRKKLVDSTDKADLRLIYLALAHMIKFRGHFLIEGDLNPDNSDVDKLFIQLVQTYNQLFEENPINASGVDAKAILSARLSKSRRLENLIAQLPGEKKNGLFGNLIALSLGLTPNFKSNFDLAEDAKLQLSKDTYDDDLDNLLAQIGDQYADLFLAAKNLSDAILLSDILRVNTEITKAPLSASMIKRYDEHHQDLTLLKALVRQQLPEKYKEIFFDQSKNGYAGYIDGGASQEEFYKFIKPILEKMDGTEELLVKLNREDLLRKQRTFDNGSIPHQIHLGELHAILRRQEDFYPFLKDNREKIEKILTFRIPYYVGPLARGNSRFAWMTRKSEETITPWNFEEVVDKGASAQSFIERMTNFDKNLPNEKVLPKHSLLYEYFTVYNELTKVKYVTEGMRKPAFLSGEQKKAIVDLLFKTNRKVTVKQLKEDYFKKIECFDSVEISGVEDRFNASLGTYHDLLKIIKDKDFLDNEENEDILEDIVLTLTLFEDREMIEERLKTYAHLFDDKVMKQLKRRRYTGWGRLSRKLINGIRDKQSGKTILDFLKSDGFANRNFMQLIHDDSLTFKEDIQKAQVSGQGDSLHEHIANLAGSPAIKKGILQTVKVVDELVKVMGRHKPENIVIEMARENQTTQKGQKNSRERMKRIEEGIKELGSQILKEHPVENTQLQNEKLYLYYLQNGRDMYVDQELDINRLSDYDVDHIVPQSFLKDDSIDNKVLTRSDKARGKSDNVPSEEVVKKMKNYWRQLLNAKLITQRKFDNLTKAERGGLSELDKAGFIKRQLVETRQITKHVAQILDSRMNTKYDENDKLIREVKVITLKSKLVSDFRKDFQFYKVREINNYHHAHDAYLNAVVGTALIKKYPKLESEFVYGDYKVYDVRKMIAKSEQEIGKATAKYFFYSNIMNFFKTEITLANGEIRKRPLIETNGETGEIVWDKGRDFATVRKVLSMPQVNIVKKTEVQTGGFSKESILPKRNSDKLIARKKDWDPKKYGGFDSPTVAYSVLVVAKVEKGKSKKLKSVKELLGITIMERSSFEKNPIDFLEAKGYKEVKKDLIIKLPKYSLFELENGRKRMLASAGELQKGNELALPSKYVNFLYLASHYEKLKGSPEDNEQKQLFVEQHKHYLDEIIEQISEFSKRVILADANLDKVLSAYNKHRDKPIREQAENIIHLFTLTNLGAPAAFKYFDTTIDRKRYTSTKEVLDATLIHQSITGLYETRIDLSQLGGDGGAEAAAKEAAAKEAAAKEAAAKALEAEAAAKEAAAKEAAAKEAAAKAGGTLQLEEEYRLFEPESTQKQEMDIWLKNFPQAWAETGGMGTAHCQAPVLIQLKATATPISIRQYPMPHEAYQGIKPHIRRMLDQGILKPCQSPWNTPLLPVKKPGTEDYRPVQDLREVNKRVEDIHPTVPNPYNLLSTLPPSHPWYTVLDLKDAFFCLRLHSESQLLFAFEWRDPEIGLSGQLTWTRLPQGFKNSPTLFNEALHSDLADFRVRYPALVLLQYVDDLLLAAATRTECLEGTKALLETLGNKGYRASAKKAQICLQEVTYLGYSLKDGQRWLTKARKEAILSIPVPKNSRQVREFLGTAGYCRLWIPGFAELAAPLYPLTRPGTLFQWGTEQQLAFEDIKKALLSSPALGLPDITKPFELFIDENSGFAKGVLVQKLGPWKRPVAYLSKKLDTVASGWPPCLRMVAAIAILVKDAGKLTLGQPLTILTSHPVEALVRQPPNKWLSNARMTHYQAMLLDAERVHFGPTVSLNPATLLPLPSGGNHHDCLQILAETHGTRPDLTDQPLPDADLTWYTDGSSFIRNGEREAGAAVTTESEVIWAAPLPPGTSAQRAELIALTQALKMAEGKKLTVYTDSRYAFATTHVHGEIYRRRGWLTSEGKEIKNKNEILALLEALFLPKRLSIIHCPGHQKGDSPQAKGNRLADDTAKKAATETHSSLTVLPAGKRTADGSEFEKRTADGSEFESPKKKAKVE

SEQ ID NO: 1171 - protein, 2114 aa, synthetic construct
MPAAKRVKLDGGDKKYSIGLDIGTNSVGWAVITDEYKVPSKKFKVLGNTDRHSIKKNLIGALLFDSGETAEATRLKRTARRRYTRRKNRICYLQEIFSNEMAKVDDSFFHRLEESFLVEEDKKHERHPIFGNIVDEVAYHEKYPTIYHLRKKLVDSTDKADLRLIYLALAHMIKFRGHFLIEGDLNPDNSDVDKLFIQLVQTYNQLFEENPINASGVDAKAILSARLSKSRRLENLIAQLPGEKKNGLFGNLIALSLGLTPNFKSNFDLAEDAKLQLSKDTYDDDLDNLLAQIGDQYADLFLAAKNLSDAILLSDILRVNTEITKAPLSASMIKRYDEHHQDLTLLKALVRQQLPEKYKEIFFDQSKNGYAGYIDGGASQEEFYKFIKPILEKMDGTEELLVKLNREDLLRKQRTFDNGSIPHQIHLGELHAILRRQEDFYPFLKDNREKIEKILTFRIPYYVGPLARGNSRFAWMTRKSEETITPWNFEEVVDKGASAQSFIERMTNFDKNLPNEKVLPKHSLLYEYFTVYNELTKVKYVTEGMRKPAFLSGEQKKAIVDLLFKTNRKVTVKQLKEDYFKKIECFDSVEISGVEDRFNASLGTYHDLLKIIKDKDFLDNEENEDILEDIVLTLTLFEDREMIEERLKTYAHLFDDKVMKQLKRRRYTGWGRLSRKLINGIRDKQSGKTILDFLKSDGFANRNFMQLIHDDSLTFKEDIQKAQVSGQGDSLHEHIANLAGSPAIKKGILQTVKVVDELVKVMGRHKPENIVIEMARENQTTQKGQKNSRERMKRIEEGIKELGSQILKEHPVENTQLQNEKLYLYYLQNGRDMYVDQELDINRLSDYDVDHIVPQSFLKDDSIDNKVLTRSDKARGKSDNVPSEEVVKKMKNYWRQLLNAKLITQRKFDNLTKAERGGLSELDKAGFIKRQLVETRQITKHVAQILDSRMNTKYDENDKLIREVKVITLKSKLVSDFRKDFQFYKVREINNYHHAHDAYLNAVVGTALIKKYPKLESEFVYGDYKVYDVRKMIAKSEQEIGKATAKYFFYSNIMNFFKTEITLANGEIRKRPLIETNGETGEIVWDKGRDFATVRKVLSMPQVNIVKKTEVQTGGFSKESILPKRNSDKLIARKKDWDPKKYGGFDSPTVAYSVLVVAKVEKGKSKKLKSVKELLGITIMERSSFEKNPIDFLEAKGYKEVKKDLIIKLPKYSLFELENGRKRMLASAGELQKGNELALPSKYVNFLYLASHYEKLKGSPEDNEQKQLFVEQHKHYLDEIIEQISEFSKRVILADANLDKVLSAYNKHRDKPIREQAENIIHLFTLTNLGAPAAFKYFDTTIDRKRYTSTKEVLDATLIHQSITGLYETRIDLSQLGGDGGEAAAKEAAAKEAAAKEAAAKEAAAKEAAAKGGTLQLEEEYRLFEPESTQKQEMDIWLKNFPQAWAETGGMGTAHCQAPVLIQLKATATPISIRQYPMPHEAYQGIKPHIRRMLDQGILKPCQSPWNTPLLPVKKPGTEDYRPVQDLREVNKRVEDIHPTVPNPYNLLSTLPPSHPWYTVLDLKDAFFCLRLHSESQLLFAFEWRDPEIGLSGQLTWTRLPQGFKNSPTLFNEALHSDLADFRVRYPALVLLQYVDDLLLAAATRTECLEGTKALLETLGNKGYRASAKKAQICLQEVTYLGYSLKDGQRWLTKARKEAILSIPVPKNSRQVREFLGTAGYCRLWIPGFAELAAPLYPLTRPGTLFQWGTEQQLAFEDIKKALLSSPALGLPDITKPFELFIDENSGFAKGVLVQKLGPWKRPVAYLSKKLDTVASGWPPCLRMVAAIAILVKDAGKLTLGQPLTILTSHPVEALVRQPPNKWLSNARMTHYQAMLLDAERVHFGPTVSLNPATLLPLPSGGNHHDCLQILAETHGTRPDLTDQPLPDADLTWYTDGSSFIRNGEREAGAAVTTESEVIWAAPLPPGTSAQRAELIALTQALKMAEGKKLTVYTDSRYAFATTHVHGEIYRRRGWLTSEGKEIKNKNEILALLEALFLPKRLSIIHCPGHQKGDSPQAKGNRLADDTAKKAATETHSSLTVLPAGKRTADGSEFEKRTADGSEFESPKKKAKVE

SEQ ID NO: 1172 - protein, 2092 aa, synthetic construct
MPAAKRVKLDGGDKKYSIGLDIGTNSVGWAVITDEYKVPSKKFKVLGNTDRHSIKKNLIGALLFDSGETAEATRLKRTARRRYTRRKNRICYLQEIFSNEMAKVDDSFFHRLEESFLVEEDKKHERHPIFGNIVDEVAYHEKYPTIYHLRKKLVDSTDKADLRLIYLALAHMIKFRGHFLIEGDLNPDNSDVDKLFIQLVQTYNQLFEENPINASGVDAKAILSARLSKSRRLENLIAQLPGEKKNGLFGNLIALSLGLTPNFKSNFDLAEDAKLQLSKDTYDDDLDNLLAQIGDQYADLFLAAKNLSDAILLSDILRVNTEITKAPLSASMIKRYDEHHQDLTLLKALVRQQLPEKYKEIFFDQSKNGYAGYIDGGASQEEFYKFIKPILEKMDGTEELLVKLNREDLLRKQRTFDNGSIPHQIHLGELHAILRRQEDFYPFLKDNREKIEKILTFRIPYYVGPLARGNSRFAWMTRKSEETITPWNFEEVVDKGASAQSFIERMTNFDKNLPNEKVLPKHSLLYEYFTVYNELTKVKYVTEGMRKPAFLSGEQKKAIVDLLFKTNRKVTVKQLKEDYFKKIECFDSVEISGVEDRFNASLGTYHDLLKIIKDKDFLDNEENEDILEDIVLTLTLFEDREMIEERLKTYAHLFDDKVMKQLKRRRYTGWGRLSRKLINGIRDKQSGKTILDFLKSDGFANRNFMQLIHDDSLTFKEDIQKAQVSGQGDSLHEHIANLAGSPAIKKGILQTVKVVDELVKVMGRHKPENIVIEMARENQTTQKGQKNSRERMKRIEEGIKELGSQILKEHPVENTQLQNEKLYLYYLQNGRDMYVDQELDINRLSDYDVDHIVPQSFLKDDSIDNKVLTRSDKARGKSDNVPSEEVVKKMKNYWRQLLNAKLITQRKFDNLTKAERGGLSELDKAGFIKRQLVETRQITKHVAQILDSRMNTKYDENDKLIREVKVITLKSKLVSDFRKDFQFYKVREINNYHHAHDAYLNAVVGTALIKKYPKLESEFVYGDYKVYDVRKMIAKSEQEIGKATAKYFFYSNIMNFFKTEITLANGEIRKRPLIETNGETGEIVWDKGRDFATVRKVLSMPQVNIVKKTEVQTGGFSKESILPKRNSDKLIARKKDWDPKKYGGFDSPTVAYSVLVVAKVEKGKSKKLKSVKELLGITIMERSSFEKNPIDFLEAKGYKEVKKDLIIKLPKYSLFELENGRKRMLASAGELQKGNELALPSKYVNFLYLASHYEKLKGSPEDNEQKQLFVEQHKHYLDEIIEQISEFSKRVILADANLDKVLSAYNKHRDKPIREQAENIIHLFTLTNLGAPAAFKYFDTTIDRKRYTSTKEVLDATLIHQSITGLYETRIDLSQLGGDGGEAAAKGGSGGTLQLEEEYRLFEPESTQKQEMDIWLKNFPQAWAETGGMGTAHCQAPVLIQLKATATPISIRQYPMPHEAYQGIKPHIRRMLDQGILKPCQSPWNTPLLPVKKPGTEDYRPVQDLREVNKRVEDIHPTVPNPYNLLSTLPPSHPWYTVLDLKDAFFCLRLHSESQLLFAFEWRDPEIGLSGQLTWTRLPQGFKNSPTLFNEALHSDLADFRVRYPALVLLQYVDDLLLAAATRTECLEGTKALLETLGNKGYRASAKKAQICLQEVTYLGYSLKDGQRWLTKARKEAILSIPVPKNSRQVREFLGTAGYCRLWIPGFAELAAPLYPLTRPGTLFQWGTEQQLAFEDIKKALLSSPALGLPDITKPFELFIDENSGFAKGVLVQKLGPWKRPVAYLSKKLDTVASGWPPCLRMVAAIAILVKDAGKLTLGQPLTILTSHPVEALVRQPPNKWLSNARMTHYQAMLLDAERVHFGPTVSLNPATLLPLPSGGNHHDCLQILAETHGTRPDLTDQPLPDADLTWYTDGSSFIRNGEREAGAAVTTESEVIWAAPLPPGTSAQRAELIALTQALKMAEGKKLTVYTDSRYAFATTHVHGEIYRRRGWLTSEGKEIKNKNEILALLEALFLPKRLSIIHCPGHQKGDSPQAKGNRLADDTAKKAATETHSSLTVLPAGKRTADGSEFEKRTADGSEFESPKKKAKVE

SEQ ID NO: 1173 - protein, 2095 aa, synthetic construct
MPAAKRVKLDGGDKKYSIGLDIGTNSVGWAVITDEYKVPSKKFKVLGNTDRHSIKKNLIGALLFDSGETAEATRLKRTARRRYTRRKNRICYLQEIFSNEMAKVDDSFFHRLEESFLVEEDKKHERHPIFGNIVDEVAYHEKYPTIYHLRKKLVDSTDKADLRLIYLALAHMIKFRGHFLIEGDLNPDNSDVDKLFIQLVQTYNQLFEENPINASGVDAKAILSARLSKSRRLENLIAQLPGEKKNGLFGNLIALSLGLTPNFKSNFDLAEDAKLQLSKDTYDDDLDNLLAQIGDQYADLFLAAKNLSDAILLSDILRVNTEITKAPLSASMIKRYDEHHQDLTLLKALVRQQLPEKYKEIFFDQSKNGYAGYIDGGASQEEFYKFIKPILEKMDGTEELLVKLNREDLLRKQRTFDNGSIPHQIHLGELHAILRRQEDFYPFLKDNREKIEKILTFRIPYYVGPLARGNSRFAWMTRKSEETITPWNFEEVVDKGASAQSFIERMTNFDKNLPNEKVLPKHSLLYEYFTVYNELTKVKYVTEGMRKPAFLSGEQKKAIVDLLFKTNRKVTVKQLKEDYFKKIECFDSVEISGVEDRFNASLGTYHDLLKIIKDKDFLDNEENEDILEDIVLTLTLFEDREMIEERLKTYAHLFDDKVMKQLKRRRYTGWGRLSRKLINGIRDKQSGKTILDFLKSDGFANRNFMQLIHDDSLTFKEDIQKAQVSGQGDSLHEHIANLAGSPAIKKGILQTVKVVDELVKVMGRHKPENIVIEMARENQTTQKGQKNSRERMKRIEEGIKELGSQILKEHPVENTQLQNEKLYLYYLQNGRDMYVDQELDINRLSDYDVDHIVPQSFLKDDSIDNKVLTRSDKARGKSDNVPSEEVVKKMKNYWRQLLNAKLITQRKFDNLTKAERGGLSELDKAGFIKRQLVETRQITKHVAQILDSRMNTKYDENDKLIREVKVITLKSKLVSDFRKDFQFYKVREINNYHHAHDAYLNAVVGTALIKKYPKLESEFVYGDYKVYDVRKMIAKSEQEIGKATAKYFFYSNIMNFFKTEITLANGEIRKRPLIETNGETGEIVWDKGRDFATVRKVLSMPQVNIVKKTEVQTGGFSKESILPKRNSDKLIARKKDWDPKKYGGFDSPTVAYSVLVVAKVEKGKSKKLKSVKELLGITIMERSSFEKNPIDFLEAKGYKEVKKDLIIKLPKYSLFELENGRKRMLASAGELQKGNELALPSKYVNFLYLASHYEKLKGSPEDNEQKQLFVEQHKHYLDEIIEQISEFSKRVILADANLDKVLSAYNKHRDKPIREQAENIIHLFTLTNLGAPAAFKYFDTTIDRKRYTSTKEVLDATLIHQSITGLYETRIDLSQLGGDGGPAPAPAPAPAPGGTLQLEEEYRLFEPESTQKQEMDIWLKNFPQAWAETGGMGTAHCQAPVLIQLKATATPISIRQYPMPHEAYQGIKPHIRRMLDQGILKPCQSPWNTPLLPVKKPGTEDYRPVQDLREVNKRVEDIHPTVPNPYNLLSTLPPSHPWYTVLDLKDAFFCLRLHSESQLLFAFEWRDPEIGLSGQLTWTRLPQGFKNSPTLFNEALHSDLADFRVRYPALVLLQYVDDLLLAAATRTECLEGTKALLETLGNKGYRASAKKAQICLQEVTYLGYSLKDGQRWLTKARKEAILSIPVPKNSRQVREFLGTAGYCRLWIPGFAELAAPLYPLTRPGTLFQWGTEQQLAFEDIKKALLSSPALGLPDITKPFELFIDENSGFAKGVLVQKLGPWKRPVAYLSKKLDTVASGWPPCLRMVAAIAILVKDAGKLTLGQPLTILTSHPVEALVRQPPNKWLSNARMTHYQAMLLDAERVHFGPTVSLNPATLLPLPSGGNHHDCLQILAETHGTRPDLTDQPLPDADLTWYTDGSSFIRNGEREAGAAVTTESEVIWAAPLPPGTSAQRAELIALTQALKMAEGKKLTVYTDSRYAFATTHVHGEIYRRRGWLTSEGKEIKNKNEILALLEALFLPKRLSIIHCPGHQKGDSPQAKGNRLADDTAKKAATETHSSLTVLPAGKRTADGSEFEKRTADGSEFESPKKKAKVE

SEQ ID NO: 1174 - protein, 2099 aa, synthetic construct
MPAAKRVKLDGGDKKYSIGLDIGTNSVGWAVITDEYKVPSKKFKVLGNTDRHSIKKNLIGALLFDSGETAEATRLKRTARRRYTRRKNRICYLQEIFSNEMAKVDDSFFHRLEESFLVEEDKKHERHPIFGNIVDEVAYHEKYPTIYHLRKKLVDSTDKADLRLIYLALAHMIKFRGHFLIEGDLNPDNSDVDKLFIQLVQTYNQLFEENPINASGVDAKAILSARLSKSRRLENLIAQLPGEKKNGLFGNLIALSLGLTPNFKSNFDLAEDAKLQLSKDTYDDDLDNLLAQIGDQYADLFLAAKNLSDAILLSDILRVNTEITKAPLSASMIKRYDEHHQDLTLLKALVRQQLPEKYKEIFFDQSKNGYAGYIDGGASQEEFYKFIKPILEKMDGTEELLVKLNREDLLRKQRTFDNGSIPHQIHLGELHAILRRQEDFYPFLKDNREKIEKILTFRIPYYVGPLARGNSRFAWMTRKSEETITPWNFEEVVDKGASAQSFIERMTNFDKNLPNEKVLPKHSLLYEYFTVYNELTKVKYVTEGMRKPAFLSGEQKKAIVDLLFKTNRKVTVKQLKEDYFKKIECFDSVEISGVEDRFNASLGTYHDLLKIIKDKDFLDNEENEDILEDIVLTLTLFEDREMIEERLKTYAHLFDDKVMKQLKRRRYTGWGRLSRKLINGIRDKQSGKTILDFLKSDGFANRNFMQLIHDDSLTFKEDIQKAQVSGQGDSLHEHIANLAGSPAIKKGILQTVKVVDELVKVMGRHKPENIVIEMARENQTTQKGQKNSRERMKRIEEGIKELGSQILKEHPVENTQLQNEKLYLYYLQNGRDMYVDQELDINRLSDYDVDHIVPQSFLKDDSIDNKVLTRSDKARGKSDNVPSEEVVKKMKNYWRQLLNAKLITQRKFDNLTKAERGGLSELDKAGFIKRQLVETRQITKHVAQILDSRMNTKYDENDKLIREVKVITLKSKLVSDFRKDFQFYKVREINNYHHAHDAYLNAVVGTALIKKYPKLESEFVYGDYKVYDVRKMIAKSEQEIGKATAKYFFYSNIMNFFKTEITLANGEIRKRPLIETNGETGEIVWDKGRDFATVRKVLSMPQVNIVKKTEVQTGGFSKESILPKRNSDKLIARKKDWDPKKYGGFDSPTVAYSVLVVAKVEKGKSKKLKSVKELLGITIMERSSFEKNPIDFLEAKGYKEVKKDLIIKLPKYSLFELENGRKRMLASAGELQKGNELALPSKYVNFLYLASHYEKLKGSPEDNEQKQLFVEQHKHYLDEIIEQISEFSKRVILADANLDKVLSAYNKHRDKPIREQAENIIHLFTLTNLGAPAAFKYFDTTIDRKRYTSTKEVLDATLIHQSITGLYETRIDLSQLGGDGGGGGGSGGGGSGGGGSGGTLQLEEEYRLFEPESTQKQEMDIWLKNFPQAWAETGGMGTAHCQAPVLIQLKATATPISIRQYPMPHEAYQGIKPHIRRMLDQGILKPCQSPWNTPLLPVKKPGTEDYRPVQDLREVNKRVEDIHPTVPNPYNLLSTLPPSHPWYTVLDLKDAFFCLRLHSESQLLFAFEWRDPEIGLSGQLTWTRLPQGFKNSPTLFNEALHSDLADFRVRYPALVLLQYVDDLLLAAATRTECLEGTKALLETLGNKGYRASAKKAQICLQEVTYLGYSLKDGQRWLTKARKEAILSIPVPKNSRQVREFLGTAGYCRLWIPGFAELAAPLYPLTRPGTLFQWGTEQQLAFEDIKKALLSSPALGLPDITKPFELFIDENSGFAKGVLVQKLGPWKRPVAYLSKKLDTVASGWPPCLRMVAAIAILVKDAGKLTLGQPLTILTSHPVEALVRQPPNKWLSNARMTHYQAMLLDAERVHFGPTVSLNPATLLPLPSGGNHHDCLQILAETHGTRPDLTDQPLPDADLTWYTDGSSFIRNGEREAGAAVTTESEVIWAAPLPPGTSAQRAELIALTQALKMAEGKKLTVYTDSRYAFATTHVHGEIYRRRGWLTSEGKEIKNKNEILALLEALFLPKRLSIIHCPGHQKGDSPQAKGNRLADDTAKKAATETHSSLTVLPAGKRTADGSEFEKRTADGSEFESPKKKAKVE

SEQ ID NO: 1175 - protein, 2109 aa, synthetic construct
MPAAKRVKLDGGDKKYSIGLDIGTNSVGWAVITDEYKVPSKKFKVLGNTDRHSIKKNLIGALLFDSGETAEATRLKRTARRRYTRRKNRICYLQEIFSNEMAKVDDSFFHRLEESFLVEEDKKHERHPIFGNIVDEVAYHEKYPTIYHLRKKLVDSTDKADLRLIYLALAHMIKFRGHFLIEGDLNPDNSDVDKLFIQLVQTYNQLFEENPINASGVDAKAILSARLSKSRRLENLIAQLPGEKKNGLFGNLIALSLGLTPNFKSNFDLAEDAKLQLSKDTYDDDLDNLLAQIGDQYADLFLAAKNLSDAILLSDILRVNTEITKAPLSASMIKRYDEHHQDLTLLKALVRQQLPEKYKEIFFDQSKNGYAGYIDGGASQEEFYKFIKPILEKMDGTEELLVKLNREDLLRKQRTFDNGSIPHQIHLGELHAILRRQEDFYPFLKDNREKIEKILTFRIPYYVGPLARGNSRFAWMTRKSEETITPWNFEEVVDKGASAQSFIERMTNFDKNLPNEKVLPKHSLLYEYFTVYNELTKVKYVTEGMRKPAFLSGEQKKAIVDLLFKTNRKVTVKQLKEDYFKKIECFDSVEISGVEDRFNASLGTYHDLLKIIKDKDFLDNEENEDILEDIVLTLTLFEDREMIEERLKTYAHLFDDKVMKQLKRRRYTGWGRLSRKLINGIRDKQSGKTILDFLKSDGFANRNFMQLIHDDSLTFKEDIQKAQVSGQGDSLHEHIANLAGSPAIKKGILQTVKVVDELVKVMGRHKPENIVIEMARENQTTQKGQKNSRERMKRIEEGIKELGSQILKEHPVENTQLQNEKLYLYYLQNGRDMYVDQELDINRLSDYDVDHIVPQSFLKDDSIDNKVLTRSDKARGKSDNVPSEEVVKKMKNYWRQLLNAKLITQRKFDNLTKAERGGLSELDKAGFIKRQLVETRQITKHVAQILDSRMNTKYDENDKLIREVKVITLKSKLVSDFRKDFQFYKVREINNYHHAHDAYLNAVVGTALIKKYPKLESEFVYGDYKVYDVRKMIAKSEQEIGKATAKYFFYSNIMNFFKTEITLANGEIRKRPLIETNGETGEIVWDKGRDFATVRKVLSMPQVNIVKKTEVQTGGFSKESILPKRNSDKLIARKKDWDPKKYGGFDSPTVAYSVLVVAKVEKGKSKKLKSVKELLGITIMERSSFEKNPIDFLEAKGYKEVKKDLIIKLPKYSLFELENGRKRMLASAGELQKGNELALPSKYVNFLYLASHYEKLKGSPEDNEQKQLFVEQHKHYLDEIIEQISEFSKRVILADANLDKVLSAYNKHRDKPIREQAENIIHLFTLTNLGAPAAFKYFDTTIDRKRYTSTKEVLDATLIHQSITGLYETRIDLSQLGGDGGEAAAKEAAAKEAAAKEAAAKEAAAKGGTLQLEEEYRLFEPESTQKQEMDIWLKNFPQAWAETGGMGTAHCQAPVLIQLKATATPISIRQYPMPHEAYQGIKPHIRRMLDQGILKPCQSPWNTPLLPVKKPGTEDYRPVQDLREVNKRVEDIHPTVPNPYNLLSTLPPSHPWYTVLDLKDAFFCLRLHSESQLLFAFEWRDPEIGLSGQLTWTRLPQGFKNSPTLFNEALHSDLADFRVRYPALVLLQYVDDLLLAAATRTECLEGTKALLETLGNKGYRASAKKAQICLQEVTYLGYSLKDGQRWLTKARKEAILSIPVPKNSRQVREFLGTAGYCRLWIPGFAELAAPLYPLTRPGTLFQWGTEQQLAFEDIKKALLSSPALGLPDITKPFELFIDENSGFAKGVLVQKLGPWKRPVAYLSKKLDTVASGWPPCLRMVAAIAILVKDAGKLTLGQPLTILTSHPVEALVRQPPNKWLSNARMTHYQAMLLDAERVHFGPTVSLNPATLLPLPSGGNHHDCLQILAETHGTRPDLTDQPLPDADLTWYTDGSSFIRNGEREAGAAVTTESEVIWAAPLPPGTSAQRAELIALTQALKMAEGKKLTVYTDSRYAFATTHVHGEIYRRRGWLTSEGKEIKNKNEILALLEALFLPKRLSIIHCPGHQKGDSPQAKGNRLADDTAKKAATETHSSLTVLPAGKRTADGSEFEKRTADGSEFESPKKKAKVE

SEQ ID NO: 1176 - protein, 2095 aa, synthetic construct
MPAAKRVKLDGGDKKYSIGLDIGTNSVGWAVITDEYKVPSKKFKVLGNTDRHSIKKNLIGALLFDSGETAEATRLKRTARRRYTRRKNRICYLQEIFSNEMAKVDDSFFHRLEESFLVEEDKKHERHPIFGNIVDEVAYHEKYPTIYHLRKKLVDSTDKADLRLIYLALAHMIKFRGHFLIEGDLNPDNSDVDKLFIQLVQTYNQLFEENPINASGVDAKAILSARLSKSRRLENLIAQLPGEKKNGLFGNLIALSLGLTPNFKSNFDLAEDAKLQLSKDTYDDDLDNLLAQIGDQYADLFLAAKNLSDAILLSDILRVNTEITKAPLSASMIKRYDEHHQDLTLLKALVRQQLPEKYKEIFFDQSKNGYAGYIDGGASQEEFYKFIKPILEKMDGTEELLVKLNREDLLRKQRTFDNGSIPHQIHLGELHAILRRQEDFYPFLKDNREKIEKILTFRIPYYVGPLARGNSRFAWMTRKSEETITPWNFEEVVDKGASAQSFIERMTNFDKNLPNEKVLPKHSLLYEYFTVYNELTKVKYVTEGMRKPAFLSGEQKKAIVDLLFKTNRKVTVKQLKEDYFKKIECFDSVEISGVEDRFNASLGTYHDLLKIIKDKDFLDNEENEDILEDIVLTLTLFEDREMIEERLKTYAHLFDDKVMKQLKRRRYTGWGRLSRKLINGIRDKQSGKTILDFLKSDGFANRNFMQLIHDDSLTFKEDIQKAQVSGQGDSLHEHIANLAGSPAIKKGILQTVKVVDELVKVMGRHKPENIVIEMARENQTTQKGQKNSRERMKRIEEGIKELGSQILKEHPVENTQLQNEKLYLYYLQNGRDMYVDQELDINRLSDYDVDHIVPQSFLKDDSIDNKVLTRSDKARGKSDNVPSEEVVKKMKNYWRQLLNAKLITQRKFDNLTKAERGGLSELDKAGFIKRQLVETRQITKHVAQILDSRMNTKYDENDKLIREVKVITLKSKLVSDFRKDFQFYKVREINNYHHAHDAYLNAVVGTALIKKYPKLESEFVYGDYKVYDVRKMIAKSEQEIGKATAKYFFYSNIMNFFKTEITLANGEIRKRPLIETNGETGEIVWDKGRDFATVRKVLSMPQVNIVKKTEVQTGGFSKESILPKRNSDKLIARKKDWDPKKYGGFDSPTVAYSVLVVAKVEKGKSKKLKSVKELLGITIMERSSFEKNPIDFLEAKGYKEVKKDLIIKLPKYSLFELENGRKRMLASAGELQKGNELALPSKYVNFLYLASHYEKLKGSPEDNEQKQLFVEQHKHYLDEIIEQISEFSKRVILADANLDKVLSAYNKHRDKPIREQAENIIHLFTLTNLGAPAAFKYFDTTIDRKRYTSTKEVLDATLIHQSITGLYETRIDLSQLGGDGGGGSPAPEAAAKGGTLQLEEEYRLFEPESTQKQEMDIWLKNFPQAWAETGGMGTAHCQAPVLIQLKATATPISIRQYPMPHEAYQGIKPHIRRMLDQGILKPCQSPWNTPLLPVKKPGTEDYRPVQDLREVNKRVEDIHPTVPNPYNLLSTLPPSHPWYTVLDLKDAFFCLRLHSESQLLFAFEWRDPEIGLSGQLTWTRLPQGFKNSPTLFNEALHSDLADFRVRYPALVLLQYVDDLLLAAATRTECLEGTKALLETLGNKGYRASAKKAQICLQEVTYLGYSLKDGQRWLTKARKEAILSIPVPKNSRQVREFLGTAGYCRLWIPGFAELAAPLYPLTRPGTLFQWGTEQQLAFEDIKKALLSSPALGLPDITKPFELFIDENSGFAKGVLVQKLGPWKRPVAYLSKKLDTVASGWPPCLRMVAAIAILVKDAGKLTLGQPLTILTSHPVEALVRQPPNKWLSNARMTHYQAMLLDAERVHFGPTVSLNPATLLPLPSGGNHHDCLQILAETHGTRPDLTDQPLPDADLTWYTDGSSFIRNGEREAGAAVTTESEVIWAAPLPPGTSAQRAELIALTQALKMAEGKKLTVYTDSRYAFATTHVHGEIYRRRGWLTSEGKEIKNKNEILALLEALFLPKRLSIIHCPGHQKGDSPQAKGNRLADDTAKKAATETHSSLTVLPAGKRTADGSEFEKRTADGSEFESPKKKAKVE

SEQ ID NO: 1177 - protein, 2102 aa, synthetic construct
MPAAKRVKLDGGDKKYSIGLDIGTNSVGWAVITDEYKVPSKKFKVLGNTDRHSIKKNLIGALLFDSGETAEATRLKRTARRRYTRRKNRICYLQEIFSNEMAKVDDSFFHRLEESFLVEEDKKHERHPIFGNIVDEVAYHEKYPTIYHLRKKLVDSTDKADLRLIYLALAHMIKFRGHFLIEGDLNPDNSDVDKLFIQLVQTYNQLFEENPINASGVDAKAILSARLSKSRRLENLIAQLPGEKKNGLFGNLIALSLGLTPNFKSNFDLAEDAKLQLSKDTYDDDLDNLLAQIGDQYADLFLAAKNLSDAILLSDILRVNTEITKAPLSASMIKRYDEHHQDLTLLKALVRQQLPEKYKEIFFDQSKNGYAGYIDGGASQEEFYKFIKPILEKMDGTEELLVKLNREDLLRKQRTFDNGSIPHQIHLGELHAILRRQEDFYPFLKDNREKIEKILTFRIPYYVGPLARGNSRFAWMTRKSEETITPWNFEEVVDKGASAQSFIERMTNFDKNLPNEKVLPKHSLLYEYFTVYNELTKVKYVTEGMRKPAFLSGEQKKAIVDLLFKTNRKVTVKQLKEDYFKKIECFDSVEISGVEDRFNASLGTYHDLLKIIKDKDFLDNEENEDILEDIVLTLTLFEDREMIEERLKTYAHLFDDKVMKQLKRRRYTGWGRLSRKLINGIRDKQSGKTILDFLKSDGFANRNFMQLIHDDSLTFKEDIQKAQVSGQGDSLHEHIANLAGSPAIKKGILQTVKVVDELVKVMGRHKPENIVIEMARENQTTQKGQKNSRERMKRIEEGIKELGSQILKEHPVENTQLQNEKLYLYYLQNGRDMYVDQELDINRLSDYDVDHIVPQSFLKDDSIDNKVLTRSDKARGKSDNVPSEEVVKKMKNYWRQLLNAKLITQRKFDNLTKAERGGLSELDKAGFIKRQLVETRQITKHVAQILDSRMNTKYDENDKLIREVKVITLKSKLVSDFRKDFQFYKVREINNYHHAHDAYLNAVVGTALIKKYPKLESEFVYGDYKVYDVRKMIAKSEQEIGKATAKYFFYSNIMNFFKTEITLANGEIRKRPLIETNGETGEIVWDKGRDFATVRKVLSMPQVNIVKKTEVQTGGFSKESILPKRNSDKLIARKKDWDPKKYGGFDSPTVAYSVLVVAKVEKGKSKKLKSVKELLGITIMERSSFEKNPIDFLEAKGYKEVKKDLIIKLPKYSLFELENGRKRMLASAGELQKGNELALPSKYVNFLYLASHYEKLKGSPEDNEQKQLFVEQHKHYLDEIIEQISEFSKRVILADANLDKVLSAYNKHRDKPIREQAENIIHLFTLTNLGAPAAFKYFDTTIDRKRYTSTKEVLDATLIHQSITGLYETRIDLSQLGGDGGGGSGGSGGSGGSGGSGGSGGTLQLEEEYRLFEPESTQKQEMDIWLKNFPQAWAETGGMGTAHCQAPVLIQLKATATPISIRQYPMPHEAYQGIKPHIRRMLDQGILKPCQSPWNTPLLPVKKPGTEDYRPVQDLREVNKRVEDIHPTVPNPYNLLSTLPPSHPWYTVLDLKDAFFCLRLHSESQLLFAFEWRDPEIGLSGQLTWTRLPQGFKNSPTLFNEALHSDLADFRVRYPALVLLQYVDDLLLAAATRTECLEGTKALLETLGNKGYRASAKKAQICLQEVTYLGYSLKDGQRWLTKARKEAILSIPVPKNSRQVREFLGTAGYCRLWIPGFAELAAPLYPLTRPGTLFQWGTEQQLAFEDIKKALLSSPALGLPDITKPFELFIDENSGFAKGVLVQKLGPWKRPVAYLSKKLDTVASGWPPCLRMVAAIAILVKDAGKLTLGQPLTILTSHPVEALVRQPPNKWLSNARMTHYQAMLLDAERVHFGPTVSLNPATLLPLPSGGNHHDCLQILAETHGTRPDLTDQPLPDADLTWYTDGSSFIRNGEREAGAAVTTESEVIWAAPLPPGTSAQRAELIALTQALKMAEGKKLTVYTDSRYAFATTHVHGEIYRRRGWLTSEGKEIKNKNEILALLEALFLPKRLSIIHCPGHQKGDSPQAKGNRLADDTAKKAATETHSSLTVLPAGKRTADGSEFEKRTADGSEFESPKKKAKVE

SEQ ID NO: 1178 - protein, 2095 aa, synthetic construct
MPAAKRVKLDGGDKKYSIGLDIGTNSVGWAVITDEYKVPSKKFKVLGNTDRHSIKKNLIGALLFDSGETAEATRLKRTARRRYTRRKNRICYLQEIFSNEMAKVDDSFFHRLEESFLVEEDKKHERHPIFGNIVDEVAYHEKYPTIYHLRKKLVDSTDKADLRLIYLALAHMIKFRGHFLIEGDLNPDNSDVDKLFIQLVQTYNQLFEENPINASGVDAKAILSARLSKSRRLENLIAQLPGEKKNGLFGNLIALSLGLTPNFKSNFDLAEDAKLQLSKDTYDDDLDNLLAQIGDQYADLFLAAKNLSDAILLSDILRVNTEITKAPLSASMIKRYDEHHQDLTLLKALVRQQLPEKYKEIFFDQSKNGYAGYIDGGASQEEFYKFIKPILEKMDGTEELLVKLNREDLLRKQRTFDNGSIPHQIHLGELHAILRRQEDFYPFLKDNREKIEKILTFRIPYYVGPLARGNSRFAWMTRKSEETITPWNFEEVVDKGASAQSFIERMTNFDKNLPNEKVLPKHSLLYEYFTVYNELTKVKYVTEGMRKPAFLSGEQKKAIVDLLFKTNRKVTVKQLKEDYFKKIECFDSVEISGVEDRFNASLGTYHDLLKIIKDKDFLDNEENEDILEDIVLTLTLFEDREMIEERLKTYAHLFDDKVMKQLKRRRYTGWGRLSRKLINGIRDKQSGKTILDFLKSDGFANRNFMQLIHDDSLTFKEDIQKAQVSGQGDSLHEHIANLAGSPAIKKGILQTVKVVDELVKVMGRHKPENIVIEMARENQTTQKGQKNSRERMKRIEEGIKELGSQILKEHPVENTQLQNEKLYLYYLQNGRDMYVDQELDINRLSDYDVDHIVPQSFLKDDSIDNKVLTRSDKARGKSDNVPSEEVVKKMKNYWRQLLNAKLITQRKFDNLTKAERGGLSELDKAGFIKRQLVETRQITKHVAQILDSRMNTKYDENDKLIREVKVITLKSKLVSDFRKDFQFYKVREINNYHHAHDAYLNAVVGTALIKKYPKLESEFVYGDYKVYDVRKMIAKSEQEIGKATAKYFFYSNIMNFFKTEITLANGEIRKRPLIETNGETGEIVWDKGRDFATVRKVLSMPQVNIVKKTEVQTGGFSKESILPKRNSDKLIARKKDWDPKKYGGFDSPTVAYSVLVVAKVEKGKSKKLKSVKELLGITIMERSSFEKNPIDFLEAKGYKEVKKDLIIKLPKYSLFELENGRKRMLASAGELQKGNELALPSKYVNFLYLASHYEKLKGSPEDNEQKQLFVEQHKHYLDEIIEQISEFSKRVILADANLDKVLSAYNKHRDKPIREQAENIIHLFTLTNLGAPAAFKYFDTTIDRKRYTSTKEVLDATLIHQSITGLYETRIDLSQLGGDGGEAAAKGGSGSSGGTLQLEEEYRLFEPESTQKQEMDIWLKNFPQAWAETGGMGTAHCQAPVLIQLKATATPISIRQYPMPHEAYQGIKPHIRRMLDQGILKPCQSPWNTPLLPVKKPGTEDYRPVQDLREVNKRVEDIHPTVPNPYNLLSTLPPSHPWYTVLDLKDAFFCLRLHSESQLLFAFEWRDPEIGLSGQLTWTRLPQGFKNSPTLFNEALHSDLADFRVRYPALVLLQYVDDLLLAAATRTECLEGTKALLETLGNKGYRASAKKAQICLQEVTYLGYSLKDGQRWLTKARKEAILSIPVPKNSRQVREFLGTAGYCRLWIPGFAELAAPLYPLTRPGTLFQWGTEQQLAFEDIKKALLSSPALGLPDITKPFELFIDENSGFAKGVLVQKLGPWKRPVAYLSKKLDTVASGWPPCLRMVAAIAILVKDAGKLTLGQPLTILTSHPVEALVRQPPNKWLSNARMTHYQAMLLDAERVHFGPTVSLNPATLLPLPSGGNHHDCLQILAETHGTRPDLTDQPLPDADLTWYTDGSSFIRNGEREAGAAVTTESEVIWAAPLPPGTSAQRAELIALTQALKMAEGKKLTVYTDSRYAFATTHVHGEIYRRRGWLTSEGKEIKNKNEILALLEALFLPKRLSIIHCPGHQKGDSPQAKGNRLADDTAKKAATETHSSLTVLPAGKRTADGSEFEKRTADGSEFESPKKKAKVE

SEQ ID NO: 1179 - protein, 2095 aa, synthetic construct
MPAAKRVKLDGGDKKYSIGLDIGTNSVGWAVITDEYKVPSKKFKVLGNTDRHSIKKNLIGALLFDSGETAEATRLKRTARRRYTRRKNRICYLQEIFSNEMAKVDDSFFHRLEESFLVEEDKKHERHPIFGNIVDEVAYHEKYPTIYHLRKKLVDSTDKADLRLIYLALAHMIKFRGHFLIEGDLNPDNSDVDKLFIQLVQTYNQLFEENPINASGVDAKAILSARLSKSRRLENLIAQLPGEKKNGLFGNLIALSLGLTPNFKSNFDLAEDAKLQLSKDTYDDDLDNLLAQIGDQYADLFLAAKNLSDAILLSDILRVNTEITKAPLSASMIKRYDEHHQDLTLLKALVRQQLPEKYKEIFFDQSKNGYAGYIDGGASQEEFYKFIKPILEKMDGTEELLVKLNREDLLRKQRTFDNGSIPHQIHLGELHAILRRQEDFYPFLKDNREKIEKILTFRIPYYVGPLARGNSRFAWMTRKSEETITPWNFEEVVDKGASAQSFIERMTNFDKNLPNEKVLPKHSLLYEYFTVYNELTKVKYVTEGMRKPAFLSGEQKKAIVDLLFKTNRKVTVKQLKEDYFKKIECFDSVEISGVEDRFNASLGTYHDLLKIIKDKDFLDNEENEDILEDIVLTLTLFEDREMIEERLKTYAHLFDDKVMKQLKRRRYTGWGRLSRKLINGIRDKQSGKTILDFLKSDGFANRNFMQLIHDDSLTFKEDIQKAQVSGQGDSLHEHIANLAGSPAIKKGILQTVKVVDELVKVMGRHKPENIVIEMARENQTTQKGQKNSRERMKRIEEGIKELGSQILKEHPVENTQLQNEKLYLYYLQNGRDMYVDQELDINRLSDYDVDHIVPQSFLKDDSIDNKVLTRSDKARGKSDNVPSEEVVKKMKNYWRQLLNAKLITQRKFDNLTKAERGGLSELDKAGFIKRQLVETRQITKHVAQILDSRMNTKYDENDKLIREVKVITLKSKLVSDFRKDFQFYKVREINNYHHAHDAYLNAVVGTALIKKYPKLESEFVYGDYKVYDVRKMIAKSEQEIGKATAKYFFYSNIMNFFKTEITLANGEIRKRPLIETNGETGEIVWDKGRDFATVRKVLSMPQVNIVKKTEVQTGGFSKESILPKRNSDKLIARKKDWDPKKYGGFDSPTVAYSVLVVAKVEKGKSKKLKSVKELLGITIMERSSFEKNPIDFLEAKGYKEVKKDLIIKLPKYSLFELENGRKRMLASAGELQKGNELALPSKYVNFLYLASHYEKLKGSPEDNEQKQLFVEQHKHYLDEIIEQISEFSKRVILADANLDKVLSAYNKHRDKPIREQAENIIHLFTLTNLGAPAAFKYFDTTIDRKRYTSTKEVLDATLIHQSITGLYETRIDLSQLGGDGGGGGEAAAKPAPGGTLQLEEEYRLFEPESTQKQEMDIWLKNFPQAWAETGGMGTAHCQAPVLIQLKATATPISIRQYPMPHEAYQGIKPHIRRMLDQGILKPCQSPWNTPLLPVKKPGTEDYRPVQDLREVNKRVEDIHPTVPNPYNLLSTLPPSHPWYTVLDLKDAFFCLRLHSESQLLFAFEWRDPEIGLSGQLTWTRLPQGFKNSPTLFNEALHSDLADFRVRYPALVLLQYVDDLLLAAATRTECLEGTKALLETLGNKGYRASAKKAQICLQEVTYLGYSLKDGQRWLTKARKEAILSIPVPKNSRQVREFLGTAGYCRLWIPGFAELAAPLYPLTRPGTLFQWGTEQQLAFEDIKKALLSSPALGLPDITKPFELFIDENSGFAKGVLVQKLGPWKRPVAYLSKKLDTVASGWPPCLRMVAAIAILVKDAGKLTLGQPLTILTSHPVEALVRQPPNKWLSNARMTHYQAMLLDAERVHFGPTVSLNPATLLPLPSGGNHHDCLQILAETHGTRPDLTDQPLPDADLTWYTDGSSFIRNGEREAGAAVTTESEVIWAAPLPPGTSAQRAELIALTQALKMAEGKKLTVYTDSRYAFATTHVHGEIYRRRGWLTSEGKEIKNKNEILALLEALFLPKRLSIIHCPGHQKGDSPQAKGNRLADDTAKKAATETHSSLTVLPAGKRTADGSEFEKRTADGSEFESPKKKAKVE

SEQ ID NO: 1180 - protein, 2094 aa, synthetic construct
MPAAKRVKLDGGDKKYSIGLDIGTNSVGWAVITDEYKVPSKKFKVLGNTDRHSIKKNLIGALLFDSGETAEATRLKRTARRRYTRRKNRICYLQEIFSNEMAKVDDSFFHRLEESFLVEEDKKHERHPIFGNIVDEVAYHEKYPTIYHLRKKLVDSTDKADLRLIYLALAHMIKFRGHFLIEGDLNPDNSDVDKLFIQLVQTYNQLFEENPINASGVDAKAILSARLSKSRRLENLIAQLPGEKKNGLFGNLIALSLGLTPNFKSNFDLAEDAKLQLSKDTYDDDLDNLLAQIGDQYADLFLAAKNLSDAILLSDILRVNTEITKAPLSASMIKRYDEHHQDLTLLKALVRQQLPEKYKEIFFDQSKNGYAGYIDGGASQEEFYKFIKPILEKMDGTEELLVKLNREDLLRKQRTFDNGSIPHQIHLGELHAILRRQEDFYPFLKDNREKIEKILTFRIPYYVGPLARGNSRFAWMTRKSEETITPWNFEEVVDKGASAQSFIERMTNFDKNLPNEKVLPKHSLLYEYFTVYNELTKVKYVTEGMRKPAFLSGEQKKAIVDLLFKTNRKVTVKQLKEDYFKKIECFDSVEISGVEDRFNASLGTYHDLLKIIKDKDFLDNEENEDILEDIVLTLTLFEDREMIEERLKTYAHLFDDKVMKQLKRRRYTGWGRLSRKLINGIRDKQSGKTILDFLKSDGFANRNFMQLIHDDSLTFKEDIQKAQVSGQGDSLHEHIANLAGSPAIKKGILQTVKVVDELVKVMGRHKPENIVIEMARENQTTQKGQKNSRERMKRIEEGIKELGSQILKEHPVENTQLQNEKLYLYYLQNGRDMYVDQELDINRLSDYDVDHIVPQSFLKDDSIDNKVLTRSDKARGKSDNVPSEEVVKKMKNYWRQLLNAKLITQRKFDNLTKAERGGLSELDKAGFIKRQLVETRQITKHVAQILDSRMNTKYDENDKLIREVKVITLKSKLVSDFRKDFQFYKVREINNYHHAHDAYLNAVVGTALIKKYPKLESEFVYGDYKVYDVRKMIAKSEQEIGKATAKYFFYSNIMNFFKTEITLANGEIRKRPLIETNGETGEIVWDKGRDFATVRKVLSMPQVNIVKKTEVQTGGFSKESILPKRNSDKLIARKKDWDPKKYGGFDSPTVAYSVLVVAKVEKGKSKKLKSVKELLGITIMERSSFEKNPIDFLEAKGYKEVKKDLIIKLPKYSLFELENGRKRMLASAGELQKGNELALPSKYVNFLYLASHYEKLKGSPEDNEQKQLFVEQHKHYLDEIIEQISEFSKRVILADANLDKVLSAYNKHRDKPIREQAENIIHLFTLTNLGAPAAFKYFDTTIDRKRYTSTKEVLDATLIHQSITGLYETRIDLSQLGGDGGGGGGSGGGGSGGTLQLEEEYRLFEPESTQKQEMDIWLKNFPQAWAETGGMGTAHCQAPVLIQLKATATPISIRQYPMPHEAYQGIKPHIRRMLDQGILKPCQSPWNTPLLPVKKPGTEDYRPVQDLREVNKRVEDIHPTVPNPYNLLSTLPPSHPWYTVLDLKDAFFCLRLHSESQLLFAFEWRDPEIGLSGQLTWTRLPQGFKNSPTLFNEALHSDLADFRVRYPALVLLQYVDDLLLAAATRTECLEGTKALLETLGNKGYRASAKKAQICLQEVTYLGYSLKDGQRWLTKARKEAILSIPVPKNSRQVREFLGTAGYCRLWIPGFAELAAPLYPLTRPGTLFQWGTEQQLAFEDIKKALLSSPALGLPDITKPFELFIDENSGFAKGVLVQKLGPWKRPVAYLSKKLDTVASGWPPCLRMVAAIAILVKDAGKLTLGQPLTILTSHPVEALVRQPPNKWLSNARMTHYQAMLLDAERVHFGPTVSLNPATLLPLPSGGNHHDCLQILAETHGTRPDLTDQPLPDADLTWYTDGSSFIRNGEREAGAAVTTESEVIWAAPLPPGTSAQRAELIALTQALKMAEGKKLTVYTDSRYAFATTHVHGEIYRRRGWLTSEGKEIKNKNEILALLEALFLPKRLSIIHCPGHQKGDSPQAKGNRLADDTAKKAATETHSSLTVLPAGKRTADGSEFEKRTADGSEFESPKKKAKVE

SEQ ID NO: 1181 - protein, 2091 aa, synthetic construct
MPAAKRVKLDGGDKKYSIGLDIGTNSVGWAVITDEYKVPSKKFKVLGNTDRHSIKKNLIGALLFDSGETAEATRLKRTARRRYTRRKNRICYLQEIFSNEMAKVDDSFFHRLEESFLVEEDKKHERHPIFGNIVDEVAYHEKYPTIYHLRKKLVDSTDKADLRLIYLALAHMIKFRGHFLIEGDLNPDNSDVDKLFIQLVQTYNQLFEENPINASGVDAKAILSARLSKSRRLENLIAQLPGEKKNGLFGNLIALSLGLTPNFKSNFDLAEDAKLQLSKDTYDDDLDNLLAQIGDQYADLFLAAKNLSDAILLSDILRVNTEITKAPLSASMIKRYDEHHQDLTLLKALVRQQLPEKYKEIFFDQSKNGYAGYIDGGASQEEFYKFIKPILEKMDGTEELLVKLNREDLLRKQRTFDNGSIPHQIHLGELHAILRRQEDFYPFLKDNREKIEKILTFRIPYYVGPLARGNSRFAWMTRKSEETITPWNFEEVVDKGASAQSFIERMTNFDKNLPNEKVLPKHSLLYEYFTVYNELTKVKYVTEGMRKPAFLSGEQKKAIVDLLFKTNRKVTVKQLKEDYFKKIECFDSVEISGVEDRFNASLGTYHDLLKIIKDKDFLDNEENEDILEDIVLTLTLFEDREMIEERLKTYAHLFDDKVMKQLKRRRYTGWGRLSRKLINGIRDKQSGKTILDFLKSDGFANRNFMQLIHDDSLTFKEDIQKAQVSGQGDSLHEHIANLAGSPAIKKGILQTVKVVDELVKVMGRHKPENIVIEMARENQTTQKGQKNSRERMKRIEEGIKELGSQILKEHPVENTQLQNEKLYLYYLQNGRDMYVDQELDINRLSDYDVDHIVPQSFLKDDSIDNKVLTRSDKARGKSDNVPSEEVVKKMKNYWRQLLNAKLITQRKFDNLTKAERGGLSELDKAGFIKRQLVETRQITKHVAQILDSRMNTKYDENDKLIREVKVITLKSKLVSDFRKDFQFYKVREINNYHHAHDAYLNAVVGTALIKKYPKLESEFVYGDYKVYDVRKMIAKSEQEIGKATAKYFFYSNIMNFFKTEITLANGEIRKRPLIETNGETGEIVWDKGRDFATVRKVLSMPQVNIVKKTEVQTGGFSKESILPKRNSDKLIARKKDWDPKKYGGFDSPTVAYSVLVVAKVEKGKSKKLKSVKELLGITIMERSSFEKNPIDFLEAKGYKEVKKDLIIKLPKYSLFELENGRKRMLASAGELQKGNELALPSKYVNFLYLASHYEKLKGSPEDNEQKQLFVEQHKHYLDEIIEQISEFSKRVILADANLDKVLSAYNKHRDKPIREQAENIIHLFTLTNLGAPAAFKYFDTTIDRKRYTSTKEVLDATLIHQSITGLYETRIDLSQLGGDGGGGGGGGGGGTLQLEEEYRLFEPESTQKQEMDIWLKNFPQAWAETGGMGTAHCQAPVLIQLKATATPISIRQYPMPHEAYQGIKPHIRRMLDQGILKPCQSPWNTPLLPVKKPGTEDYRPVQDLREVNKRVEDIHPTVPNPYNLLSTLPPSHPWYTVLDLKDAFFCLRLHSESQLLFAFEWRDPEIGLSGQLTWTRLPQGFKNSPTLFNEALHSDLADFRVRYPALVLLQYVDDLLLAAATRTECLEGTKALLETLGNKGYRASAKKAQICLQEVTYLGYSLKDGQRWLTKARKEAILSIPVPKNSRQVREFLGTAGYCRLWIPGFAELAAPLYPLTRPGTLFQWGTEQQLAFEDIKKALLSSPALGLPDITKPFELFIDENSGFAKGVLVQKLGPWKRPVAYLSKKLDTVASGWPPCLRMVAAIAILVKDAGKLTLGQPLTILTSHPVEALVRQPPNKWLSNARMTHYQAMLLDAERVHFGPTVSLNPATLLPLPSGGNHHDCLQILAETHGTRPDLTDQPLPDADLTWYTDGSSFIRNGEREAGAAVTTESEVIWAAPLPPGTSAQRAELIALTQALKMAEGKKLTVYTDSRYAFATTHVHGEIYRRRGWLTSEGKEIKNKNEILALLEALFLPKRLSIIHCPGHQKGDSPQAKGNRLADDTAKKAATETHSSLTVLPAGKRTADGSEFEKRTADGSEFESPKKKAKVE

SEQ ID NO: 1182 - protein, 2093 aa, synthetic construct
MPAAKRVKLDGGDKKYSIGLDIGTNSVGWAVITDEYKVPSKKFKVLGNTDRHSIKKNLIGALLFDSGETAEATRLKRTARRRYTRRKNRICYLQEIFSNEMAKVDDSFFHRLEESFLVEEDKKHERHPIFGNIVDEVAYHEKYPTIYHLRKKLVDSTDKADLRLIYLALAHMIKFRGHFLIEGDLNPDNSDVDKLFIQLVQTYNQLFEENPINASGVDAKAILSARLSKSRRLENLIAQLPGEKKNGLFGNLIALSLGLTPNFKSNFDLAEDAKLQLSKDTYDDDLDNLLAQIGDQYADLFLAAKNLSDAILLSDILRVNTEITKAPLSASMIKRYDEHHQDLTLLKALVRQQLPEKYKEIFFDQSKNGYAGYIDGGASQEEFYKFIKPILEKMDGTEELLVKLNREDLLRKQRTFDNGSIPHQIHLGELHAILRRQEDFYPFLKDNREKIEKILTFRIPYYVGPLARGNSRFAWMTRKSEETITPWNFEEVVDKGASAQSFIERMTNFDKNLPNEKVLPKHSLLYEYFTVYNELTKVKYVTEGMRKPAFLSGEQKKAIVDLLFKTNRKVTVKQLKEDYFKKIECFDSVEISGVEDRFNASLGTYHDLLKIIKDKDFLDNEENEDILEDIVLTLTLFEDREMIEERLKTYAHLFDDKVMKQLKRRRYTGWGRLSRKLINGIRDKQSGKTILDFLKSDGFANRNFMQLIHDDSLTFKEDIQKAQVSGQGDSLHEHIANLAGSPAIKKGILQTVKVVDELVKVMGRHKPENIVIEMARENQTTQKGQKNSRERMKRIEEGIKELGSQILKEHPVENTQLQNEKLYLYYLQNGRDMYVDQELDINRLSDYDVDHIVPQSFLKDDSIDNKVLTRSDKARGKSDNVPSEEVVKKMKNYWRQLLNAKLITQRKFDNLTKAERGGLSELDKAGFIKRQLVETRQITKHVAQILDSRMNTKYDENDKLIREVKVITLKSKLVSDFRKDFQFYKVREINNYHHAHDAYLNAVVGTALIKKYPKLESEFVYGDYKVYDVRKMIAKSEQEIGKATAKYFFYSNIMNFFKTEITLANGEIRKRPLIETNGETGEIVWDKGRDFATVRKVLSMPQVNIVKKTEVQTGGFSKESILPKRNSDKLIARKKDWDPKKYGGFDSPTVAYSVLVVAKVEKGKSKKLKSVKELLGITIMERSSFEKNPIDFLEAKGYKEVKKDLIIKLPKYSLFELENGRKRMLASAGELQKGNELALPSKYVNFLYLASHYEKLKGSPEDNEQKQLFVEQHKHYLDEIIEQISEFSKRVILADANLDKVLSAYNKHRDKPIREQAENIIHLFTLTNLGAPAAFKYFDTTIDRKRYTSTKEVLDATLIHQSITGLYETRIDLSQLGGDGGGGGPAPGGSGGTLQLEEEYRLFEPESTQKQEMDIWLKNFPQAWAETGGMGTAHCQAPVLIQLKATATPISIRQYPMPHEAYQGIKPHIRRMLDQGILKPCQSPWNTPLLPVKKPGTEDYRPVQDLREVNKRVEDIHPTVPNPYNLLSTLPPSHPWYTVLDLKDAFFCLRLHSESQLLFAFEWRDPEIGLSGQLTWTRLPQGFKNSPTLFNEALHSDLADFRVRYPALVLLQYVDDLLLAAATRTECLEGTKALLETLGNKGYRASAKKAQICLQEVTYLGYSLKDGQRWLTKARKEAILSIPVPKNSRQVREFLGTAGYCRLWIPGFAELAAPLYPLTRPGTLFQWGTEQQLAFEDIKKALLSSPALGLPDITKPFELFIDENSGFAKGVLVQKLGPWKRPVAYLSKKLDTVASGWPPCLRMVAAIAILVKDAGKLTLGQPLTILTSHPVEALVRQPPNKWLSNARMTHYQAMLLDAERVHFGPTVSLNPATLLPLPSGGNHHDCLQILAETHGTRPDLTDQPLPDADLTWYTDGSSFIRNGEREAGAAVTTESEVIWAAPLPPGTSAQRAELIALTQALKMAEGKKLTVYTDSRYAFATTHVHGEIYRRRGWLTSEGKEIKNKNEILALLEALFLPKRLSIIHCPGHQKGDSPQAKGNRLADDTAKKAATETHSSLTVLPAGKRTADGSEFEKRTADGSEFESPKKKAKVE

SEQ ID NO: 1183 - protein, 2089 aa, synthetic construct
MPAAKRVKLDGGDKKYSIGLDIGTNSVGWAVITDEYKVPSKKFKVLGNTDRHSIKKNLIGALLFDSGETAEATRLKRTARRRYTRRKNRICYLQEIFSNEMAKVDDSFFHRLEESFLVEEDKKHERHPIFGNIVDEVAYHEKYPTIYHLRKKLVDSTDKADLRLIYLALAHMIKFRGHFLIEGDLNPDNSDVDKLFIQLVQTYNQLFEENPINASGVDAKAILSARLSKSRRLENLIAQLPGEKKNGLFGNLIALSLGLTPNFKSNFDLAEDAKLQLSKDTYDDDLDNLLAQIGDQYADLFLAAKNLSDAILLSDILRVNTEITKAPLSASMIKRYDEHHQDLTLLKALVRQQLPEKYKEIFFDQSKNGYAGYIDGGASQEEFYKFIKPILEKMDGTEELLVKLNREDLLRKQRTFDNGSIPHQIHLGELHAILRRQEDFYPFLKDNREKIEKILTFRIPYYVGPLARGNSRFAWMTRKSEETITPWNFEEVVDKGASAQSFIERMTNFDKNLPNEKVLPKHSLLYEYFTVYNELTKVKYVTEGMRKPAFLSGEQKKAIVDLLFKTNRKVTVKQLKEDYFKKIECFDSVEISGVEDRFNASLGTYHDLLKIIKDKDFLDNEENEDILEDIVLTLTLFEDREMIEERLKTYAHLFDDKVMKQLKRRRYTGWGRLSRKLINGIRDKQSGKTILDFLKSDGFANRNFMQLIHDDSLTFKEDIQKAQVSGQGDSLHEHIANLAGSPAIKKGILQTVKVVDELVKVMGRHKPENIVIEMARENQTTQKGQKNSRERMKRIEEGIKELGSQILKEHPVENTQLQNEKLYLYYLQNGRDMYVDQELDINRLSDYDVDHIVPQSFLKDDSIDNKVLTRSDKARGKSDNVPSEEVVKKMKNYWRQLLNAKLITQRKFDNLTKAERGGLSELDKAGFIKRQLVETRQITKHVAQILDSRMNTKYDENDKLIREVKVITLKSKLVSDFRKDFQFYKVREINNYHHAHDAYLNAVVGTALIKKYPKLESEFVYGDYKVYDVRKMIAKSEQEIGKATAKYFFYSNIMNFFKTEITLANGEIRKRPLIETNGETGEIVWDKGRDFATVRKVLSMPQVNIVKKTEVQTGGFSKESILPKRNSDKLIARKKDWDPKKYGGFDSPTVAYSVLVVAKVEKGKSKKLKSVKELLGITIMERSSFEKNPIDFLEAKGYKEVKKDLIIKLPKYSLFELENGRKRMLASAGELQKGNELALPSKYVNFLYLASHYEKLKGSPEDNEQKQLFVEQHKHYLDEIIEQISEFSKRVILADANLDKVLSAYNKHRDKPIREQAENIIHLFTLTNLGAPAAFKYFDTTIDRKRYTSTKEVLDATLIHQSITGLYETRIDLSQLGGDGGEAAAKGGTLQLEEEYRLFEPESTQKQEMDIWLKNFPQAWAETGGMGTAHCQAPVLIQLKATATPISIRQYPMPHEAYQGIKPHIRRMLDQGILKPCQSPWNTPLLPVKKPGTEDYRPVQDLREVNKRVEDIHPTVPNPYNLLSTLPPSHPWYTVLDLKDAFFCLRLHSESQLLFAFEWRDPEIGLSGQLTWTRLPQGFKNSPTLFNEALHSDLADFRVRYPALVLLQYVDDLLLAAATRTECLEGTKALLETLGNKGYRASAKKAQICLQEVTYLGYSLKDGQRWLTKARKEAILSIPVPKNSRQVREFLGTAGYCRLWIPGFAELAAPLYPLTRPGTLFQWGTEQQLAFEDIKKALLSSPALGLPDITKPFELFIDENSGFAKGVLVQKLGPWKRPVAYLSKKLDTVASGWPPCLRMVAAIAILVKDAGKLTLGQPLTILTSHPVEALVRQPPNKWLSNARMTHYQAMLLDAERVHFGPTVSLNPATLLPLPSGGNHHDCLQILAETHGTRPDLTDQPLPDADLTWYTDGSSFIRNGEREAGAAVTTESEVIWAAPLPPGTSAQRAELIALTQALKMAEGKKLTVYTDSRYAFATTHVHGEIYRRRGWLTSEGKEIKNKNEILALLEALFLPKRLSIIHCPGHQKGDSPQAKGNRLADDTAKKAATETHSSLTVLPAGKRTADGSEFEKRTADGSEFESPKKKAKVE

SEQ ID NO: 1184 - protein, 2090 aa, synthetic construct
MPAAKRVKLDGGDKKYSIGLDIGTNSVGWAVITDEYKVPSKKFKVLGNTDRHSIKKNLIGALLFDSGETAEATRLKRTARRRYTRRKNRICYLQEIFSNEMAKVDDSFFHRLEESFLVEEDKKHERHPIFGNIVDEVAYHEKYPTIYHLRKKLVDSTDKADLRLIYLALAHMIKFRGHFLIEGDLNPDNSDVDKLFIQLVQTYNQLFEENPINASGVDAKAILSARLSKSRRLENLIAQLPGEKKNGLFGNLIALSLGLTPNFKSNFDLAEDAKLQLSKDTYDDDLDNLLAQIGDQYADLFLAAKNLSDAILLSDILRVNTEITKAPLSASMIKRYDEHHQDLTLLKALVRQQLPEKYKEIFFDQSKNGYAGYIDGGASQEEFYKFIKPILEKMDGTEELLVKLNREDLLRKQRTFDNGSIPHQIHLGELHAILRRQEDFYPFLKDNREKIEKILTFRIPYYVGPLARGNSRFAWMTRKSEETITPWNFEEVVDKGASAQSFIERMTNFDKNLPNEKVLPKHSLLYEYFTVYNELTKVKYVTEGMRKPAFLSGEQKKAIVDLLFKTNRKVTVKQLKEDYFKKIECFDSVEISGVEDRFNASLGTYHDLLKIIKDKDFLDNEENEDILEDIVLTLTLFEDREMIEERLKTYAHLFDDKVMKQLKRRRYTGWGRLSRKLINGIRDKQSGKTILDFLKSDGFANRNFMQLIHDDSLTFKEDIQKAQVSGQGDSLHEHIANLAGSPAIKKGILQTVKVVDELVKVMGRHKPENIVIEMARENQTTQKGQKNSRERMKRIEEGIKELGSQILKEHPVENTQLQNEKLYLYYLQNGRDMYVDQELDINRLSDYDVDHIVPQSFLKDDSIDNKVLTRSDKARGKSDNVPSEEVVKKMKNYWRQLLNAKLITQRKFDNLTKAERGGLSELDKAGFIKRQLVETRQITKHVAQILDSRMNTKYDENDKLIREVKVITLKSKLVSDFRKDFQFYKVREINNYHHAHDAYLNAVVGTALIKKYPKLESEFVYGDYKVYDVRKMIAKSEQEIGKATAKYFFYSNIMNFFKTEITLANGEIRKRPLIETNGETGEIVWDKGRDFATVRKVLSMPQVNIVKKTEVQTGGFSKESILPKRNSDKLIARKKDWDPKKYGGFDSPTVAYSVLVVAKVEKGKSKKLKSVKELLGITIMERSSFEKNPIDFLEAKGYKEVKKDLIIKLPKYSLFELENGRKRMLASAGELQKGNELALPSKYVNFLYLASHYEKLKGSPEDNEQKQLFVEQHKHYLDEIIEQISEFSKRVILADANLDKVLSAYNKHRDKPIREQAENIIHLFTLTNLGAPAAFKYFDTTIDRKRYTSTKEVLDATLIHQSITGLYETRIDLSQLGGDGGGGSGGGGGTLQLEEEYRLFEPESTQKQEMDIWLKNFPQAWAETGGMGTAHCQAPVLIQLKATATPISIRQYPMPHEAYQGIKPHIRRMLDQGILKPCQSPWNTPLLPVKKPGTEDYRPVQDLREVNKRVEDIHPTVPNPYNLLSTLPPSHPWYTVLDLKDAFFCLRLHSESQLLFAFEWRDPEIGLSGQLTWTRLPQGFKNSPTLFNEALHSDLADFRVRYPALVLLQYVDDLLLAAATRTECLEGTKALLETLGNKGYRASAKKAQICLQEVTYLGYSLKDGQRWLTKARKEAILSIPVPKNSRQVREFLGTAGYCRLWIPGFAELAAPLYPLTRPGTLFQWGTEQQLAFEDIKKALLSSPALGLPDITKPFELFIDENSGFAKGVLVQKLGPWKRPVAYLSKKLDTVASGWPPCLRMVAAIAILVKDAGKLTLGQPLTILTSHPVEALVRQPPNKWLSNARMTHYQAMLLDAERVHFGPTVSLNPATLLPLPSGGNHHDCLQILAETHGTRPDLTDQPLPDADLTWYTDGSSFIRNGEREAGAAVTTESEVIWAAPLPPGTSAQRAELIALTQALKMAEGKKLTVYTDSRYAFATTHVHGEIYRRRGWLTSEGKEIKNKNEILALLEALFLPKRLSIIHCPGHQKGDSPQAKGNRLADDTAKKAATETHSSLTVLPAGKRTADGSEFEKRTADGSEFESPKKKAKVE

SEQ ID NO: 1185 - protein, 2095 aa, synthetic construct
MPAAKRVKLDGGDKKYSIGLDIGTNSVGWAVITDEYKVPSKKFKVLGNTDRHSIKKNLIGALLFDSGETAEATRLKRTARRRYTRRKNRICYLQEIFSNEMAKVDDSFFHRLEESFLVEEDKKHERHPIFGNIVDEVAYHEKYPTIYHLRKKLVDSTDKADLRLIYLALAHMIKFRGHFLIEGDLNPDNSDVDKLFIQLVQTYNQLFEENPINASGVDAKAILSARLSKSRRLENLIAQLPGEKKNGLFGNLIALSLGLTPNFKSNFDLAEDAKLQLSKDTYDDDLDNLLAQIGDQYADLFLAAKNLSDAILLSDILRVNTEITKAPLSASMIKRYDEHHQDLTLLKALVRQQLPEKYKEIFFDQSKNGYAGYIDGGASQEEFYKFIKPILEKMDGTEELLVKLNREDLLRKQRTFDNGSIPHQIHLGELHAILRRQEDFYPFLKDNREKIEKILTFRIPYYVGPLARGNSRFAWMTRKSEETITPWNFEEVVDKGASAQSFIERMTNFDKNLPNEKVLPKHSLLYEYFTVYNELTKVKYVTEGMRKPAFLSGEQKKAIVDLLFKTNRKVTVKQLKEDYFKKIECFDSVEISGVEDRFNASLGTYHDLLKIIKDKDFLDNEENEDILEDIVLTLTLFEDREMIEERLKTYAHLFDDKVMKQLKRRRYTGWGRLSRKLINGIRDKQSGKTILDFLKSDGFANRNFMQLIHDDSLTFKEDIQKAQVSGQGDSLHEHIANLAGSPAIKKGILQTVKVVDELVKVMGRHKPENIVIEMARENQTTQKGQKNSRERMKRIEEGIKELGSQILKEHPVENTQLQNEKLYLYYLQNGRDMYVDQELDINRLSDYDVDHIVPQSFLKDDSIDNKVLTRSDKARGKSDNVPSEEVVKKMKNYWRQLLNAKLITQRKFDNLTKAERGGLSELDKAGFIKRQLVETRQITKHVAQILDSRMNTKYDENDKLIREVKVITLKSKLVSDFRKDFQFYKVREINNYHHAHDAYLNAVVGTALIKKYPKLESEFVYGDYKVYDVRKMIAKSEQEIGKATAKYFFYSNIMNFFKTEITLANGEIRKRPLIETNGETGEIVWDKGRDFATVRKVLSMPQVNIVKKTEVQTGGFSKESILPKRNSDKLIARKKDWDPKKYGGFDSPTVAYSVLVVAKVEKGKSKKLKSVKELLGITIMERSSFEKNPIDFLEAKGYKEVKKDLIIKLPKYSLFELENGRKRMLASAGELQKGNELALPSKYVNFLYLASHYEKLKGSPEDNEQKQLFVEQHKHYLDEIIEQISEFSKRVILADANLDKVLSAYNKHRDKPIREQAENIIHLFTLTNLGAPAAFKYFDTTIDRKRYTSTKEVLDATLIHQSITGLYETRIDLSQLGGDGGEAAAKPAPGGGGGTLQLEEEYRLFEPESTQKQEMDIWLKNFPQAWAETGGMGTAHCQAPVLIQLKATATPISIRQYPMPHEAYQGIKPHIRRMLDQGILKPCQSPWNTPLLPVKKPGTEDYRPVQDLREVNKRVEDIHPTVPNPYNLLSTLPPSHPWYTVLDLKDAFFCLRLHSESQLLFAFEWRDPEIGLSGQLTWTRLPQGFKNSPTLFNEALHSDLADFRVRYPALVLLQYVDDLLLAAATRTECLEGTKALLETLGNKGYRASAKKAQICLQEVTYLGYSLKDGQRWLTKARKEAILSIPVPKNSRQVREFLGTAGYCRLWIPGFAELAAPLYPLTRPGTLFQWGTEQQLAFEDIKKALLSSPALGLPDITKPFELFIDENSGFAKGVLVQKLGPWKRPVAYLSKKLDTVASGWPPCLRMVAAIAILVKDAGKLTLGQPLTILTSHPVEALVRQPPNKWLSNARMTHYQAMLLDAERVHFGPTVSLNPATLLPLPSGGNHHDCLQILAETHGTRPDLTDQPLPDADLTWYTDGSSFIRNGEREAGAAVTTESEVIWAAPLPPGTSAQRAELIALTQALKMAEGKKLTVYTDSRYAFATTHVHGEIYRRRGWLTSEGKEIKNKNEILALLEALFLPKRLSIIHCPGHQKGDSPQAKGNRLADDTAKKAATETHSSLTVLPAGKRTADGSEFEKRTADGSEFESPKKKAKVE

SEQ ID NO: 1186 - protein, 2095 aa, synthetic construct
MPAAKRVKLDGGDKKYSIGLDIGTNSVGWAVITDEYKVPSKKFKVLGNTDRHSIKKNLIGALLFDSGETAEATRLKRTARRRYTRRKNRICYLQEIFSNEMAKVDDSFFHRLEESFLVEEDKKHERHPIFGNIVDEVAYHEKYPTIYHLRKKLVDSTDKADLRLIYLALAHMIKFRGHFLIEGDLNPDNSDVDKLFIQLVQTYNQLFEENPINASGVDAKAILSARLSKSRRLENLIAQLPGEKKNGLFGNLIALSLGLTPNFKSNFDLAEDAKLQLSKDTYDDDLDNLLAQIGDQYADLFLAAKNLSDAILLSDILRVNTEITKAPLSASMIKRYDEHHQDLTLLKALVRQQLPEKYKEIFFDQSKNGYAGYIDGGASQEEFYKFIKPILEKMDGTEELLVKLNREDLLRKQRTFDNGSIPHQIHLGELHAILRRQEDFYPFLKDNREKIEKILTFRIPYYVGPLARGNSRFAWMTRKSEETITPWNFEEVVDKGASAQSFIERMTNFDKNLPNEKVLPKHSLLYEYFTVYNELTKVKYVTEGMRKPAFLSGEQKKAIVDLLFKTNRKVTVKQLKEDYFKKIECFDSVEISGVEDRFNASLGTYHDLLKIIKDKDFLDNEENEDILEDIVLTLTLFEDREMIEERLKTYAHLFDDKVMKQLKRRRYTGWGRLSRKLINGIRDKQSGKTILDFLKSDGFANRNFMQLIHDDSLTFKEDIQKAQVSGQGDSLHEHIANLAGSPAIKKGILQTVKVVDELVKVMGRHKPENIVIEMARENQTTQKGQKNSRERMKRIEEGIKELGSQILKEHPVENTQLQNEKLYLYYLQNGRDMYVDQELDINRLSDYDVDHIVPQSFLKDDSIDNKVLTRSDKARGKSDNVPSEEVVKKMKNYWRQLLNAKLITQRKFDNLTKAERGGLSELDKAGFIKRQLVETRQITKHVAQILDSRMNTKYDENDKLIREVKVITLKSKLVSDFRKDFQFYKVREINNYHHAHDAYLNAVVGTALIKKYPKLESEFVYGDYKVYDVRKMIAKSEQEIGKATAKYFFYSNIMNFFKTEITLANGEIRKRPLIETNGETGEIVWDKGRDFATVRKVLSMPQVNIVKKTEVQTGGFSKESILPKRNSDKLIARKKDWDPKKYGGFDSPTVAYSVLVVAKVEKGKSKKLKSVKELLGITIMERSSFEKNPIDFLEAKGYKEVKKDLIIKLPKYSLFELENGRKRMLASAGELQKGNELALPSKYVNFLYLASHYEKLKGSPEDNEQKQLFVEQHKHYLDEIIEQISEFSKRVILADANLDKVLSAYNKHRDKPIREQAENIIHLFTLTNLGAPAAFKYFDTTIDRKRYTSTKEVLDATLIHQSITGLYETRIDLSQLGGDGGGGGPAPEAAAKGGTLQLEEEYRLFEPESTQKQEMDIWLKNFPQAWAETGGMGTAHCQAPVLIQLKATATPISIRQYPMPHEAYQGIKPHIRRMLDQGILKPCQSPWNTPLLPVKKPGTEDYRPVQDLREVNKRVEDIHPTVPNPYNLLSTLPPSHPWYTVLDLKDAFFCLRLHSESQLLFAFEWRDPEIGLSGQLTWTRLPQGFKNSPTLFNEALHSDLADFRVRYPALVLLQYVDDLLLAAATRTECLEGTKALLETLGNKGYRASAKKAQICLQEVTYLGYSLKDGQRWLTKARKEAILSIPVPKNSRQVREFLGTAGYCRLWIPGFAELAAPLYPLTRPGTLFQWGTEQQLAFEDIKKALLSSPALGLPDITKPFELFIDENSGFAKGVLVQKLGPWKRPVAYLSKKLDTVASGWPPCLRMVAAIAILVKDAGKLTLGQPLTILTSHPVEALVRQPPNKWLSNARMTHYQAMLLDAERVHFGPTVSLNPATLLPLPSGGNHHDCLQILAETHGTRPDLTDQPLPDADLTWYTDGSSFIRNGEREAGAAVTTESEVIWAAPLPPGTSAQRAELIALTQALKMAEGKKLTVYTDSRYAFATTHVHGEIYRRRGWLTSEGKEIKNKNEILALLEALFLPKRLSIIHCPGHQKGDSPQAKGNRLADDTAKKAATETHSSLTVLPAGKRTADGSEFEKRTADGSEFESPKKKAKVE

SEQ ID NO: 1187 - protein, 2095 aa, synthetic construct
MPAAKRVKLDGGDKKYSIGLDIGTNSVGWAVITDEYKVPSKKFKVLGNTDRHSIKKNLIGALLFDSGETAEATRLKRTARRRYTRRKNRICYLQEIFSNEMAKVDDSFFHRLEESFLVEEDKKHERHPIFGNIVDEVAYHEKYPTIYHLRKKLVDSTDKADLRLIYLALAHMIKFRGHFLIEGDLNPDNSDVDKLFIQLVQTYNQLFEENPINASGVDAKAILSARLSKSRRLENLIAQLPGEKKNGLFGNLIALSLGLTPNFKSNFDLAEDAKLQLSKDTYDDDLDNLLAQIGDQYADLFLAAKNLSDAILLSDILRVNTEITKAPLSASMIKRYDEHHQDLTLLKALVRQQLPEKYKEIFFDQSKNGYAGYIDGGASQEEFYKFIKPILEKMDGTEELLVKLNREDLLRKQRTFDNGSIPHQIHLGELHAILRRQEDFYPFLKDNREKIEKILTFRIPYYVGPLARGNSRFAWMTRKSEETITPWNFEEVVDKGASAQSFIERMTNFDKNLPNEKVLPKHSLLYEYFTVYNELTKVKYVTEGMRKPAFLSGEQKKAIVDLLFKTNRKVTVKQLKEDYFKKIECFDSVEISGVEDRFNASLGTYHDLLKIIKDKDFLDNEENEDILEDIVLTLTLFEDREMIEERLKTYAHLFDDKVMKQLKRRRYTGWGRLSRKLINGIRDKQSGKTILDFLKSDGFANRNFMQLIHDDSLTFKEDIQKAQVSGQGDSLHEHIANLAGSPAIKKGILQTVKVVDELVKVMGRHKPENIVIEMARENQTTQKGQKNSRERMKRIEEGIKELGSQILKEHPVENTQLQNEKLYLYYLQNGRDMYVDQELDINRLSDYDVDHIVPQSFLKDDSIDNKVLTRSDKARGKSDNVPSEEVVKKMKNYWRQLLNAKLITQRKFDNLTKAERGGLSELDKAGFIKRQLVETRQITKHVAQILDSRMNTKYDENDKLIREVKVITLKSKLVSDFRKDFQFYKVREINNYHHAHDAYLNAVVGTALIKKYPKLESEFVYGDYKVYDVRKMIAKSEQEIGKATAKYFFYSNIMNFFKTEITLANGEIRKRPLIETNGETGEIVWDKGRDFATVRKVLSMPQVNIVKKTEVQTGGFSKESILPKRNSDKLIARKKDWDPKKYGGFDSPTVAYSVLVVAKVEKGKSKKLKSVKELLGITIMERSSFEKNPIDFLEAKGYKEVKKDLIIKLPKYSLFELENGRKRMLASAGELQKGNELALPSKYVNFLYLASHYEKLKGSPEDNEQKQLFVEQHKHYLDEIIEQISEFSKRVILADANLDKVLSAYNKHRDKPIREQAENIIHLFTLTNLGAPAAFKYFDTTIDRKRYTSTKEVLDATLIHQSITGLYETRIDLSQLGGDGGGGGGGSEAAAKGGTLQLEEEYRLFEPESTQKQEMDIWLKNFPQAWAETGGMGTAHCQAPVLIQLKATATPISIRQYPMPHEAYQGIKPHIRRMLDQGILKPCQSPWNTPLLPVKKPGTEDYRPVQDLREVNKRVEDIHPTVPNPYNLLSTLPPSHPWYTVLDLKDAFFCLRLHSESQLLFAFEWRDPEIGLSGQLTWTRLPQGFKNSPTLFNEALHSDLADFRVRYPALVLLQYVDDLLLAAATRTECLEGTKALLETLGNKGYRASAKKAQICLQEVTYLGYSLKDGQRWLTKARKEAILSIPVPKNSRQVREFLGTAGYCRLWIPGFAELAAPLYPLTRPGTLFQWGTEQQLAFEDIKKALLSSPALGLPDITKPFELFIDENSGFAKGVLVQKLGPWKRPVAYLSKKLDTVASGWPPCLRMVAAIAILVKDAGKLTLGQPLTILTSHPVEALVRQPPNKWLSNARMTHYQAMLLDAERVHFGPTVSLNPATLLPLPSGGNHHDCLQILAETHGTRPDLTDQPLPDADLTWYTDGSSFIRNGEREAGAAVTTESEVIWAAPLPPGTSAQRAELIALTQALKMAEGKKLTVYTDSRYAFATTHVHGEIYRRRGWLTSEGKEIKNKNEILALLEALFLPKRLSIIHCPGHQKGDSPQAKGNRLADDTAKKAATETHSSLTVLPAGKRTADGSEFEKRTADGSEFESPKKKAKVE

SEQ ID NO: 1188 - protein, 2090 aa, synthetic construct
MPAAKRVKLDGGDKKYSIGLDIGTNSVGWAVITDEYKVPSKKFKVLGNTDRHSIKKNLIGALLFDSGETAEATRLKRTARRRYTRRKNRICYLQEIFSNEMAKVDDSFFHRLEESFLVEEDKKHERHPIFGNIVDEVAYHEKYPTIYHLRKKLVDSTDKADLRLIYLALAHMIKFRGHFLIEGDLNPDNSDVDKLFIQLVQTYNQLFEENPINASGVDAKAILSARLSKSRRLENLIAQLPGEKKNGLFGNLIALSLGLTPNFKSNFDLAEDAKLQLSKDTYDDDLDNLLAQIGDQYADLFLAAKNLSDAILLSDILRVNTEITKAPLSASMIKRYDEHHQDLTLLKALVRQQLPEKYKEIFFDQSKNGYAGYIDGGASQEEFYKFIKPILEKMDGTEELLVKLNREDLLRKQRTFDNGSIPHQIHLGELHAILRRQEDFYPFLKDNREKIEKILTFRIPYYVGPLARGNSRFAWMTRKSEETITPWNFEEVVDKGASAQSFIERMTNFDKNLPNEKVLPKHSLLYEYFTVYNELTKVKYVTEGMRKPAFLSGEQKKAIVDLLFKTNRKVTVKQLKEDYFKKIECFDSVEISGVEDRFNASLGTYHDLLKIIKDKDFLDNEENEDILEDIVLTLTLFEDREMIEERLKTYAHLFDDKVMKQLKRRRYTGWGRLSRKLINGIRDKQSGKTILDFLKSDGFANRNFMQLIHDDSLTFKEDIQKAQVSGQGDSLHEHIANLAGSPAIKKGILQTVKVVDELVKVMGRHKPENIVIEMARENQTTQKGQKNSRERMKRIEEGIKELGSQILKEHPVENTQLQNEKLYLYYLQNGRDMYVDQELDINRLSDYDVDHIVPQSFLKDDSIDNKVLTRSDKARGKSDNVPSEEVVKKMKNYWRQLLNAKLITQRKFDNLTKAERGGLSELDKAGFIKRQLVETRQITKHVAQILDSRMNTKYDENDKLIREVKVITLKSKLVSDFRKDFQFYKVREINNYHHAHDAYLNAVVGTALIKKYPKLESEFVYGDYKVYDVRKMIAKSEQEIGKATAKYFFYSNIMNFFKTEITLANGEIRKRPLIETNGETGEIVWDKGRDFATVRKVLSMPQVNIVKKTEVQTGGFSKESILPKRNSDKLIARKKDWDPKKYGGFDSPTVAYSVLVVAKVEKGKSKKLKSVKELLGITIMERSSFEKNPIDFLEAKGYKEVKKDLIIKLPKYSLFELENGRKRMLASAGELQKGNELALPSKYVNFLYLASHYEKLKGSPEDNEQKQLFVEQHKHYLDEIIEQISEFSKRVILADANLDKVLSAYNKHRDKPIREQAENIIHLFTLTNLGAPAAFKYFDTTIDRKRYTSTKEVLDATLIHQSITGLYETRIDLSQLGGDGGGGGGGGGGTLQLEEEYRLFEPESTQKQEMDIWLKNFPQAWAETGGMGTAHCQAPVLIQLKATATPISIRQYPMPHEAYQGIKPHIRRMLDQGILKPCQSPWNTPLLPVKKPGTEDYRPVQDLREVNKRVEDIHPTVPNPYNLLSTLPPSHPWYTVLDLKDAFFCLRLHSESQLLFAFEWRDPEIGLSGQLTWTRLPQGFKNSPTLFNEALHSDLADFRVRYPALVLLQYVDDLLLAAATRTECLEGTKALLETLGNKGYRASAKKAQICLQEVTYLGYSLKDGQRWLTKARKEAILSIPVPKNSRQVREFLGTAGYCRLWIPGFAELAAPLYPLTRPGTLFQWGTEQQLAFEDIKKALLSSPALGLPDITKPFELFIDENSGFAKGVLVQKLGPWKRPVAYLSKKLDTVASGWPPCLRMVAAIAILVKDAGKLTLGQPLTILTSHPVEALVRQPPNKWLSNARMTHYQAMLLDAERVHFGPTVSLNPATLLPLPSGGNHHDCLQILAETHGTRPDLTDQPLPDADLTWYTDGSSFIRNGEREAGAAVTTESEVIWAAPLPPGTSAQRAELIALTQALKMAEGKKLTVYTDSRYAFATTHVHGEIYRRRGWLTSEGKEIKNKNEILALLEALFLPKRLSIIHCPGHQKGDSPQAKGNRLADDTAKKAATETHSSLTVLPAGKRTADGSEFEKRTADGSEFESPKKKAKVE

SEQ ID NO: 1189 - protein, 2093 aa, synthetic construct
MPAAKRVKLDGGDKKYSIGLDIGTNSVGWAVITDEYKVPSKKFKVLGNTDRHSIKKNLIGALLFDSGETAEATRLKRTARRRYTRRKNRICYLQEIFSNEMAKVDDSFFHRLEESFLVEEDKKHERHPIFGNIVDEVAYHEKYPTIYHLRKKLVDSTDKADLRLIYLALAHMIKFRGHFLIEGDLNPDNSDVDKLFIQLVQTYNQLFEENPINASGVDAKAILSARLSKSRRLENLIAQLPGEKKNGLFGNLIALSLGLTPNFKSNFDLAEDAKLQLSKDTYDDDLDNLLAQIGDQYADLFLAAKNLSDAILLSDILRVNTEITKAPLSASMIKRYDEHHQDLTLLKALVRQQLPEKYKEIFFDQSKNGYAGYIDGGASQEEFYKFIKPILEKMDGTEELLVKLNREDLLRKQRTFDNGSIPHQIHLGELHAILRRQEDFYPFLKDNREKIEKILTFRIPYYVGPLARGNSRFAWMTRKSEETITPWNFEEVVDKGASAQSFIERMTNFDKNLPNEKVLPKHSLLYEYFTVYNELTKVKYVTEGMRKPAFLSGEQKKAIVDLLFKTNRKVTVKQLKEDYFKKIECFDSVEISGVEDRFNASLGTYHDLLKIIKDKDFLDNEENEDILEDIVLTLTLFEDREMIEERLKTYAHLFDDKVMKQLKRRRYTGWGRLSRKLINGIRDKQSGKTILDFLKSDGFANRNFMQLIHDDSLTFKEDIQKAQVSGQGDSLHEHIANLAGSPAIKKGILQTVKVVDELVKVMGRHKPENIVIEMARENQTTQKGQKNSRERMKRIEEGIKELGSQILKEHPVENTQLQNEKLYLYYLQNGRDMYVDQELDINRLSDYDVDHIVPQSFLKDDSIDNKVLTRSDKARGKSDNVPSEEVVKKMKNYWRQLLNAKLITQRKFDNLTKAERGGLSELDKAGFIKRQLVETRQITKHVAQILDSRMNTKYDENDKLIREVKVITLKSKLVSDFRKDFQFYKVREINNYHHAHDAYLNAVVGTALIKKYPKLESEFVYGDYKVYDVRKMIAKSEQEIGKATAKYFFYSNIMNFFKTEITLANGEIRKRPLIETNGETGEIVWDKGRDFATVRKVLSMPQVNIVKKTEVQTGGFSKESILPKRNSDKLIARKKDWDPKKYGGFDSPTVAYSVLVVAKVEKGKSKKLKSVKELLGITIMERSSFEKNPIDFLEAKGYKEVKKDLIIKLPKYSLFELENGRKRMLASAGELQKGNELALPSKYVNFLYLASHYEKLKGSPEDNEQKQLFVEQHKHYLDEIIEQISEFSKRVILADANLDKVLSAYNKHRDKPIREQAENIIHLFTLTNLGAPAAFKYFDTTIDRKRYTSTKEVLDATLIHQSITGLYETRIDLSQLGGDGGGGGGSSPAPGGTLQLEEEYRLFEPESTQKQEMDIWLKNFPQAWAETGGMGTAHCQAPVLIQLKATATPISIRQYPMPHEAYQGIKPHIRRMLDQGILKPCQSPWNTPLLPVKKPGTEDYRPVQDLREVNKRVEDIHPTVPNPYNLLSTLPPSHPWYTVLDLKDAFFCLRLHSESQLLFAFEWRDPEIGLSGQLTWTRLPQGFKNSPTLFNEALHSDLADFRVRYPALVLLQYVDDLLLAAATRTECLEGTKALLETLGNKGYRASAKKAQICLQEVTYLGYSLKDGQRWLTKARKEAILSIPVPKNSRQVREFLGTAGYCRLWIPGFAELAAPLYPLTRPGTLFQWGTEQQLAFEDIKKALLSSPALGLPDITKPFELFIDENSGFAKGVLVQKLGPWKRPVAYLSKKLDTVASGWPPCLRMVAAIAILVKDAGKLTLGQPLTILTSHPVEALVRQPPNKWLSNARMTHYQAMLLDAERVHFGPTVSLNPATLLPLPSGGNHHDCLQILAETHGTRPDLTDQPLPDADLTWYTDGSSFIRNGEREAGAAVTTESEVIWAAPLPPGTSAQRAELIALTQALKMAEGKKLTVYTDSRYAFATTHVHGEIYRRRGWLTSEGKEIKNKNEILALLEALFLPKRLSIIHCPGHQKGDSPQAKGNRLADDTAKKAATETHSSLTVLPAGKRTADGSEFEKRTADGSEFESPKKKAKVE

SEQ ID NO: 1190 - protein, 2093 aa, synthetic construct
MPAAKRVKLDGGDKKYSIGLDIGTNSVGWAVITDEYKVPSKKFKVLGNTDRHSIKKNLIGALLFDSGETAEATRLKRTARRRYTRRKNRICYLQEIFSNEMAKVDDSFFHRLEESFLVEEDKKHERHPIFGNIVDEVAYHEKYPTIYHLRKKLVDSTDKADLRLIYLALAHMIKFRGHFLIEGDLNPDNSDVDKLFIQLVQTYNQLFEENPINASGVDAKAILSARLSKSRRLENLIAQLPGEKKNGLFGNLIALSLGLTPNFKSNFDLAEDAKLQLSKDTYDDDLDNLLAQIGDQYADLFLAAKNLSDAILLSDILRVNTEITKAPLSASMIKRYDEHHQDLTLLKALVRQQLPEKYKEIFFDQSKNGYAGYIDGGASQEEFYKFIKPILEKMDGTEELLVKLNREDLLRKQRTFDNGSIPHQIHLGELHAILRRQEDFYPFLKDNREKIEKILTFRIPYYVGPLARGNSRFAWMTRKSEETITPWNFEEVVDKGASAQSFIERMTNFDKNLPNEKVLPKHSLLYEYFTVYNELTKVKYVTEGMRKPAFLSGEQKKAIVDLLFKTNRKVTVKQLKEDYFKKIECFDSVEISGVEDRFNASLGTYHDLLKIIKDKDFLDNEENEDILEDIVLTLTLFEDREMIEERLKTYAHLFDDKVMKQLKRRRYTGWGRLSRKLINGIRDKQSGKTILDFLKSDGFANRNFMQLIHDDSLTFKEDIQKAQVSGQGDSLHEHIANLAGSPAIKKGILQTVKVVDELVKVMGRHKPENIVIEMARENQTTQKGQKNSRERMKRIEEGIKELGSQILKEHPVENTQLQNEKLYLYYLQNGRDMYVDQELDINRLSDYDVDHIVPQSFLKDDSIDNKVLTRSDKARGKSDNVPSEEVVKKMKNYWRQLLNAKLITQRKFDNLTKAERGGLSELDKAGFIKRQLVETRQITKHVAQILDSRMNTKYDENDKLIREVKVITLKSKLVSDFRKDFQFYKVREINNYHHAHDAYLNAVVGTALIKKYPKLESEFVYGDYKVYDVRKMIAKSEQEIGKATAKYFFYSNIMNFFKTEITLANGEIRKRPLIETNGETGEIVWDKGRDFATVRKVLSMPQVNIVKKTEVQTGGFSKESILPKRNSDKLIARKKDWDPKKYGGFDSPTVAYSVLVVAKVEKGKSKKLKSVKELLGITIMERSSFEKNPIDFLEAKGYKEVKKDLIIKLPKYSLFELENGRKRMLASAGELQKGNELALPSKYVNFLYLASHYEKLKGSPEDNEQKQLFVEQHKHYLDEIIEQISEFSKRVILADANLDKVLSAYNKHRDKPIREQAENIIHLFTLTNLGAPAAFKYFDTTIDRKRYTSTKEVLDATLIHQSITGLYETRIDLSQLGGDGGGGSGGGPAPGGTLQLEEEYRLFEPESTQKQEMDIWLKNFPQAWAETGGMGTAHCQAPVLIQLKATATPISIRQYPMPHEAYQGIKPHIRRMLDQGILKPCQSPWNTPLLPVKKPGTEDYRPVQDLREVNKRVEDIHPTVPNPYNLLSTLPPSHPWYTVLDLKDAFFCLRLHSESQLLFAFEWRDPEIGLSGQLTWTRLPQGFKNSPTLFNEALHSDLADFRVRYPALVLLQYVDDLLLAAATRTECLEGTKALLETLGNKGYRASAKKAQICLQEVTYLGYSLKDGQRWLTKARKEAILSIPVPKNSRQVREFLGTAGYCRLWIPGFAELAAPLYPLTRPGTLFQWGTEQQLAFEDIKKALLSSPALGLPDITKPFELFIDENSGFAKGVLVQKLGPWKRPVAYLSKKLDTVASGWPPCLRMVAAIAILVKDAGKLTLGQPLTILTSHPVEALVRQPPNKWLSNARMTHYQAMLLDAERVHFGPTVSLNPATLLPLPSGGNHHDCLQILAETHGTRPDLTDQPLPDADLTWYTDGSSFIRNGEREAGAAVTTESEVIWAAPLPPGTSAQRAELIALTQALKMAEGKKLTVYTDSRYAFATTHVHGEIYRRRGWLTSEGKEIKNKNEILALLEALFLPKRLSIIHCPGHQKGDSPQAKGNRLADDTAKKAATETHSSLTVLPAGKRTADGSEFEKRTADGSEFESPKKKAKVE

SEQ ID NO: 1191 - protein, 2095 aa, synthetic construct
MPAAKRVKLDGGDKKYSIGLDIGTNSVGWAVITDEYKVPSKKFKVLGNTDRHSIKKNLIGALLFDSGETAEATRLKRTARRRYTRRKNRICYLQEIFSNEMAKVDDSFFHRLEESFLVEEDKKHERHPIFGNIVDEVAYHEKYPTIYHLRKKLVDSTDKADLRLIYLALAHMIKFRGHFLIEGDLNPDNSDVDKLFIQLVQTYNQLFEENPINASGVDAKAILSARLSKSRRLENLIAQLPGEKKNGLFGNLIALSLGLTPNFKSNFDLAEDAKLQLSKDTYDDDLDNLLAQIGDQYADLFLAAKNLSDAILLSDILRVNTEITKAPLSASMIKRYDEHHQDLTLLKALVRQQLPEKYKEIFFDQSKNGYAGYIDGGASQEEFYKFIKPILEKMDGTEELLVKLNREDLLRKQRTFDNGSIPHQIHLGELHAILRRQEDFYPFLKDNREKIEKILTFRIPYYVGPLARGNSRFAWMTRKSEETITPWNFEEVVDKGASAQSFIERMTNFDKNLPNEKVLPKHSLLYEYFTVYNELTKVKYVTEGMRKPAFLSGEQKKAIVDLLFKTNRKVTVKQLKEDYFKKIECFDSVEISGVEDRFNASLGTYHDLLKIIKDKDFLDNEENEDILEDIVLTLTLFEDREMIEERLKTYAHLFDDKVMKQLKRRRYTGWGRLSRKLINGIRDKQSGKTILDFLKSDGFANRNFMQLIHDDSLTFKEDIQKAQVSGQGDSLHEHIANLAGSPAIKKGILQTVKVVDELVKVMGRHKPENIVIEMARENQTTQKGQKNSRERMKRIEEGIKELGSQILKEHPVENTQLQNEKLYLYYLQNGRDMYVDQELDINRLSDYDVDHIVPQSFLKDDSIDNKVLTRSDKARGKSDNVPSEEVVKKMKNYWRQLLNAKLITQRKFDNLTKAERGGLSELDKAGFIKRQLVETRQITKHVAQILDSRMNTKYDENDKLIREVKVITLKSKLVSDFRKDFQFYKVREINNYHHAHDAYLNAVVGTALIKKYPKLESEFVYGDYKVYDVRKMIAKSEQEIGKATAKYFFYSNIMNFFKTEITLANGEIRKRPLIETNGETGEIVWDKGRDFATVRKVLSMPQVNIVKKTEVQTGGFSKESILPKRNSDKLIARKKDWDPKKYGGFDSPTVAYSVLVVAKVEKGKSKKLKSVKELLGITIMERSSFEKNPIDFLEAKGYKEVKKDLIIKLPKYSLFELENGRKRMLASAGELQKGNELALPSKYVNFLYLASHYEKLKGSPEDNEQKQLFVEQHKHYLDEIIEQISEFSKRVILADANLDKVLSAYNKHRDKPIREQAENIIHLFTLTNLGAPAAFKYFDTTIDRKRYTSTKEVLDATLIHQSITGLYETRIDLSQLGGDGGGSSPAPEAAAKGGTLQLEEEYRLFEPESTQKQEMDIWLKNFPQAWAETGGMGTAHCQAPVLIQLKATATPISIRQYPMPHEAYQGIKPHIRRMLDQGILKPCQSPWNTPLLPVKKPGTEDYRPVQDLREVNKRVEDIHPTVPNPYNLLSTLPPSHPWYTVLDLKDAFFCLRLHSESQLLFAFEWRDPEIGLSGQLTWTRLPQGFKNSPTLFNEALHSDLADFRVRYPALVLLQYVDDLLLAAATRTECLEGTKALLETLGNKGYRASAKKAQICLQEVTYLGYSLKDGQRWLTKARKEAILSIPVPKNSRQVREFLGTAGYCRLWIPGFAELAAPLYPLTRPGTLFQWGTEQQLAFEDIKKALLSSPALGLPDITKPFELFIDENSGFAKGVLVQKLGPWKRPVAYLSKKLDTVASGWPPCLRMVAAIAILVKDAGKLTLGQPLTILTSHPVEALVRQPPNKWLSNARMTHYQAMLLDAERVHFGPTVSLNPATLLPLPSGGNHHDCLQILAETHGTRPDLTDQPLPDADLTWYTDGSSFIRNGEREAGAAVTTESEVIWAAPLPPGTSAQRAELIALTQALKMAEGKKLTVYTDSRYAFATTHVHGEIYRRRGWLTSEGKEIKNKNEILALLEALFLPKRLSIIHCPGHQKGDSPQAKGNRLADDTAKKAATETHSSLTVLPAGKRTADGSEFEKRTADGSEFESPKKKAKVE

SEQ ID NO: 1192 - protein, 2093 aa, synthetic construct
MPAAKRVKLDGGDKKYSIGLDIGTNSVGWAVITDEYKVPSKKFKVLGNTDRHSIKKNLIGALLFDSGETAEATRLKRTARRRYTRRKNRICYLQEIFSNEMAKVDDSFFHRLEESFLVEEDKKHERHPIFGNIVDEVAYHEKYPTIYHLRKKLVDSTDKADLRLIYLALAHMIKFRGHFLIEGDLNPDNSDVDKLFIQLVQTYNQLFEENPINASGVDAKAILSARLSKSRRLENLIAQLPGEKKNGLFGNLIALSLGLTPNFKSNFDLAEDAKLQLSKDTYDDDLDNLLAQIGDQYADLFLAAKNLSDAILLSDILRVNTEITKAPLSASMIKRYDEHHQDLTLLKALVRQQLPEKYKEIFFDQSKNGYAGYIDGGASQEEFYKFIKPILEKMDGTEELLVKLNREDLLRKQRTFDNGSIPHQIHLGELHAILRRQEDFYPFLKDNREKIEKILTFRIPYYVGPLARGNSRFAWMTRKSEETITPWNFEEVVDKGASAQSFIERMTNFDKNLPNEKVLPKHSLLYEYFTVYNELTKVKYVTEGMRKPAFLSGEQKKAIVDLLFKTNRKVTVKQLKEDYFKKIECFDSVEISGVEDRFNASLGTYHDLLKIIKDKDFLDNEENEDILEDIVLTLTLFEDREMIEERLKTYAHLFDDKVMKQLKRRRYTGWGRLSRKLINGIRDKQSGKTILDFLKSDGFANRNFMQLIHDDSLTFKEDIQKAQVSGQGDSLHEHIANLAGSPAIKKGILQTVKVVDELVKVMGRHKPENIVIEMARENQTTQKGQKNSRERMKRIEEGIKELGSQILKEHPVENTQLQNEKLYLYYLQNGRDMYVDQELDINRLSDYDVDHIVPQSFLKDDSIDNKVLTRSDKARGKSDNVPSEEVVKKMKNYWRQLLNAKLITQRKFDNLTKAERGGLSELDKAGFIKRQLVETRQITKHVAQILDSRMNTKYDENDKLIREVKVITLKSKLVSDFRKDFQFYKVREINNYHHAHDAYLNAVVGTALIKKYPKLESEFVYGDYKVYDVRKMIAKSEQEIGKATAKYFFYSNIMNFFKTEITLANGEIRKRPLIETNGETGEIVWDKGRDFATVRKVLSMPQVNIVKKTEVQTGGFSKESILPKRNSDKLIARKKDWDPKKYGGFDSPTVAYSVLVVAKVEKGKSKKLKSVKELLGITIMERSSFEKNPIDFLEAKGYKEVKKDLIIKLPKYSLFELENGRKRMLASAGELQKGNELALPSKYVNFLYLASHYEKLKGSPEDNEQKQLFVEQHKHYLDEIIEQISEFSKRVILADANLDKVLSAYNKHRDKPIREQAENIIHLFTLTNLGAPAAFKYFDTTIDRKRYTSTKEVLDATLIHQSITGLYETRIDLSQLGGDGGPAPGSSGGGGGTLQLEEEYRLFEPESTQKQEMDIWLKNFPQAWAETGGMGTAHCQAPVLIQLKATATPISIRQYPMPHEAYQGIKPHIRRMLDQGILKPCQSPWNTPLLPVKKPGTEDYRPVQDLREVNKRVEDIHPTVPNPYNLLSTLPPSHPWYTVLDLKDAFFCLRLHSESQLLFAFEWRDPEIGLSGQLTWTRLPQGFKNSPTLFNEALHSDLADFRVRYPALVLLQYVDDLLLAAATRTECLEGTKALLETLGNKGYRASAKKAQICLQEVTYLGYSLKDGQRWLTKARKEAILSIPVPKNSRQVREFLGTAGYCRLWIPGFAELAAPLYPLTRPGTLFQWGTEQQLAFEDIKKALLSSPALGLPDITKPFELFIDENSGFAKGVLVQKLGPWKRPVAYLSKKLDTVASGWPPCLRMVAAIAILVKDAGKLTLGQPLTILTSHPVEALVRQPPNKWLSNARMTHYQAMLLDAERVHFGPTVSLNPATLLPLPSGGNHHDCLQILAETHGTRPDLTDQPLPDADLTWYTDGSSFIRNGEREAGAAVTTESEVIWAAPLPPGTSAQRAELIALTQALKMAEGKKLTVYTDSRYAFATTHVHGEIYRRRGWLTSEGKEIKNKNEILALLEALFLPKRLSIIHCPGHQKGDSPQAKGNRLADDTAKKAATETHSSLTVLPAGKRTADGSEFEKRTADGSEFESPKKKAKVE

SEQ ID NO: 1193 - protein, 2090 aa, synthetic construct
MPAAKRVKLDGGDKKYSIGLDIGTNSVGWAVITDEYKVPSKKFKVLGNTDRHSIKKNLIGALLFDSGETAEATRLKRTARRRYTRRKNRICYLQEIFSNEMAKVDDSFFHRLEESFLVEEDKKHERHPIFGNIVDEVAYHEKYPTIYHLRKKLVDSTDKADLRLIYLALAHMIKFRGHFLIEGDLNPDNSDVDKLFIQLVQTYNQLFEENPINASGVDAKAILSARLSKSRRLENLIAQLPGEKKNGLFGNLIALSLGLTPNFKSNFDLAEDAKLQLSKDTYDDDLDNLLAQIGDQYADLFLAAKNLSDAILLSDILRVNTEITKAPLSASMIKRYDEHHQDLTLLKALVRQQLPEKYKEIFFDQSKNGYAGYIDGGASQEEFYKFIKPILEKMDGTEELLVKLNREDLLRKQRTFDNGSIPHQIHLGELHAILRRQEDFYPFLKDNREKIEKILTFRIPYYVGPLARGNSRFAWMTRKSEETITPWNFEEVVDKGASAQSFIERMTNFDKNLPNEKVLPKHSLLYEYFTVYNELTKVKYVTEGMRKPAFLSGEQKKAIVDLLFKTNRKVTVKQLKEDYFKKIECFDSVEISGVEDRFNASLGTYHDLLKIIKDKDFLDNEENEDILEDIVLTLTLFEDREMIEERLKTYAHLFDDKVMKQLKRRRYTGWGRLSRKLINGIRDKQSGKTILDFLKSDGFANRNFMQLIHDDSLTFKEDIQKAQVSGQGDSLHEHIANLAGSPAIKKGILQTVKVVDELVKVMGRHKPENIVIEMARENQTTQKGQKNSRERMKRIEEGIKELGSQILKEHPVENTQLQNEKLYLYYLQNGRDMYVDQELDINRLSDYDVDHIVPQSFLKDDSIDNKVLTRSDKARGKSDNVPSEEVVKKMKNYWRQLLNAKLITQRKFDNLTKAERGGLSELDKAGFIKRQLVETRQITKHVAQILDSRMNTKYDENDKLIREVKVITLKSKLVSDFRKDFQFYKVREINNYHHAHDAYLNAVVGTALIKKYPKLESEFVYGDYKVYDVRKMIAKSEQEIGKATAKYFFYSNIMNFFKTEITLANGEIRKRPLIETNGETGEIVWDKGRDFATVRKVLSMPQVNIVKKTEVQTGGFSKESILPKRNSDKLIARKKDWDPKKYGGFDSPTVAYSVLVVAKVEKGKSKKLKSVKELLGITIMERSSFEKNPIDFLEAKGYKEVKKDLIIKLPKYSLFELENGRKRMLASAGELQKGNELALPSKYVNFLYLASHYEKLKGSPEDNEQKQLFVEQHKHYLDEIIEQISEFSKRVILADANLDKVLSAYNKHRDKPIREQAENIIHLFTLTNLGAPAAFKYFDTTIDRKRYTSTKEVLDATLIHQSITGLYETRIDLSQLGGDGGGGSGGSGGTLQLEEEYRLFEPESTQKQEMDIWLKNFPQAWAETGGMGTAHCQAPVLIQLKATATPISIRQYPMPHEAYQGIKPHIRRMLDQGILKPCQSPWNTPLLPVKKPGTEDYRPVQDLREVNKRVEDIHPTVPNPYNLLSTLPPSHPWYTVLDLKDAFFCLRLHSESQLLFAFEWRDPEIGLSGQLTWTRLPQGFKNSPTLFNEALHSDLADFRVRYPALVLLQYVDDLLLAAATRTECLEGTKALLETLGNKGYRASAKKAQICLQEVTYLGYSLKDGQRWLTKARKEAILSIPVPKNSRQVREFLGTAGYCRLWIPGFAELAAPLYPLTRPGTLFQWGTEQQLAFEDIKKALLSSPALGLPDITKPFELFIDENSGFAKGVLVQKLGPWKRPVAYLSKKLDTVASGWPPCLRMVAAIAILVKDAGKLTLGQPLTILTSHPVEALVRQPPNKWLSNARMTHYQAMLLDAERVHFGPTVSLNPATLLPLPSGGNHHDCLQILAETHGTRPDLTDQPLPDADLTWYTDGSSFIRNGEREAGAAVTTESEVIWAAPLPPGTSAQRAELIALTQALKMAEGKKLTVYTDSRYAFATTHVHGEIYRRRGWLTSEGKEIKNKNEILALLEALFLPKRLSIIHCPGHQKGDSPQAKGNRLADDTAKKAATETHSSLTVLPAGKRTADGSEFEKRTADGSEFESPKKKAKVE

SEQ ID NO: 1194 - protein, 2093 aa, synthetic construct
MPAAKRVKLDGGDKKYSIGLDIGTNSVGWAVITDEYKVPSKKFKVLGNTDRHSIKKNLIGALLFDSGETAEATRLKRTARRRYTRRKNRICYLQEIFSNEMAKVDDSFFHRLEESFLVEEDKKHERHPIFGNIVDEVAYHEKYPTIYHLRKKLVDSTDKADLRLIYLALAHMIKFRGHFLIEGDLNPDNSDVDKLFIQLVQTYNQLFEENPINASGVDAKAILSARLSKSRRLENLIAQLPGEKKNGLFGNLIALSLGLTPNFKSNFDLAEDAKLQLSKDTYDDDLDNLLAQIGDQYADLFLAAKNLSDAILLSDILRVNTEITKAPLSASMIKRYDEHHQDLTLLKALVRQQLPEKYKEIFFDQSKNGYAGYIDGGASQEEFYKFIKPILEKMDGTEELLVKLNREDLLRKQRTFDNGSIPHQIHLGELHAILRRQEDFYPFLKDNREKIEKILTFRIPYYVGPLARGNSRFAWMTRKSEETITPWNFEEVVDKGASAQSFIERMTNFDKNLPNEKVLPKHSLLYEYFTVYNELTKVKYVTEGMRKPAFLSGEQKKAIVDLLFKTNRKVTVKQLKEDYFKKIECFDSVEISGVEDRFNASLGTYHDLLKIIKDKDFLDNEENEDILEDIVLTLTLFEDREMIEERLKTYAHLFDDKVMKQLKRRRYTGWGRLSRKLINGIRDKQSGKTILDFLKSDGFANRNFMQLIHDDSLTFKEDIQKAQVSGQGDSLHEHIANLAGSPAIKKGILQTVKVVDELVKVMGRHKPENIVIEMARENQTTQKGQKNSRERMKRIEEGIKELGSQILKEHPVENTQLQNEKLYLYYLQNGRDMYVDQELDINRLSDYDVDHIVPQSFLKDDSIDNKVLTRSDKARGKSDNVPSEEVVKKMKNYWRQLLNAKLITQRKFDNLTKAERGGLSELDKAGFIKRQLVETRQITKHVAQILDSRMNTKYDENDKLIREVKVITLKSKLVSDFRKDFQFYKVREINNYHHAHDAYLNAVVGTALIKKYPKLESEFVYGDYKVYDVRKMIAKSEQEIGKATAKYFFYSNIMNFFKTEITLANGEIRKRPLIETNGETGEIVWDKGRDFATVRKVLSMPQVNIVKKTEVQTGGFSKESILPKRNSDKLIARKKDWDPKKYGGFDSPTVAYSVLVVAKVEKGKSKKLKSVKELLGITIMERSSFEKNPIDFLEAKGYKEVKKDLIIKLPKYSLFELENGRKRMLASAGELQKGNELALPSKYVNFLYLASHYEKLKGSPEDNEQKQLFVEQHKHYLDEIIEQISEFSKRVILADANLDKVLSAYNKHRDKPIREQAENIIHLFTLTNLGAPAAFKYFDTTIDRKRYTSTKEVLDATLIHQSITGLYETRIDLSQLGGDGGGGSPAPGGGGGTLQLEEEYRLFEPESTQKQEMDIWLKNFPQAWAETGGMGTAHCQAPVLIQLKATATPISIRQYPMPHEAYQGIKPHIRRMLDQGILKPCQSPWNTPLLPVKKPGTEDYRPVQDLREVNKRVEDIHPTVPNPYNLLSTLPPSHPWYTVLDLKDAFFCLRLHSESQLLFAFEWRDPEIGLSGQLTWTRLPQGFKNSPTLFNEALHSDLADFRVRYPALVLLQYVDDLLLAAATRTECLEGTKALLETLGNKGYRASAKKAQICLQEVTYLGYSLKDGQRWLTKARKEAILSIPVPKNSRQVREFLGTAGYCRLWIPGFAELAAPLYPLTRPGTLFQWGTEQQLAFEDIKKALLSSPALGLPDITKPFELFIDENSGFAKGVLVQKLGPWKRPVAYLSKKLDTVASGWPPCLRMVAAIAILVKDAGKLTLGQPLTILTSHPVEALVRQPPNKWLSNARMTHYQAMLLDAERVHFGPTVSLNPATLLPLPSGGNHHDCLQILAETHGTRPDLTDQPLPDADLTWYTDGSSFIRNGEREAGAAVTTESEVIWAAPLPPGTSAQRAELIALTQALKMAEGKKLTVYTDSRYAFATTHVHGEIYRRRGWLTSEGKEIKNKNEILALLEALFLPKRLSIIHCPGHQKGDSPQAKGNRLADDTAKKAATETHSSLTVLPAGKRTADGSEFEKRTADGSEFESPKKKAKVE

SEQ ID NO: 1195 - protein, 2089 aa, synthetic construct
MPAAKRVKLDGGDKKYSIGLDIGTNSVGWAVITDEYKVPSKKFKVLGNTDRHSIKKNLIGALLFDSGETAEATRLKRTARRRYTRRKNRICYLQEIFSNEMAKVDDSFFHRLEESFLVEEDKKHERHPIFGNIVDEVAYHEKYPTIYHLRKKLVDSTDKADLRLIYLALAHMIKFRGHFLIEGDLNPDNSDVDKLFIQLVQTYNQLFEENPINASGVDAKAILSARLSKSRRLENLIAQLPGEKKNGLFGNLIALSLGLTPNFKSNFDLAEDAKLQLSKDTYDDDLDNLLAQIGDQYADLFLAAKNLSDAILLSDILRVNTEITKAPLSASMIKRYDEHHQDLTLLKALVRQQLPEKYKEIFFDQSKNGYAGYIDGGASQEEFYKFIKPILEKMDGTEELLVKLNREDLLRKQRTFDNGSIPHQIHLGELHAILRRQEDFYPFLKDNREKIEKILTFRIPYYVGPLARGNSRFAWMTRKSEETITPWNFEEVVDKGASAQSFIERMTNFDKNLPNEKVLPKHSLLYEYFTVYNELTKVKYVTEGMRKPAFLSGEQKKAIVDLLFKTNRKVTVKQLKEDYFKKIECFDSVEISGVEDRFNASLGTYHDLLKIIKDKDFLDNEENEDILEDIVLTLTLFEDREMIEERLKTYAHLFDDKVMKQLKRRRYTGWGRLSRKLINGIRDKQSGKTILDFLKSDGFANRNFMQLIHDDSLTFKEDIQKAQVSGQGDSLHEHIANLAGSPAIKKGILQTVKVVDELVKVMGRHKPENIVIEMARENQTTQKGQKNSRERMKRIEEGIKELGSQILKEHPVENTQLQNEKLYLYYLQNGRDMYVDQELDINRLSDYDVDHIVPQSFLKDDSIDNKVLTRSDKARGKSDNVPSEEVVKKMKNYWRQLLNAKLITQRKFDNLTKAERGGLSELDKAGFIKRQLVETRQITKHVAQILDSRMNTKYDENDKLIREVKVITLKSKLVSDFRKDFQFYKVREINNYHHAHDAYLNAVVGTALIKKYPKLESEFVYGDYKVYDVRKMIAKSEQEIGKATAKYFFYSNIMNFFKTEITLANGEIRKRPLIETNGETGEIVWDKGRDFATVRKVLSMPQVNIVKKTEVQTGGFSKESILPKRNSDKLIARKKDWDPKKYGGFDSPTVAYSVLVVAKVEKGKSKKLKSVKELLGITIMERSSFEKNPIDFLEAKGYKEVKKDLIIKLPKYSLFELENGRKRMLASAGELQKGNELALPSKYVNFLYLASHYEKLKGSPEDNEQKQLFVEQHKHYLDEIIEQISEFSKRVILADANLDKVLSAYNKHRDKPIREQAENIIHLFTLTNLGAPAAFKYFDTTIDRKRYTSTKEVLDATLIHQSITGLYETRIDLSQLGGDGGGGGGGGGTLQLEEEYRLFEPESTQKQEMDIWLKNFPQAWAETGGMGTAHCQAPVLIQLKATATPISIRQYPMPHEAYQGIKPHIRRMLDQGILKPCQSPWNTPLLPVKKPGTEDYRPVQDLREVNKRVEDIHPTVPNPYNLLSTLPPSHPWYTVLDLKDAFFCLRLHSESQLLFAFEWRDPEIGLSGQLTWTRLPQGFKNSPTLFNEALHSDLADFRVRYPALVLLQYVDDLLLAAATRTECLEGTKALLETLGNKGYRASAKKAQICLQEVTYLGYSLKDGQRWLTKARKEAILSIPVPKNSRQVREFLGTAGYCRLWIPGFAELAAPLYPLTRPGTLFQWGTEQQLAFEDIKKALLSSPALGLPDITKPFELFIDENSGFAKGVLVQKLGPWKRPVAYLSKKLDTVASGWPPCLRMVAAIAILVKDAGKLTLGQPLTILTSHPVEALVRQPPNKWLSNARMTHYQAMLLDAERVHFGPTVSLNPATLLPLPSGGNHHDCLQILAETHGTRPDLTDQPLPDADLTWYTDGSSFIRNGEREAGAAVTTESEVIWAAPLPPGTSAQRAELIALTQALKMAEGKKLTVYTDSRYAFATTHVHGEIYRRRGWLTSEGKEIKNKNEILALLEALFLPKRLSIIHCPGHQKGDSPQAKGNRLADDTAKKAATETHSSLTVLPAGKRTADGSEFEKRTADGSEFESPKKKAKVE

SEQ ID NO: 1196 - protein, 2093 aa, synthetic construct
MPAAKRVKLDGGDKKYSIGLDIGTNSVGWAVITDEYKVPSKKFKVLGNTDRHSIKKNLIGALLFDSGETAEATRLKRTARRRYTRRKNRICYLQEIFSNEMAKVDDSFFHRLEESFLVEEDKKHERHPIFGNIVDEVAYHEKYPTIYHLRKKLVDSTDKADLRLIYLALAHMIKFRGHFLIEGDLNPDNSDVDKLFIQLVQTYNQLFEENPINASGVDAKAILSARLSKSRRLENLIAQLPGEKKNGLFGNLIALSLGLTPNFKSNFDLAEDAKLQLSKDTYDDDLDNLLAQIGDQYADLFLAAKNLSDAILLSDILRVNTEITKAPLSASMIKRYDEHHQDLTLLKALVRQQLPEKYKEIFFDQSKNGYAGYIDGGASQEEFYKFIKPILEKMDGTEELLVKLNREDLLRKQRTFDNGSIPHQIHLGELHAILRRQEDFYPFLKDNREKIEKILTFRIPYYVGPLARGNSRFAWMTRKSEETITPWNFEEVVDKGASAQSFIERMTNFDKNLPNEKVLPKHSLLYEYFTVYNELTKVKYVTEGMRKPAFLSGEQKKAIVDLLFKTNRKVTVKQLKEDYFKKIECFDSVEISGVEDRFNASLGTYHDLLKIIKDKDFLDNEENEDILEDIVLTLTLFEDREMIEERLKTYAHLFDDKVMKQLKRRRYTGWGRLSRKLINGIRDKQSGKTILDFLKSDGFANRNFMQLIHDDSLTFKEDIQKAQVSGQGDSLHEHIANLAGSPAIKKGILQTVKVVDELVKVMGRHKPENIVIEMARENQTTQKGQKNSRERMKRIEEGIKELGSQILKEHPVENTQLQNEKLYLYYLQNGRDMYVDQELDINRLSDYDVDHIVPQSFLKDDSIDNKVLTRSDKARGKSDNVPSEEVVKKMKNYWRQLLNAKLITQRKFDNLTKAERGGLSELDKAGFIKRQLVETRQITKHVAQILDSRMNTKYDENDKLIREVKVITLKSKLVSDFRKDFQFYKVREINNYHHAHDAYLNAVVGTALIKKYPKLESEFVYGDYKVYDVRKMIAKSEQEIGKATAKYFFYSNIMNFFKTEITLANGEIRKRPLIETNGETGEIVWDKGRDFATVRKVLSMPQVNIVKKTEVQTGGFSKESILPKRNSDKLIARKKDWDPKKYGGFDSPTVAYSVLVVAKVEKGKSKKLKSVKELLGITIMERSSFEKNPIDFLEAKGYKEVKKDLIIKLPKYSLFELENGRKRMLASAGELQKGNELALPSKYVNFLYLASHYEKLKGSPEDNEQKQLFVEQHKHYLDEIIEQISEFSKRVILADANLDKVLSAYNKHRDKPIREQAENIIHLFTLTNLGAPAAFKYFDTTIDRKRYTSTKEVLDATLIHQSITGLYETRIDLSQLGGDGGPAPGGSGGGGGTLQLEEEYRLFEPESTQKQEMDIWLKNFPQAWAETGGMGTAHCQAPVLIQLKATATPISIRQYPMPHEAYQGIKPHIRRMLDQGILKPCQSPWNTPLLPVKKPGTEDYRPVQDLREVNKRVEDIHPTVPNPYNLLSTLPPSHPWYTVLDLKDAFFCLRLHSESQLLFAFEWRDPEIGLSGQLTWTRLPQGFKNSPTLFNEALHSDLADFRVRYPALVLLQYVDDLLLAAATRTECLEGTKALLETLGNKGYRASAKKAQICLQEVTYLGYSLKDGQRWLTKARKEAILSIPVPKNSRQVREFLGTAGYCRLWIPGFAELAAPLYPLTRPGTLFQWGTEQQLAFEDIKKALLSSPALGLPDITKPFELFIDENSGFAKGVLVQKLGPWKRPVAYLSKKLDTVASGWPPCLRMVAAIAILVKDAGKLTLGQPLTILTSHPVEALVRQPPNKWLSNARMTHYQAMLLDAERVHFGPTVSLNPATLLPLPSGGNHHDCLQILAETHGTRPDLTDQPLPDADLTWYTDGSSFIRNGEREAGAAVTTESEVIWAAPLPPGTSAQRAELIALTQALKMAEGKKLTVYTDSRYAFATTHVHGEIYRRRGWLTSEGKEIKNKNEILALLEALFLPKRLSIIHCPGHQKGDSPQAKGNRLADDTAKKAATETHSSLTVLPAGKRTADGSEFEKRTADGSEFESPKKKAKVE

SEQ ID NO: 1197 - protein, 2130 aa, synthetic construct
MPAAKRVKLDGGDKKYSIGLDIGTNSVGWAVITDEYKVPSKKFKVLGNTDRHSIKKNLIGALLFDSGETAEATRLKRTARRRYTRRKNRICYLQEIFSNEMAKVDDSFFHRLEESFLVEEDKKHERHPIFGNIVDEVAYHEKYPTIYHLRKKLVDSTDKADLRLIYLALAHMIKFRGHFLIEGDLNPDNSDVDKLFIQLVQTYNQLFEENPINASGVDAKAILSARLSKSRRLENLIAQLPGEKKNGLFGNLIALSLGLTPNFKSNFDLAEDAKLQLSKDTYDDDLDNLLAQIGDQYADLFLAAKNLSDAILLSDILRVNTEITKAPLSASMIKRYDEHHQDLTLLKALVRQQLPEKYKEIFFDQSKNGYAGYIDGGASQEEFYKFIKPILEKMDGTEELLVKLNREDLLRKQRTFDNGSIPHQIHLGELHAILRRQEDFYPFLKDNREKIEKILTFRIPYYVGPLARGNSRFAWMTRKSEETITPWNFEEVVDKGASAQSFIERMTNFDKNLPNEKVLPKHSLLYEYFTVYNELTKVKYVTEGMRKPAFLSGEQKKAIVDLLFKTNRKVTVKQLKEDYFKKIECFDSVEISGVEDRFNASLGTYHDLLKIIKDKDFLDNEENEDILEDIVLTLTLFEDREMIEERLKTYAHLFDDKVMKQLKRRRYTGWGRLSRKLINGIRDKQSGKTILDFLKSDGFANRNFMQLIHDDSLTFKEDIQKAQVSGQGDSLHEHIANLAGSPAIKKGILQTVKVVDELVKVMGRHKPENIVIEMARENQTTQKGQKNSRERMKRIEEGIKELGSQILKEHPVENTQLQNEKLYLYYLQNGRDMYVDQELDINRLSDYDVDHIVPQSFLKDDSIDNKVLTRSDKARGKSDNVPSEEVVKKMKNYWRQLLNAKLITQRKFDNLTKAERGGLSELDKAGFIKRQLVETRQITKHVAQILDSRMNTKYDENDKLIREVKVITLKSKLVSDFRKDFQFYKVREINNYHHAHDAYLNAVVGTALIKKYPKLESEFVYGDYKVYDVRKMIAKSEQEIGKATAKYFFYSNIMNFFKTEITLANGEIRKRPLIETNGETGEIVWDKGRDFATVRKVLSMPQVNIVKKTEVQTGGFSKESILPKRNSDKLIARKKDWDPKKYGGFDSPTVAYSVLVVAKVEKGKSKKLKSVKELLGITIMERSSFEKNPIDFLEAKGYKEVKKDLIIKLPKYSLFELENGRKRMLASAGELQKGNELALPSKYVNFLYLASHYEKLKGSPEDNEQKQLFVEQHKHYLDEIIEQISEFSKRVILADANLDKVLSAYNKHRDKPIREQAENIIHLFTLTNLGAPAAFKYFDTTIDRKRYTSTKEVLDATLIHQSITGLYETRIDLSQLGGDGGAEAAAKEAAAKEAAAKEAAAKALEAEAAAKEAAAKEAAAKEAAAKAGGTLQLEEEYRLFEPESTQKQEMDIWLKNFPQAWAETGGMGTAHCQAPVLIQLKATATPISIRQYPMPHEAYQGIKPHIRRMLDQGILKPCQSPWNTPLLPVKKPGTEDYRPVQDLREVNKRVEDIHPTVPNPYNLLSTLPPSHPWYTVLDLKDAFFCLRLHSESQLLFAFEWRDPEIGLSGQLTWTRLPQGFKNSPTLFNEALHSDLADFRVRYPALVLLQYVDDLLLAAATRTECLEGTKALLETLGNKGYRASAKKAQICLQEVTYLGYSLKDGQRWLTKARKEAILSIPVPKNSRQVREFLGKAGYCRLFIPGFAELAAPLYPLTRPGTLFQWGTEQQLAFEDIKKALLSSPALGLPDITKPFELFIDENSGFAKGVLVQKLGPWKRPVAYLSKKLDTVASGWPPCLRMVAAIAILVKDAGKLTLGQPLTILTSHPVEALVRQPPNKWLSNARMTHYQAMLLDAERVHFGPTVSLNPATLLPLPSGGNHHDCLQILAETHGTRPDLTDQPLPDADLTWYTDGSSFIRNGEREAGAAVTTESEVIWAAPLPPGTSAQRAELIALTQALKMAEGKKLTVYTDSRYAFATTHVHGEIYRRRGWLTSEGKEIKNKNEILALLEALFLPKRLSIIHCPGHQKGDSPQAKGNRLADDTAKKAATETHSSLTVLPAGKRTADGSEFEKRTADGSEFESPKKKAKVE

SEQ ID NO: 1198 - protein, 2104 aa, synthetic construct
MPAAKRVKLDGGDKKYSIGLDIGTNSVGWAVITDEYKVPSKKFKVLGNTDRHSIKKNLIGALLFDSGETAEATRLKRTARRRYTRRKNRICYLQEIFSNEMAKVDDSFFHRLEESFLVEEDKKHERHPIFGNIVDEVAYHEKYPTIYHLRKKLVDSTDKADLRLIYLALAHMIKFRGHFLIEGDLNPDNSDVDKLFIQLVQTYNQLFEENPINASGVDAKAILSARLSKSRRLENLIAQLPGEKKNGLFGNLIALSLGLTPNFKSNFDLAEDAKLQLSKDTYDDDLDNLLAQIGDQYADLFLAAKNLSDAILLSDILRVNTEITKAPLSASMIKRYDEHHQDLTLLKALVRQQLPEKYKEIFFDQSKNGYAGYIDGGASQEEFYKFIKPILEKMDGTEELLVKLNREDLLRKQRTFDNGSIPHQIHLGELHAILRRQEDFYPFLKDNREKIEKILTFRIPYYVGPLARGNSRFAWMTRKSEETITPWNFEEVVDKGASAQSFIERMTNFDKNLPNEKVLPKHSLLYEYFTVYNELTKVKYVTEGMRKPAFLSGEQKKAIVDLLFKTNRKVTVKQLKEDYFKKIECFDSVEISGVEDRFNASLGTYHDLLKIIKDKDFLDNEENEDILEDIVLTLTLFEDREMIEERLKTYAHLFDDKVMKQLKRRRYTGWGRLSRKLINGIRDKQSGKTILDFLKSDGFANRNFMQLIHDDSLTFKEDIQKAQVSGQGDSLHEHIANLAGSPAIKKGILQTVKVVDELVKVMGRHKPENIVIEMARENQTTQKGQKNSRERMKRIEEGIKELGSQILKEHPVENTQLQNEKLYLYYLQNGRDMYVDQELDINRLSDYDVDHIVPQSFLKDDSIDNKVLTRSDKARGKSDNVPSEEVVKKMKNYWRQLLNAKLITQRKFDNLTKAERGGLSELDKAGFIKRQLVETRQITKHVAQILDSRMNTKYDENDKLIREVKVITLKSKLVSDFRKDFQFYKVREINNYHHAHDAYLNAVVGTALIKKYPKLESEFVYGDYKVYDVRKMIAKSEQEIGKATAKYFFYSNIMNFFKTEITLANGEIRKRPLIETNGETGEIVWDKGRDFATVRKVLSMPQVNIVKKTEVQTGGFSKESILPKRNSDKLIARKKDWDPKKYGGFDSPTVAYSVLVVAKVEKGKSKKLKSVKELLGITIMERSSFEKNPIDFLEAKGYKEVKKDLIIKLPKYSLFELENGRKRMLASAGELQKGNELALPSKYVNFLYLASHYEKLKGSPEDNEQKQLFVEQHKHYLDEIIEQISEFSKRVILADANLDKVLSAYNKHRDKPIREQAENIIHLFTLTNLGAPAAFKYFDTTIDRKRYTSTKEVLDATLIHQSITGLYETRIDLSQLGGDGGEAAAKEAAAKEAAAKEAAAKGGTLQLEEEYRLFEPESTQKQEMDIWLKNFPQAWAETGGMGTAHCQAPVLIQLKATATPISIRQYPMPHEAYQGIKPHIRRMLDQGILKPCQSPWNTPLLPVKKPGTEDYRPVQDLREVNKRVEDIHPTVPNPYNLLSTLPPSHPWYTVLDLKDAFFCLRLHSESQLLFAFEWRDPEIGLSGQLTWTRLPQGFKNSPTLFNEALHSDLADFRVRYPALVLLQYVDDLLLAAATRTECLEGTKALLETLGNKGYRASAKKAQICLQEVTYLGYSLKDGQRWLTKARKEAILSIPVPKNSRQVREFLGKAGYCRLFIPGFAELAAPLYPLTRPGTLFQWGTEQQLAFEDIKKALLSSPALGLPDITKPFELFIDENSGFAKGVLVQKLGPWKRPVAYLSKKLDTVASGWPPCLRMVAAIAILVKDAGKLTLGQPLTILTSHPVEALVRQPPNKWLSNARMTHYQAMLLDAERVHFGPTVSLNPATLLPLPSGGNHHDCLQILAETHGTRPDLTDQPLPDADLTWYTDGSSFIRNGEREAGAAVTTESEVIWAAPLPPGTSAQRAELIALTQALKMAEGKKLTVYTDSRYAFATTHVHGEIYRRRGWLTSEGKEIKNKNEILALLEALFLPKRLSIIHCPGHQKGDSPQAKGNRLADDTAKKAATETHSSLTVLPAGKRTADGSEFEKRTADGSEFESPKKKAKVE

SEQ ID NO: 1199 - protein, 2114 aa, synthetic construct
MPAAKRVKLDGGDKKYSIGLDIGTNSVGWAVITDEYKVPSKKFKVLGNTDRHSIKKNLIGALLFDSGETAEATRLKRTARRRYTRRKNRICYLQEIFSNEMAKVDDSFFHRLEESFLVEEDKKHERHPIFGNIVDEVAYHEKYPTIYHLRKKLVDSTDKADLRLIYLALAHMIKFRGHFLIEGDLNPDNSDVDKLFIQLVQTYNQLFEENPINASGVDAKAILSARLSKSRRLENLIAQLPGEKKNGLFGNLIALSLGLTPNFKSNFDLAEDAKLQLSKDTYDDDLDNLLAQIGDQYADLFLAAKNLSDAILLSDILRVNTEITKAPLSASMIKRYDEHHQDLTLLKALVRQQLPEKYKEIFFDQSKNGYAGYIDGGASQEEFYKFIKPILEKMDGTEELLVKLNREDLLRKQRTFDNGSIPHQIHLGELHAILRRQEDFYPFLKDNREKIEKILTFRIPYYVGPLARGNSRFAWMTRKSEETITPWNFEEVVDKGASAQSFIERMTNFDKNLPNEKVLPKHSLLYEYFTVYNELTKVKYVTEGMRKPAFLSGEQKKAIVDLLFKTNRKVTVKQLKEDYFKKIECFDSVEISGVEDRFNASLGTYHDLLKIIKDKDFLDNEENEDILEDIVLTLTLFEDREMIEERLKTYAHLFDDKVMKQLKRRRYTGWGRLSRKLINGIRDKQSGKTILDFLKSDGFANRNFMQLIHDDSLTFKEDIQKAQVSGQGDSLHEHIANLAGSPAIKKGILQTVKVVDELVKVMGRHKPENIVIEMARENQTTQKGQKNSRERMKRIEEGIKELGSQILKEHPVENTQLQNEKLYLYYLQNGRDMYVDQELDINRLSDYDVDHIVPQSFLKDDSIDNKVLTRSDKARGKSDNVPSEEVVKKMKNYWRQLLNAKLITQRKFDNLTKAERGGLSELDKAGFIKRQLVETRQITKHVAQILDSRMNTKYDENDKLIREVKVITLKSKLVSDFRKDFQFYKVREINNYHHAHDAYLNAVVGTALIKKYPKLESEFVYGDYKVYDVRKMIAKSEQEIGKATAKYFFYSNIMNFFKTEITLANGEIRKRPLIETNGETGEIVWDKGRDFATVRKVLSMPQVNIVKKTEVQTGGFSKESILPKRNSDKLIARKKDWDPKKYGGFDSPTVAYSVLVVAKVEKGKSKKLKSVKELLGITIMERSSFEKNPIDFLEAKGYKEVKKDLIIKLPKYSLFELENGRKRMLASAGELQKGNELALPSKYVNFLYLASHYEKLKGSPEDNEQKQLFVEQHKHYLDEIIEQISEFSKRVILADANLDKVLSAYNKHRDKPIREQAENIIHLFTLTNLGAPAAFKYFDTTIDRKRYTSTKEVLDATLIHQSITGLYETRIDLSQLGGDGGEAAAKEAAAKEAAAKEAAAKEAAAKEAAAKGGTLQLEEEYRLFEPESTQKQEMDIWLKNFPQAWAETGGMGTAHCQAPVLIQLKATATPISIRQYPMPHEAYQGIKPHIRRMLDQGILKPCQSPWNTPLLPVKKPGTEDYRPVQDLREVNKRVEDIHPTVPNPYNLLSTLPPSHPWYTVLDLKDAFFCLRLHSESQLLFAFEWRDPEIGLSGQLTWTRLPQGFKNSPTLFNEALHSDLADFRVRYPALVLLQYVDDLLLAAATRTECLEGTKALLETLGNKGYRASAKKAQICLQEVTYLGYSLKDGQRWLTKARKEAILSIPVPKNSRQVREFLGKAGYCRLFIPGFAELAAPLYPLTRPGTLFQWGTEQQLAFEDIKKALLSSPALGLPDITKPFELFIDENSGFAKGVLVQKLGPWKRPVAYLSKKLDTVASGWPPCLRMVAAIAILVKDAGKLTLGQPLTILTSHPVEALVRQPPNKWLSNARMTHYQAMLLDAERVHFGPTVSLNPATLLPLPSGGNHHDCLQILAETHGTRPDLTDQPLPDADLTWYTDGSSFIRNGEREAGAAVTTESEVIWAAPLPPGTSAQRAELIALTQALKMAEGKKLTVYTDSRYAFATTHVHGEIYRRRGWLTSEGKEIKNKNEILALLEALFLPKRLSIIHCPGHQKGDSPQAKGNRLADDTAKKAATETHSSLTVLPAGKRTADGSEFEKRTADGSEFESPKKKAKVE

SEQ ID NO: 1200 - protein, 2095 aa, synthetic construct
MPAAKRVKLDGGDKKYSIGLDIGTNSVGWAVITDEYKVPSKKFKVLGNTDRHSIKKNLIGALLFDSGETAEATRLKRTARRRYTRRKNRICYLQEIFSNEMAKVDDSFFHRLEESFLVEEDKKHERHPIFGNIVDEVAYHEKYPTIYHLRKKLVDSTDKADLRLIYLALAHMIKFRGHFLIEGDLNPDNSDVDKLFIQLVQTYNQLFEENPINASGVDAKAILSARLSKSRRLENLIAQLPGEKKNGLFGNLIALSLGLTPNFKSNFDLAEDAKLQLSKDTYDDDLDNLLAQIGDQYADLFLAAKNLSDAILLSDILRVNTEITKAPLSASMIKRYDEHHQDLTLLKALVRQQLPEKYKEIFFDQSKNGYAGYIDGGASQEEFYKFIKPILEKMDGTEELLVKLNREDLLRKQRTFDNGSIPHQIHLGELHAILRRQEDFYPFLKDNREKIEKILTFRIPYYVGPLARGNSRFAWMTRKSEETITPWNFEEVVDKGASAQSFIERMTNFDKNLPNEKVLPKHSLLYEYFTVYNELTKVKYVTEGMRKPAFLSGEQKKAIVDLLFKTNRKVTVKQLKEDYFKKIECFDSVEISGVEDRFNASLGTYHDLLKIIKDKDFLDNEENEDILEDIVLTLTLFEDREMIEERLKTYAHLFDDKVMKQLKRRRYTGWGRLSRKLINGIRDKQSGKTILDFLKSDGFANRNFMQLIHDDSLTFKEDIQKAQVSGQGDSLHEHIANLAGSPAIKKGILQTVKVVDELVKVMGRHKPENIVIEMARENQTTQKGQKNSRERMKRIEEGIKELGSQILKEHPVENTQLQNEKLYLYYLQNGRDMYVDQELDINRLSDYDVDHIVPQSFLKDDSIDNKVLTRSDKARGKSDNVPSEEVVKKMKNYWRQLLNAKLITQRKFDNLTKAERGGLSELDKAGFIKRQLVETRQITKHVAQILDSRMNTKYDENDKLIREVKVITLKSKLVSDFRKDFQFYKVREINNYHHAHDAYLNAVVGTALIKKYPKLESEFVYGDYKVYDVRKMIAKSEQEIGKATAKYFFYSNIMNFFKTEITLANGEIRKRPLIETNGETGEIVWDKGRDFATVRKVLSMPQVNIVKKTEVQTGGFSKESILPKRNSDKLIARKKDWDPKKYGGFDSPTVAYSVLVVAKVEKGKSKKLKSVKELLGITIMERSSFEKNPIDFLEAKGYKEVKKDLIIKLPKYSLFELENGRKRMLASAGELQKGNELALPSKYVNFLYLASHYEKLKGSPEDNEQKQLFVEQHKHYLDEIIEQISEFSKRVILADANLDKVLSAYNKHRDKPIREQAENIIHLFTLTNLGAPAAFKYFDTTIDRKRYTSTKEVLDATLIHQSITGLYETRIDLSQLGGDGGPAPEAAAKGGGGGTLQLEEEYRLFEPESTQKQEMDIWLKNFPQAWAETGGMGTAHCQAPVLIQLKATATPISIRQYPMPHEAYQGIKPHIRRMLDQGILKPCQSPWNTPLLPVKKPGTEDYRPVQDLREVNKRVEDIHPTVPNPYNLLSTLPPSHPWYTVLDLKDAFFCLRLHSESQLLFAFEWRDPEIGLSGQLTWTRLPQGFKNSPTLFNEALHSDLADFRVRYPALVLLQYVDDLLLAAATRTECLEGTKALLETLGNKGYRASAKKAQICLQEVTYLGYSLKDGQRWLTKARKEAILSIPVPKNSRQVREFLGKAGYCRLFIPGFAELAAPLYPLTRPGTLFQWGTEQQLAFEDIKKALLSSPALGLPDITKPFELFIDENSGFAKGVLVQKLGPWKRPVAYLSKKLDTVASGWPPCLRMVAAIAILVKDAGKLTLGQPLTILTSHPVEALVRQPPNKWLSNARMTHYQAMLLDAERVHFGPTVSLNPATLLPLPSGGNHHDCLQILAETHGTRPDLTDQPLPDADLTWYTDGSSFIRNGEREAGAAVTTESEVIWAAPLPPGTSAQRAELIALTQALKMAEGKKLTVYTDSRYAFATTHVHGEIYRRRGWLTSEGKEIKNKNEILALLEALFLPKRLSIIHCPGHQKGDSPQAKGNRLADDTAKKAATETHSSLTVLPAGKRTADGSEFEKRTADGSEFESPKKKAKVE

SEQ ID NO: 1201 - protein, 2095 aa, synthetic construct
MPAAKRVKLDGGDKKYSIGLDIGTNSVGWAVITDEYKVPSKKFKVLGNTDRHSIKKNLIGALLFDSGETAEATRLKRTARRRYTRRKNRICYLQEIFSNEMAKVDDSFFHRLEESFLVEEDKKHERHPIFGNIVDEVAYHEKYPTIYHLRKKLVDSTDKADLRLIYLALAHMIKFRGHFLIEGDLNPDNSDVDKLFIQLVQTYNQLFEENPINASGVDAKAILSARLSKSRRLENLIAQLPGEKKNGLFGNLIALSLGLTPNFKSNFDLAEDAKLQLSKDTYDDDLDNLLAQIGDQYADLFLAAKNLSDAILLSDILRVNTEITKAPLSASMIKRYDEHHQDLTLLKALVRQQLPEKYKEIFFDQSKNGYAGYIDGGASQEEFYKFIKPILEKMDGTEELLVKLNREDLLRKQRTFDNGSIPHQIHLGELHAILRRQEDFYPFLKDNREKIEKILTFRIPYYVGPLARGNSRFAWMTRKSEETITPWNFEEVVDKGASAQSFIERMTNFDKNLPNEKVLPKHSLLYEYFTVYNELTKVKYVTEGMRKPAFLSGEQKKAIVDLLFKTNRKVTVKQLKEDYFKKIECFDSVEISGVEDRFNASLGTYHDLLKIIKDKDFLDNEENEDILEDIVLTLTLFEDREMIEERLKTYAHLFDDKVMKQLKRRRYTGWGRLSRKLINGIRDKQSGKTILDFLKSDGFANRNFMQLIHDDSLTFKEDIQKAQVSGQGDSLHEHIANLAGSPAIKKGILQTVKVVDELVKVMGRHKPENIVIEMARENQTTQKGQKNSRERMKRIEEGIKELGSQILKEHPVENTQLQNEKLYLYYLQNGRDMYVDQELDINRLSDYDVDHIVPQSFLKDDSIDNKVLTRSDKARGKSDNVPSEEVVKKMKNYWRQLLNAKLITQRKFDNLTKAERGGLSELDKAGFIKRQLVETRQITKHVAQILDSRMNTKYDENDKLIREVKVITLKSKLVSDFRKDFQFYKVREINNYHHAHDAYLNAVVGTALIKKYPKLESEFVYGDYKVYDVRKMIAKSEQEIGKATAKYFFYSNIMNFFKTEITLANGEIRKRPLIETNGETGEIVWDKGRDFATVRKVLSMPQVNIVKKTEVQTGGFSKESILPKRNSDKLIARKKDWDPKKYGGFDSPTVAYSVLVVAKVEKGKSKKLKSVKELLGITIMERSSFEKNPIDFLEAKGYKEVKKDLIIKLPKYSLFELENGRKRMLASAGELQKGNELALPSKYVNFLYLASHYEKLKGSPEDNEQKQLFVEQHKHYLDEIIEQISEFSKRVILADANLDKVLSAYNKHRDKPIREQAENIIHLFTLTNLGAPAAFKYFDTTIDRKRYTSTKEVLDATLIHQSITGLYETRIDLSQLGGDGGEAAAKGSSPAPGGTLQLEEEYRLFEPESTQKQEMDIWLKNFPQAWAETGGMGTAHCQAPVLIQLKATATPISIRQYPMPHEAYQGIKPHIRRMLDQGILKPCQSPWNTPLLPVKKPGTEDYRPVQDLREVNKRVEDIHPTVPNPYNLLSTLPPSHPWYTVLDLKDAFFCLRLHSESQLLFAFEWRDPEIGLSGQLTWTRLPQGFKNSPTLFNEALHSDLADFRVRYPALVLLQYVDDLLLAAATRTECLEGTKALLETLGNKGYRASAKKAQICLQEVTYLGYSLKDGQRWLTKARKEAILSIPVPKNSRQVREFLGKAGYCRLFIPGFAELAAPLYPLTRPGTLFQWGTEQQLAFEDIKKALLSSPALGLPDITKPFELFIDENSGFAKGVLVQKLGPWKRPVAYLSKKLDTVASGWPPCLRMVAAIAILVKDAGKLTLGQPLTILTSHPVEALVRQPPNKWLSNARMTHYQAMLLDAERVHFGPTVSLNPATLLPLPSGGNHHDCLQILAETHGTRPDLTDQPLPDADLTWYTDGSSFIRNGEREAGAAVTTESEVIWAAPLPPGTSAQRAELIALTQALKMAEGKKLTVYTDSRYAFATTHVHGEIYRRRGWLTSEGKEIKNKNEILALLEALFLPKRLSIIHCPGHQKGDSPQAKGNRLADDTAKKAATETHSSLTVLPAGKRTADGSEFEKRTADGSEFESPKKKAKVE

SEQ ID NO: 1202 - protein, 2109 aa, synthetic construct
MPAAKRVKLDGGDKKYSIGLDIGTNSVGWAVITDEYKVPSKKFKVLGNTDRHSIKKNLIGALLFDSGETAEATRLKRTARRRYTRRKNRICYLQEIFSNEMAKVDDSFFHRLEESFLVEEDKKHERHPIFGNIVDEVAYHEKYPTIYHLRKKLVDSTDKADLRLIYLALAHMIKFRGHFLIEGDLNPDNSDVDKLFIQLVQTYNQLFEENPINASGVDAKAILSARLSKSRRLENLIAQLPGEKKNGLFGNLIALSLGLTPNFKSNFDLAEDAKLQLSKDTYDDDLDNLLAQIGDQYADLFLAAKNLSDAILLSDILRVNTEITKAPLSASMIKRYDEHHQDLTLLKALVRQQLPEKYKEIFFDQSKNGYAGYIDGGASQEEFYKFIKPILEKMDGTEELLVKLNREDLLRKQRTFDNGSIPHQIHLGELHAILRRQEDFYPFLKDNREKIEKILTFRIPYYVGPLARGNSRFAWMTRKSEETITPWNFEEVVDKGASAQSFIERMTNFDKNLPNEKVLPKHSLLYEYFTVYNELTKVKYVTEGMRKPAFLSGEQKKAIVDLLFKTNRKVTVKQLKEDYFKKIECFDSVEISGVEDRFNASLGTYHDLLKIIKDKDFLDNEENEDILEDIVLTLTLFEDREMIEERLKTYAHLFDDKVMKQLKRRRYTGWGRLSRKLINGIRDKQSGKTILDFLKSDGFANRNFMQLIHDDSLTFKEDIQKAQVSGQGDSLHEHIANLAGSPAIKKGILQTVKVVDELVKVMGRHKPENIVIEMARENQTTQKGQKNSRERMKRIEEGIKELGSQILKEHPVENTQLQNEKLYLYYLQNGRDMYVDQELDINRLSDYDVDHIVPQSFLKDDSIDNKVLTRSDKARGKSDNVPSEEVVKKMKNYWRQLLNAKLITQRKFDNLTKAERGGLSELDKAGFIKRQLVETRQITKHVAQILDSRMNTKYDENDKLIREVKVITLKSKLVSDFRKDFQFYKVREINNYHHAHDAYLNAVVGTALIKKYPKLESEFVYGDYKVYDVRKMIAKSEQEIGKATAKYFFYSNIMNFFKTEITLANGEIRKRPLIETNGETGEIVWDKGRDFATVRKVLSMPQVNIVKKTEVQTGGFSKESILPKRNSDKLIARKKDWDPKKYGGFDSPTVAYSVLVVAKVEKGKSKKLKSVKELLGITIMERSSFEKNPIDFLEAKGYKEVKKDLIIKLPKYSLFELENGRKRMLASAGELQKGNELALPSKYVNFLYLASHYEKLKGSPEDNEQKQLFVEQHKHYLDEIIEQISEFSKRVILADANLDKVLSAYNKHRDKPIREQAENIIHLFTLTNLGAPAAFKYFDTTIDRKRYTSTKEVLDATLIHQSITGLYETRIDLSQLGGDGGGGGGSGGGGSGGGGSGGGGSGGGGSGGTLQLEEEYRLFEPESTQKQEMDIWLKNFPQAWAETGGMGTAHCQAPVLIQLKATATPISIRQYPMPHEAYQGIKPHIRRMLDQGILKPCQSPWNTPLLPVKKPGTEDYRPVQDLREVNKRVEDIHPTVPNPYNLLSTLPPSHPWYTVLDLKDAFFCLRLHSESQLLFAFEWRDPEIGLSGQLTWTRLPQGFKNSPTLFNEALHSDLADFRVRYPALVLLQYVDDLLLAAATRTECLEGTKALLETLGNKGYRASAKKAQICLQEVTYLGYSLKDGQRWLTKARKEAILSIPVPKNSRQVREFLGKAGYCRLFIPGFAELAAPLYPLTRPGTLFQWGTEQQLAFEDIKKALLSSPALGLPDITKPFELFIDENSGFAKGVLVQKLGPWKRPVAYLSKKLDTVASGWPPCLRMVAAIAILVKDAGKLTLGQPLTILTSHPVEALVRQPPNKWLSNARMTHYQAMLLDAERVHFGPTVSLNPATLLPLPSGGNHHDCLQILAETHGTRPDLTDQPLPDADLTWYTDGSSFIRNGEREAGAAVTTESEVIWAAPLPPGTSAQRAELIALTQALKMAEGKKLTVYTDSRYAFATTHVHGEIYRRRGWLTSEGKEIKNKNEILALLEALFLPKRLSIIHCPGHQKGDSPQAKGNRLADDTAKKAATETHSSLTVLPAGKRTADGSEFEKRTADGSEFESPKKKAKVE

SEQ ID NO: 1203 - protein, 2099 aa, synthetic construct
MPAAKRVKLDGGDKKYSIGLDIGTNSVGWAVITDEYKVPSKKFKVLGNTDRHSIKKNLIGALLFDSGETAEATRLKRTARRRYTRRKNRICYLQEIFSNEMAKVDDSFFHRLEESFLVEEDKKHERHPIFGNIVDEVAYHEKYPTIYHLRKKLVDSTDKADLRLIYLALAHMIKFRGHFLIEGDLNPDNSDVDKLFIQLVQTYNQLFEENPINASGVDAKAILSARLSKSRRLENLIAQLPGEKKNGLFGNLIALSLGLTPNFKSNFDLAEDAKLQLSKDTYDDDLDNLLAQIGDQYADLFLAAKNLSDAILLSDILRVNTEITKAPLSASMIKRYDEHHQDLTLLKALVRQQLPEKYKEIFFDQSKNGYAGYIDGGASQEEFYKFIKPILEKMDGTEELLVKLNREDLLRKQRTFDNGSIPHQIHLGELHAILRRQEDFYPFLKDNREKIEKILTFRIPYYVGPLARGNSRFAWMTRKSEETITPWNFEEVVDKGASAQSFIERMTNFDKNLPNEKVLPKHSLLYEYFTVYNELTKVKYVTEGMRKPAFLSGEQKKAIVDLLFKTNRKVTVKQLKEDYFKKIECFDSVEISGVEDRFNASLGTYHDLLKIIKDKDFLDNEENEDILEDIVLTLTLFEDREMIEERLKTYAHLFDDKVMKQLKRRRYTGWGRLSRKLINGIRDKQSGKTILDFLKSDGFANRNFMQLIHDDSLTFKEDIQKAQVSGQGDSLHEHIANLAGSPAIKKGILQTVKVVDELVKVMGRHKPENIVIEMARENQTTQKGQKNSRERMKRIEEGIKELGSQILKEHPVENTQLQNEKLYLYYLQNGRDMYVDQELDINRLSDYDVDHIVPQSFLKDDSIDNKVLTRSDKARGKSDNVPSEEVVKKMKNYWRQLLNAKLITQRKFDNLTKAERGGLSELDKAGFIKRQLVETRQITKHVAQILDSRMNTKYDENDKLIREVKVITLKSKLVSDFRKDFQFYKVREINNYHHAHDAYLNAVVGTALIKKYPKLESEFVYGDYKVYDVRKMIAKSEQEIGKATAKYFFYSNIMNFFKTEITLANGEIRKRPLIETNGETGEIVWDKGRDFATVRKVLSMPQVNIVKKTEVQTGGFSKESILPKRNSDKLIARKKDWDPKKYGGFDSPTVAYSVLVVAKVEKGKSKKLKSVKELLGITIMERSSFEKNPIDFLEAKGYKEVKKDLIIKLPKYSLFELENGRKRMLASAGELQKGNELALPSKYVNFLYLASHYEKLKGSPEDNEQKQLFVEQHKHYLDEIIEQISEFSKRVILADANLDKVLSAYNKHRDKPIREQAENIIHLFTLTNLGAPAAFKYFDTTIDRKRYTSTKEVLDATLIHQSITGLYETRIDLSQLGGDGGGGGGSEAAAKGGGGSGGTLQLEEEYRLFEPESTQKQEMDIWLKNFPQAWAETGGMGTAHCQAPVLIQLKATATPISIRQYPMPHEAYQGIKPHIRRMLDQGILKPCQSPWNTPLLPVKKPGTEDYRPVQDLREVNKRVEDIHPTVPNPYNLLSTLPPSHPWYTVLDLKDAFFCLRLHSESQLLFAFEWRDPEIGLSGQLTWTRLPQGFKNSPTLFNEALHSDLADFRVRYPALVLLQYVDDLLLAAATRTECLEGTKALLETLGNKGYRASAKKAQICLQEVTYLGYSLKDGQRWLTKARKEAILSIPVPKNSRQVREFLGKAGYCRLFIPGFAELAAPLYPLTRPGTLFQWGTEQQLAFEDIKKALLSSPALGLPDITKPFELFIDENSGFAKGVLVQKLGPWKRPVAYLSKKLDTVASGWPPCLRMVAAIAILVKDAGKLTLGQPLTILTSHPVEALVRQPPNKWLSNARMTHYQAMLLDAERVHFGPTVSLNPATLLPLPSGGNHHDCLQILAETHGTRPDLTDQPLPDADLTWYTDGSSFIRNGEREAGAAVTTESEVIWAAPLPPGTSAQRAELIALTQALKMAEGKKLTVYTDSRYAFATTHVHGEIYRRRGWLTSEGKEIKNKNEILALLEALFLPKRLSIIHCPGHQKGDSPQAKGNRLADDTAKKAATETHSSLTVLPAGKRTADGSEFEKRTADGSEFESPKKKAKVE

SEQ ID NO: 1204 - protein, 2092 aa, synthetic construct
MPAAKRVKLDGGDKKYSIGLDIGTNSVGWAVITDEYKVPSKKFKVLGNTDRHSIKKNLIGALLFDSGETAEATRLKRTARRRYTRRKNRICYLQEIFSNEMAKVDDSFFHRLEESFLVEEDKKHERHPIFGNIVDEVAYHEKYPTIYHLRKKLVDSTDKADLRLIYLALAHMIKFRGHFLIEGDLNPDNSDVDKLFIQLVQTYNQLFEENPINASGVDAKAILSARLSKSRRLENLIAQLPGEKKNGLFGNLIALSLGLTPNFKSNFDLAEDAKLQLSKDTYDDDLDNLLAQIGDQYADLFLAAKNLSDAILLSDILRVNTEITKAPLSASMIKRYDEHHQDLTLLKALVRQQLPEKYKEIFFDQSKNGYAGYIDGGASQEEFYKFIKPILEKMDGTEELLVKLNREDLLRKQRTFDNGSIPHQIHLGELHAILRRQEDFYPFLKDNREKIEKILTFRIPYYVGPLARGNSRFAWMTRKSEETITPWNFEEVVDKGASAQSFIERMTNFDKNLPNEKVLPKHSLLYEYFTVYNELTKVKYVTEGMRKPAFLSGEQKKAIVDLLFKTNRKVTVKQLKEDYFKKIECFDSVEISGVEDRFNASLGTYHDLLKIIKDKDFLDNEENEDILEDIVLTLTLFEDREMIEERLKTYAHLFDDKVMKQLKRRRYTGWGRLSRKLINGIRDKQSGKTILDFLKSDGFANRNFMQLIHDDSLTFKEDIQKAQVSGQGDSLHEHIANLAGSPAIKKGILQTVKVVDELVKVMGRHKPENIVIEMARENQTTQKGQKNSRERMKRIEEGIKELGSQILKEHPVENTQLQNEKLYLYYLQNGRDMYVDQELDINRLSDYDVDHIVPQSFLKDDSIDNKVLTRSDKARGKSDNVPSEEVVKKMKNYWRQLLNAKLITQRKFDNLTKAERGGLSELDKAGFIKRQLVETRQITKHVAQILDSRMNTKYDENDKLIREVKVITLKSKLVSDFRKDFQFYKVREINNYHHAHDAYLNAVVGTALIKKYPKLESEFVYGDYKVYDVRKMIAKSEQEIGKATAKYFFYSNIMNFFKTEITLANGEIRKRPLIETNGETGEIVWDKGRDFATVRKVLSMPQVNIVKKTEVQTGGFSKESILPKRNSDKLIARKKDWDPKKYGGFDSPTVAYSVLVVAKVEKGKSKKLKSVKELLGITIMERSSFEKNPIDFLEAKGYKEVKKDLIIKLPKYSLFELENGRKRMLASAGELQKGNELALPSKYVNFLYLASHYEKLKGSPEDNEQKQLFVEQHKHYLDEIIEQISEFSKRVILADANLDKVLSAYNKHRDKPIREQAENIIHLFTLTNLGAPAAFKYFDTTIDRKRYTSTKEVLDATLIHQSITGLYETRIDLSQLGGDGGGGSEAAAKGGTLQLEEEYRLFEPESTQKQEMDIWLKNFPQAWAETGGMGTAHCQAPVLIQLKATATPISIRQYPMPHEAYQGIKPHIRRMLDQGILKPCQSPWNTPLLPVKKPGTEDYRPVQDLREVNKRVEDIHPTVPNPYNLLSTLPPSHPWYTVLDLKDAFFCLRLHSESQLLFAFEWRDPEIGLSGQLTWTRLPQGFKNSPTLFNEALHSDLADFRVRYPALVLLQYVDDLLLAAATRTECLEGTKALLETLGNKGYRASAKKAQICLQEVTYLGYSLKDGQRWLTKARKEAILSIPVPKNSRQVREFLGKAGYCRLFIPGFAELAAPLYPLTRPGTLFQWGTEQQLAFEDIKKALLSSPALGLPDITKPFELFIDENSGFAKGVLVQKLGPWKRPVAYLSKKLDTVASGWPPCLRMVAAIAILVKDAGKLTLGQPLTILTSHPVEALVRQPPNKWLSNARMTHYQAMLLDAERVHFGPTVSLNPATLLPLPSGGNHHDCLQILAETHGTRPDLTDQPLPDADLTWYTDGSSFIRNGEREAGAAVTTESEVIWAAPLPPGTSAQRAELIALTQALKMAEGKKLTVYTDSRYAFATTHVHGEIYRRRGWLTSEGKEIKNKNEILALLEALFLPKRLSIIHCPGHQKGDSPQAKGNRLADDTAKKAATETHSSLTVLPAGKRTADGSEFEKRTADGSEFESPKKKAKVE

SEQ ID NO: 1205 - protein, 2100 aa, synthetic construct
MPAAKRVKLDGGDKKYSIGLDIGTNSVGWAVITDEYKVPSKKFKVLGNTDRHSIKKNLIGALLFDSGETAEATRLKRTARRRYTRRKNRICYLQEIFSNEMAKVDDSFFHRLEESFLVEEDKKHERHPIFGNIVDEVAYHEKYPTIYHLRKKLVDSTDKADLRLIYLALAHMIKFRGHFLIEGDLNPDNSDVDKLFIQLVQTYNQLFEENPINASGVDAKAILSARLSKSRRLENLIAQLPGEKKNGLFGNLIALSLGLTPNFKSNFDLAEDAKLQLSKDTYDDDLDNLLAQIGDQYADLFLAAKNLSDAILLSDILRVNTEITKAPLSASMIKRYDEHHQDLTLLKALVRQQLPEKYKEIFFDQSKNGYAGYIDGGASQEEFYKFIKPILEKMDGTEELLVKLNREDLLRKQRTFDNGSIPHQIHLGELHAILRRQEDFYPFLKDNREKIEKILTFRIPYYVGPLARGNSRFAWMTRKSEETITPWNFEEVVDKGASAQSFIERMTNFDKNLPNEKVLPKHSLLYEYFTVYNELTKVKYVTEGMRKPAFLSGEQKKAIVDLLFKTNRKVTVKQLKEDYFKKIECFDSVEISGVEDRFNASLGTYHDLLKIIKDKDFLDNEENEDILEDIVLTLTLFEDREMIEERLKTYAHLFDDKVMKQLKRRRYTGWGRLSRKLINGIRDKQSGKTILDFLKSDGFANRNFMQLIHDDSLTFKEDIQKAQVSGQGDSLHEHIANLAGSPAIKKGILQTVKVVDELVKVMGRHKPENIVIEMARENQTTQKGQKNSRERMKRIEEGIKELGSQILKEHPVENTQLQNEKLYLYYLQNGRDMYVDQELDINRLSDYDVDHIVPQSFLKDDSIDNKVLTRSDKARGKSDNVPSEEVVKKMKNYWRQLLNAKLITQRKFDNLTKAERGGLSELDKAGFIKRQLVETRQITKHVAQILDSRMNTKYDENDKLIREVKVITLKSKLVSDFRKDFQFYKVREINNYHHAHDAYLNAVVGTALIKKYPKLESEFVYGDYKVYDVRKMIAKSEQEIGKATAKYFFYSNIMNFFKTEITLANGEIRKRPLIETNGETGEIVWDKGRDFATVRKVLSMPQVNIVKKTEVQTGGFSKESILPKRNSDKLIARKKDWDPKKYGGFDSPTVAYSVLVVAKVEKGKSKKLKSVKELLGITIMERSSFEKNPIDFLEAKGYKEVKKDLIIKLPKYSLFELENGRKRMLASAGELQKGNELALPSKYVNFLYLASHYEKLKGSPEDNEQKQLFVEQHKHYLDEIIEQISEFSKRVILADANLDKVLSAYNKHRDKPIREQAENIIHLFTLTNLGAPAAFKYFDTTIDRKRYTSTKEVLDATLIHQSITGLYETRIDLSQLGGDGGSGSETPGTSESATPESGGTLQLEEEYRLFEPESTQKQEMDIWLKNFPQAWAETGGMGTAHCQAPVLIQLKATATPISIRQYPMPHEAYQGIKPHIRRMLDQGILKPCQSPWNTPLLPVKKPGTEDYRPVQDLREVNKRVEDIHPTVPNPYNLLSTLPPSHPWYTVLDLKDAFFCLRLHSESQLLFAFEWRDPEIGLSGQLTWTRLPQGFKNSPTLFNEALHSDLADFRVRYPALVLLQYVDDLLLAAATRTECLEGTKALLETLGNKGYRASAKKAQICLQEVTYLGYSLKDGQRWLTKARKEAILSIPVPKNSRQVREFLGKAGYCRLFIPGFAELAAPLYPLTRPGTLFQWGTEQQLAFEDIKKALLSSPALGLPDITKPFELFIDENSGFAKGVLVQKLGPWKRPVAYLSKKLDTVASGWPPCLRMVAAIAILVKDAGKLTLGQPLTILTSHPVEALVRQPPNKWLSNARMTHYQAMLLDAERVHFGPTVSLNPATLLPLPSGGNHHDCLQILAETHGTRPDLTDQPLPDADLTWYTDGSSFIRNGEREAGAAVTTESEVIWAAPLPPGTSAQRAELIALTQALKMAEGKKLTVYTDSRYAFATTHVHGEIYRRRGWLTSEGKEIKNKNEILALLEALFLPKRLSIIHCPGHQKGDSPQAKGNRLADDTAKKAATETHSSLTVLPAGKRTADGSEFEKRTADGSEFESPKKKAKVE

SEQ ID NO: 1206 - protein, 2094 aa, synthetic construct
MPAAKRVKLDGGDKKYSIGLDIGTNSVGWAVITDEYKVPSKKFKVLGNTDRHSIKKNLIGALLFDSGETAEATRLKRTARRRYTRRKNRICYLQEIFSNEMAKVDDSFFHRLEESFLVEEDKKHERHPIFGNIVDEVAYHEKYPTIYHLRKKLVDSTDKADLRLIYLALAHMIKFRGHFLIEGDLNPDNSDVDKLFIQLVQTYNQLFEENPINASGVDAKAILSARLSKSRRLENLIAQLPGEKKNGLFGNLIALSLGLTPNFKSNFDLAEDAKLQLSKDTYDDDLDNLLAQIGDQYADLFLAAKNLSDAILLSDILRVNTEITKAPLSASMIKRYDEHHQDLTLLKALVRQQLPEKYKEIFFDQSKNGYAGYIDGGASQEEFYKFIKPILEKMDGTEELLVKLNREDLLRKQRTFDNGSIPHQIHLGELHAILRRQEDFYPFLKDNREKIEKILTFRIPYYVGPLARGNSRFAWMTRKSEETITPWNFEEVVDKGASAQSFIERMTNFDKNLPNEKVLPKHSLLYEYFTVYNELTKVKYVTEGMRKPAFLSGEQKKAIVDLLFKTNRKVTVKQLKEDYFKKIECFDSVEISGVEDRFNASLGTYHDLLKIIKDKDFLDNEENEDILEDIVLTLTLFEDREMIEERLKTYAHLFDDKVMKQLKRRRYTGWGRLSRKLINGIRDKQSGKTILDFLKSDGFANRNFMQLIHDDSLTFKEDIQKAQVSGQGDSLHEHIANLAGSPAIKKGILQTVKVVDELVKVMGRHKPENIVIEMARENQTTQKGQKNSRERMKRIEEGIKELGSQILKEHPVENTQLQNEKLYLYYLQNGRDMYVDQELDINRLSDYDVDHIVPQSFLKDDSIDNKVLTRSDKARGKSDNVPSEEVVKKMKNYWRQLLNAKLITQRKFDNLTKAERGGLSELDKAGFIKRQLVETRQITKHVAQILDSRMNTKYDENDKLIREVKVITLKSKLVSDFRKDFQFYKVREINNYHHAHDAYLNAVVGTALIKKYPKLESEFVYGDYKVYDVRKMIAKSEQEIGKATAKYFFYSNIMNFFKTEITLANGEIRKRPLIETNGETGEIVWDKGRDFATVRKVLSMPQVNIVKKTEVQTGGFSKESILPKRNSDKLIARKKDWDPKKYGGFDSPTVAYSVLVVAKVEKGKSKKLKSVKELLGITIMERSSFEKNPIDFLEAKGYKEVKKDLIIKLPKYSLFELENGRKRMLASAGELQKGNELALPSKYVNFLYLASHYEKLKGSPEDNEQKQLFVEQHKHYLDEIIEQISEFSKRVILADANLDKVLSAYNKHRDKPIREQAENIIHLFTLTNLGAPAAFKYFDTTIDRKRYTSTKEVLDATLIHQSITGLYETRIDLSQLGGDGGEAAAKEAAAKGGTLQLEEEYRLFEPESTQKQEMDIWLKNFPQAWAETGGMGTAHCQAPVLIQLKATATPISIRQYPMPHEAYQGIKPHIRRMLDQGILKPCQSPWNTPLLPVKKPGTEDYRPVQDLREVNKRVEDIHPTVPNPYNLLSTLPPSHPWYTVLDLKDAFFCLRLHSESQLLFAFEWRDPEIGLSGQLTWTRLPQGFKNSPTLFNEALHSDLADFRVRYPALVLLQYVDDLLLAAATRTECLEGTKALLETLGNKGYRASAKKAQICLQEVTYLGYSLKDGQRWLTKARKEAILSIPVPKNSRQVREFLGKAGYCRLFIPGFAELAAPLYPLTRPGTLFQWGTEQQLAFEDIKKALLSSPALGLPDITKPFELFIDENSGFAKGVLVQKLGPWKRPVAYLSKKLDTVASGWPPCLRMVAAIAILVKDAGKLTLGQPLTILTSHPVEALVRQPPNKWLSNARMTHYQAMLLDAERVHFGPTVSLNPATLLPLPSGGNHHDCLQILAETHGTRPDLTDQPLPDADLTWYTDGSSFIRNGEREAGAAVTTESEVIWAAPLPPGTSAQRAELIALTQALKMAEGKKLTVYTDSRYAFATTHVHGEIYRRRGWLTSEGKEIKNKNEILALLEALFLPKRLSIIHCPGHQKGDSPQAKGNRLADDTAKKAATETHSSLTVLPAGKRTADGSEFEKRTADGSEFESPKKKAKVE

SEQ ID NO: 1207 - protein, 2096 aa, synthetic construct
MPAAKRVKLDGGDKKYSIGLDIGTNSVGWAVITDEYKVPSKKFKVLGNTDRHSIKKNLIGALLFDSGETAEATRLKRTARRRYTRRKNRICYLQEIFSNEMAKVDDSFFHRLEESFLVEEDKKHERHPIFGNIVDEVAYHEKYPTIYHLRKKLVDSTDKADLRLIYLALAHMIKFRGHFLIEGDLNPDNSDVDKLFIQLVQTYNQLFEENPINASGVDAKAILSARLSKSRRLENLIAQLPGEKKNGLFGNLIALSLGLTPNFKSNFDLAEDAKLQLSKDTYDDDLDNLLAQIGDQYADLFLAAKNLSDAILLSDILRVNTEITKAPLSASMIKRYDEHHQDLTLLKALVRQQLPEKYKEIFFDQSKNGYAGYIDGGASQEEFYKFIKPILEKMDGTEELLVKLNREDLLRKQRTFDNGSIPHQIHLGELHAILRRQEDFYPFLKDNREKIEKILTFRIPYYVGPLARGNSRFAWMTRKSEETITPWNFEEVVDKGASAQSFIERMTNFDKNLPNEKVLPKHSLLYEYFTVYNELTKVKYVTEGMRKPAFLSGEQKKAIVDLLFKTNRKVTVKQLKEDYFKKIECFDSVEISGVEDRFNASLGTYHDLLKIIKDKDFLDNEENEDILEDIVLTLTLFEDREMIEERLKTYAHLFDDKVMKQLKRRRYTGWGRLSRKLINGIRDKQSGKTILDFLKSDGFANRNFMQLIHDDSLTFKEDIQKAQVSGQGDSLHEHIANLAGSPAIKKGILQTVKVVDELVKVMGRHKPENIVIEMARENQTTQKGQKNSRERMKRIEEGIKELGSQILKEHPVENTQLQNEKLYLYYLQNGRDMYVDQELDINRLSDYDVDHIVPQSFLKDDSIDNKVLTRSDKARGKSDNVPSEEVVKKMKNYWRQLLNAKLITQRKFDNLTKAERGGLSELDKAGFIKRQLVETRQITKHVAQILDSRMNTKYDENDKLIREVKVITLKSKLVSDFRKDFQFYKVREINNYHHAHDAYLNAVVGTALIKKYPKLESEFVYGDYKVYDVRKMIAKSEQEIGKATAKYFFYSNIMNFFKTEITLANGEIRKRPLIETNGETGEIVWDKGRDFATVRKVLSMPQVNIVKKTEVQTGGFSKESILPKRNSDKLIARKKDWDPKKYGGFDSPTVAYSVLVVAKVEKGKSKKLKSVKELLGITIMERSSFEKNPIDFLEAKGYKEVKKDLIIKLPKYSLFELENGRKRMLASAGELQKGNELALPSKYVNFLYLASHYEKLKGSPEDNEQKQLFVEQHKHYLDEIIEQISEFSKRVILADANLDKVLSAYNKHRDKPIREQAENIIHLFTLTNLGAPAAFKYFDTTIDRKRYTSTKEVLDATLIHQSITGLYETRIDLSQLGGDGGGGSGGSGGSGGSGGTLQLEEEYRLFEPESTQKQEMDIWLKNFPQAWAETGGMGTAHCQAPVLIQLKATATPISIRQYPMPHEAYQGIKPHIRRMLDQGILKPCQSPWNTPLLPVKKPGTEDYRPVQDLREVNKRVEDIHPTVPNPYNLLSTLPPSHPWYTVLDLKDAFFCLRLHSESQLLFAFEWRDPEIGLSGQLTWTRLPQGFKNSPTLFNEALHSDLADFRVRYPALVLLQYVDDLLLAAATRTECLEGTKALLETLGNKGYRASAKKAQICLQEVTYLGYSLKDGQRWLTKARKEAILSIPVPKNSRQVREFLGKAGYCRLFIPGFAELAAPLYPLTRPGTLFQWGTEQQLAFEDIKKALLSSPALGLPDITKPFELFIDENSGFAKGVLVQKLGPWKRPVAYLSKKLDTVASGWPPCLRMVAAIAILVKDAGKLTLGQPLTILTSHPVEALVRQPPNKWLSNARMTHYQAMLLDAERVHFGPTVSLNPATLLPLPSGGNHHDCLQILAETHGTRPDLTDQPLPDADLTWYTDGSSFIRNGEREAGAAVTTESEVIWAAPLPPGTSAQRAELIALTQALKMAEGKKLTVYTDSRYAFATTHVHGEIYRRRGWLTSEGKEIKNKNEILALLEALFLPKRLSIIHCPGHQKGDSPQAKGNRLADDTAKKAATETHSSLTVLPAGKRTADGSEFEKRTADGSEFESPKKKAKVE

SEQ ID NO: 1208 - protein, 2095 aa, synthetic construct
MPAAKRVKLDGGDKKYSIGLDIGTNSVGWAVITDEYKVPSKKFKVLGNTDRHSIKKNLIGALLFDSGETAEATRLKRTARRRYTRRKNRICYLQEIFSNEMAKVDDSFFHRLEESFLVEEDKKHERHPIFGNIVDEVAYHEKYPTIYHLRKKLVDSTDKADLRLIYLALAHMIKFRGHFLIEGDLNPDNSDVDKLFIQLVQTYNQLFEENPINASGVDAKAILSARLSKSRRLENLIAQLPGEKKNGLFGNLIALSLGLTPNFKSNFDLAEDAKLQLSKDTYDDDLDNLLAQIGDQYADLFLAAKNLSDAILLSDILRVNTEITKAPLSASMIKRYDEHHQDLTLLKALVRQQLPEKYKEIFFDQSKNGYAGYIDGGASQEEFYKFIKPILEKMDGTEELLVKLNREDLLRKQRTFDNGSIPHQIHLGELHAILRRQEDFYPFLKDNREKIEKILTFRIPYYVGPLARGNSRFAWMTRKSEETITPWNFEEVVDKGASAQSFIERMTNFDKNLPNEKVLPKHSLLYEYFTVYNELTKVKYVTEGMRKPAFLSGEQKKAIVDLLFKTNRKVTVKQLKEDYFKKIECFDSVEISGVEDRFNASLGTYHDLLKIIKDKDFLDNEENEDILEDIVLTLTLFEDREMIEERLKTYAHLFDDKVMKQLKRRRYTGWGRLSRKLINGIRDKQSGKTILDFLKSDGFANRNFMQLIHDDSLTFKEDIQKAQVSGQGDSLHEHIANLAGSPAIKKGILQTVKVVDELVKVMGRHKPENIVIEMARENQTTQKGQKNSRERMKRIEEGIKELGSQILKEHPVENTQLQNEKLYLYYLQNGRDMYVDQELDINRLSDYDVDHIVPQSFLKDDSIDNKVLTRSDKARGKSDNVPSEEVVKKMKNYWRQLLNAKLITQRKFDNLTKAERGGLSELDKAGFIKRQLVETRQITKHVAQILDSRMNTKYDENDKLIREVKVITLKSKLVSDFRKDFQFYKVREINNYHHAHDAYLNAVVGTALIKKYPKLESEFVYGDYKVYDVRKMIAKSEQEIGKATAKYFFYSNIMNFFKTEITLANGEIRKRPLIETNGETGEIVWDKGRDFATVRKVLSMPQVNIVKKTEVQTGGFSKESILPKRNSDKLIARKKDWDPKKYGGFDSPTVAYSVLVVAKVEKGKSKKLKSVKELLGITIMERSSFEKNPIDFLEAKGYKEVKKDLIIKLPKYSLFELENGRKRMLASAGELQKGNELALPSKYVNFLYLASHYEKLKGSPEDNEQKQLFVEQHKHYLDEIIEQISEFSKRVILADANLDKVLSAYNKHRDKPIREQAENIIHLFTLTNLGAPAAFKYFDTTIDRKRYTSTKEVLDATLIHQSITGLYETRIDLSQLGGDGGPAPEAAAKGSSGGTLQLEEEYRLFEPESTQKQEMDIWLKNFPQAWAETGGMGTAHCQAPVLIQLKATATPISIRQYPMPHEAYQGIKPHIRRMLDQGILKPCQSPWNTPLLPVKKPGTEDYRPVQDLREVNKRVEDIHPTVPNPYNLLSTLPPSHPWYTVLDLKDAFFCLRLHSESQLLFAFEWRDPEIGLSGQLTWTRLPQGFKNSPTLFNEALHSDLADFRVRYPALVLLQYVDDLLLAAATRTECLEGTKALLETLGNKGYRASAKKAQICLQEVTYLGYSLKDGQRWLTKARKEAILSIPVPKNSRQVREFLGKAGYCRLFIPGFAELAAPLYPLTRPGTLFQWGTEQQLAFEDIKKALLSSPALGLPDITKPFELFIDENSGFAKGVLVQKLGPWKRPVAYLSKKLDTVASGWPPCLRMVAAIAILVKDAGKLTLGQPLTILTSHPVEALVRQPPNKWLSNARMTHYQAMLLDAERVHFGPTVSLNPATLLPLPSGGNHHDCLQILAETHGTRPDLTDQPLPDADLTWYTDGSSFIRNGEREAGAAVTTESEVIWAAPLPPGTSAQRAELIALTQALKMAEGKKLTVYTDSRYAFATTHVHGEIYRRRGWLTSEGKEIKNKNEILALLEALFLPKRLSIIHCPGHQKGDSPQAKGNRLADDTAKKAATETHSSLTVLPAGKRTADGSEFEKRTADGSEFESPKKKAKVE

SEQ ID NO: 1209 - protein, 2114 aa, synthetic construct
MPAAKRVKLDGGDKKYSIGLDIGTNSVGWAVITDEYKVPSKKFKVLGNTDRHSIKKNLIGALLFDSGETAEATRLKRTARRRYTRRKNRICYLQEIFSNEMAKVDDSFFHRLEESFLVEEDKKHERHPIFGNIVDEVAYHEKYPTIYHLRKKLVDSTDKADLRLIYLALAHMIKFRGHFLIEGDLNPDNSDVDKLFIQLVQTYNQLFEENPINASGVDAKAILSARLSKSRRLENLIAQLPGEKKNGLFGNLIALSLGLTPNFKSNFDLAEDAKLQLSKDTYDDDLDNLLAQIGDQYADLFLAAKNLSDAILLSDILRVNTEITKAPLSASMIKRYDEHHQDLTLLKALVRQQLPEKYKEIFFDQSKNGYAGYIDGGASQEEFYKFIKPILEKMDGTEELLVKLNREDLLRKQRTFDNGSIPHQIHLGELHAILRRQEDFYPFLKDNREKIEKILTFRIPYYVGPLARGNSRFAWMTRKSEETITPWNFEEVVDKGASAQSFIERMTNFDKNLPNEKVLPKHSLLYEYFTVYNELTKVKYVTEGMRKPAFLSGEQKKAIVDLLFKTNRKVTVKQLKEDYFKKIECFDSVEISGVEDRFNASLGTYHDLLKIIKDKDFLDNEENEDILEDIVLTLTLFEDREMIEERLKTYAHLFDDKVMKQLKRRRYTGWGRLSRKLINGIRDKQSGKTILDFLKSDGFANRNFMQLIHDDSLTFKEDIQKAQVSGQGDSLHEHIANLAGSPAIKKGILQTVKVVDELVKVMGRHKPENIVIEMARENQTTQKGQKNSRERMKRIEEGIKELGSQILKEHPVENTQLQNEKLYLYYLQNGRDMYVDQELDINRLSDYDVDHIVPQSFLKDDSIDNKVLTRSDKARGKSDNVPSEEVVKKMKNYWRQLLNAKLITQRKFDNLTKAERGGLSELDKAGFIKRQLVETRQITKHVAQILDSRMNTKYDENDKLIREVKVITLKSKLVSDFRKDFQFYKVREINNYHHAHDAYLNAVVGTALIKKYPKLESEFVYGDYKVYDVRKMIAKSEQEIGKATAKYFFYSNIMNFFKTEITLANGEIRKRPLIETNGETGEIVWDKGRDFATVRKVLSMPQVNIVKKTEVQTGGFSKESILPKRNSDKLIARKKDWDPKKYGGFDSPTVAYSVLVVAKVEKGKSKKLKSVKELLGITIMERSSFEKNPIDFLEAKGYKEVKKDLIIKLPKYSLFELENGRKRMLASAGELQKGNELALPSKYVNFLYLASHYEKLKGSPEDNEQKQLFVEQHKHYLDEIIEQISEFSKRVILADANLDKVLSAYNKHRDKPIREQAENIIHLFTLTNLGAPAAFKYFDTTIDRKRYTSTKEVLDATLIHQSITGLYETRIDLSQLGGDGGGGGGSGGGGSGGGGSGGGGSGGGGSGGGGSGGTLQLEEEYRLFEPESTQKQEMDIWLKNFPQAWAETGGMGTAHCQAPVLIQLKATATPISIRQYPMPHEAYQGIKPHIRRMLDQGILKPCQSPWNTPLLPVKKPGTEDYRPVQDLREVNKRVEDIHPTVPNPYNLLSTLPPSHPWYTVLDLKDAFFCLRLHSESQLLFAFEWRDPEIGLSGQLTWTRLPQGFKNSPTLFNEALHSDLADFRVRYPALVLLQYVDDLLLAAATRTECLEGTKALLETLGNKGYRASAKKAQICLQEVTYLGYSLKDGQRWLTKARKEAILSIPVPKNSRQVREFLGKAGYCRLFIPGFAELAAPLYPLTRPGTLFQWGTEQQLAFEDIKKALLSSPALGLPDITKPFELFIDENSGFAKGVLVQKLGPWKRPVAYLSKKLDTVASGWPPCLRMVAAIAILVKDAGKLTLGQPLTILTSHPVEALVRQPPNKWLSNARMTHYQAMLLDAERVHFGPTVSLNPATLLPLPSGGNHHDCLQILAETHGTRPDLTDQPLPDADLTWYTDGSSFIRNGEREAGAAVTTESEVIWAAPLPPGTSAQRAELIALTQALKMAEGKKLTVYTDSRYAFATTHVHGEIYRRRGWLTSEGKEIKNKNEILALLEALFLPKRLSIIHCPGHQKGDSPQAKGNRLADDTAKKAATETHSSLTVLPAGKRTADGSEFEKRTADGSEFESPKKKAKVE

SEQ ID NO: 1210 - protein, 2095 aa, synthetic construct
MPAAKRVKLDGGDKKYSIGLDIGTNSVGWAVITDEYKVPSKKFKVLGNTDRHSIKKNLIGALLFDSGETAEATRLKRTARRRYTRRKNRICYLQEIFSNEMAKVDDSFFHRLEESFLVEEDKKHERHPIFGNIVDEVAYHEKYPTIYHLRKKLVDSTDKADLRLIYLALAHMIKFRGHFLIEGDLNPDNSDVDKLFIQLVQTYNQLFEENPINASGVDAKAILSARLSKSRRLENLIAQLPGEKKNGLFGNLIALSLGLTPNFKSNFDLAEDAKLQLSKDTYDDDLDNLLAQIGDQYADLFLAAKNLSDAILLSDILRVNTEITKAPLSASMIKRYDEHHQDLTLLKALVRQQLPEKYKEIFFDQSKNGYAGYIDGGASQEEFYKFIKPILEKMDGTEELLVKLNREDLLRKQRTFDNGSIPHQIHLGELHAILRRQEDFYPFLKDNREKIEKILTFRIPYYVGPLARGNSRFAWMTRKSEETITPWNFEEVVDKGASAQSFIERMTNFDKNLPNEKVLPKHSLLYEYFTVYNELTKVKYVTEGMRKPAFLSGEQKKAIVDLLFKTNRKVTVKQLKEDYFKKIECFDSVEISGVEDRFNASLGTYHDLLKIIKDKDFLDNEENEDILEDIVLTLTLFEDREMIEERLKTYAHLFDDKVMKQLKRRRYTGWGRLSRKLINGIRDKQSGKTILDFLKSDGFANRNFMQLIHDDSLTFKEDIQKAQVSGQGDSLHEHIANLAGSPAIKKGILQTVKVVDELVKVMGRHKPENIVIEMARENQTTQKGQKNSRERMKRIEEGIKELGSQILKEHPVENTQLQNEKLYLYYLQNGRDMYVDQELDINRLSDYDVDHIVPQSFLKDDSIDNKVLTRSDKARGKSDNVPSEEVVKKMKNYWRQLLNAKLITQRKFDNLTKAERGGLSELDKAGFIKRQLVETRQITKHVAQILDSRMNTKYDENDKLIREVKVITLKSKLVSDFRKDFQFYKVREINNYHHAHDAYLNAVVGTALIKKYPKLESEFVYGDYKVYDVRKMIAKSEQEIGKATAKYFFYSNIMNFFKTEITLANGEIRKRPLIETNGETGEIVWDKGRDFATVRKVLSMPQVNIVKKTEVQTGGFSKESILPKRNSDKLIARKKDWDPKKYGGFDSPTVAYSVLVVAKVEKGKSKKLKSVKELLGITIMERSSFEKNPIDFLEAKGYKEVKKDLIIKLPKYSLFELENGRKRMLASAGELQKGNELALPSKYVNFLYLASHYEKLKGSPEDNEQKQLFVEQHKHYLDEIIEQISEFSKRVILADANLDKVLSAYNKHRDKPIREQAENIIHLFTLTNLGAPAAFKYFDTTIDRKRYTSTKEVLDATLIHQSITGLYETRIDLSQLGGDGGEAAAKGSSGGGGGTLQLEEEYRLFEPESTQKQEMDIWLKNFPQAWAETGGMGTAHCQAPVLIQLKATATPISIRQYPMPHEAYQGIKPHIRRMLDQGILKPCQSPWNTPLLPVKKPGTEDYRPVQDLREVNKRVEDIHPTVPNPYNLLSTLPPSHPWYTVLDLKDAFFCLRLHSESQLLFAFEWRDPEIGLSGQLTWTRLPQGFKNSPTLFNEALHSDLADFRVRYPALVLLQYVDDLLLAAATRTECLEGTKALLETLGNKGYRASAKKAQICLQEVTYLGYSLKDGQRWLTKARKEAILSIPVPKNSRQVREFLGKAGYCRLFIPGFAELAAPLYPLTRPGTLFQWGTEQQLAFEDIKKALLSSPALGLPDITKPFELFIDENSGFAKGVLVQKLGPWKRPVAYLSKKLDTVASGWPPCLRMVAAIAILVKDAGKLTLGQPLTILTSHPVEALVRQPPNKWLSNARMTHYQAMLLDAERVHFGPTVSLNPATLLPLPSGGNHHDCLQILAETHGTRPDLTDQPLPDADLTWYTDGSSFIRNGEREAGAAVTTESEVIWAAPLPPGTSAQRAELIALTQALKMAEGKKLTVYTDSRYAFATTHVHGEIYRRRGWLTSEGKEIKNKNEILALLEALFLPKRLSIIHCPGHQKGDSPQAKGNRLADDTAKKAATETHSSLTVLPAGKRTADGSEFEKRTADGSEFESPKKKAKVE

SEQ ID NO: 1211 - protein, 2090 aa, synthetic construct
MPAAKRVKLDGGDKKYSIGLDIGTNSVGWAVITDEYKVPSKKFKVLGNTDRHSIKKNLIGALLFDSGETAEATRLKRTARRRYTRRKNRICYLQEIFSNEMAKVDDSFFHRLEESFLVEEDKKHERHPIFGNIVDEVAYHEKYPTIYHLRKKLVDSTDKADLRLIYLALAHMIKFRGHFLIEGDLNPDNSDVDKLFIQLVQTYNQLFEENPINASGVDAKAILSARLSKSRRLENLIAQLPGEKKNGLFGNLIALSLGLTPNFKSNFDLAEDAKLQLSKDTYDDDLDNLLAQIGDQYADLFLAAKNLSDAILLSDILRVNTEITKAPLSASMIKRYDEHHQDLTLLKALVRQQLPEKYKEIFFDQSKNGYAGYIDGGASQEEFYKFIKPILEKMDGTEELLVKLNREDLLRKQRTFDNGSIPHQIHLGELHAILRRQEDFYPFLKDNREKIEKILTFRIPYYVGPLARGNSRFAWMTRKSEETITPWNFEEVVDKGASAQSFIERMTNFDKNLPNEKVLPKHSLLYEYFTVYNELTKVKYVTEGMRKPAFLSGEQKKAIVDLLFKTNRKVTVKQLKEDYFKKIECFDSVEISGVEDRFNASLGTYHDLLKIIKDKDFLDNEENEDILEDIVLTLTLFEDREMIEERLKTYAHLFDDKVMKQLKRRRYTGWGRLSRKLINGIRDKQSGKTILDFLKSDGFANRNFMQLIHDDSLTFKEDIQKAQVSGQGDSLHEHIANLAGSPAIKKGILQTVKVVDELVKVMGRHKPENIVIEMARENQTTQKGQKNSRERMKRIEEGIKELGSQILKEHPVENTQLQNEKLYLYYLQNGRDMYVDQELDINRLSDYDVDHIVPQSFLKDDSIDNKVLTRSDKARGKSDNVPSEEVVKKMKNYWRQLLNAKLITQRKFDNLTKAERGGLSELDKAGFIKRQLVETRQITKHVAQILDSRMNTKYDENDKLIREVKVITLKSKLVSDFRKDFQFYKVREINNYHHAHDAYLNAVVGTALIKKYPKLESEFVYGDYKVYDVRKMIAKSEQEIGKATAKYFFYSNIMNFFKTEITLANGEIRKRPLIETNGETGEIVWDKGRDFATVRKVLSMPQVNIVKKTEVQTGGFSKESILPKRNSDKLIARKKDWDPKKYGGFDSPTVAYSVLVVAKVEKGKSKKLKSVKELLGITIMERSSFEKNPIDFLEAKGYKEVKKDLIIKLPKYSLFELENGRKRMLASAGELQKGNELALPSKYVNFLYLASHYEKLKGSPEDNEQKQLFVEQHKHYLDEIIEQISEFSKRVILADANLDKVLSAYNKHRDKPIREQAENIIHLFTLTNLGAPAAFKYFDTTIDRKRYTSTKEVLDATLIHQSITGLYETRIDLSQLGGDGGGGGGGGGGTLQLEEEYRLFEPESTQKQEMDIWLKNFPQAWAETGGMGTAHCQAPVLIQLKATATPISIRQYPMPHEAYQGIKPHIRRMLDQGILKPCQSPWNTPLLPVKKPGTEDYRPVQDLREVNKRVEDIHPTVPNPYNLLSTLPPSHPWYTVLDLKDAFFCLRLHSESQLLFAFEWRDPEIGLSGQLTWTRLPQGFKNSPTLFNEALHSDLADFRVRYPALVLLQYVDDLLLAAATRTECLEGTKALLETLGNKGYRASAKKAQICLQEVTYLGYSLKDGQRWLTKARKEAILSIPVPKNSRQVREFLGKAGYCRLFIPGFAELAAPLYPLTRPGTLFQWGTEQQLAFEDIKKALLSSPALGLPDITKPFELFIDENSGFAKGVLVQKLGPWKRPVAYLSKKLDTVASGWPPCLRMVAAIAILVKDAGKLTLGQPLTILTSHPVEALVRQPPNKWLSNARMTHYQAMLLDAERVHFGPTVSLNPATLLPLPSGGNHHDCLQILAETHGTRPDLTDQPLPDADLTWYTDGSSFIRNGEREAGAAVTTESEVIWAAPLPPGTSAQRAELIALTQALKMAEGKKLTVYTDSRYAFATTHVHGEIYRRRGWLTSEGKEIKNKNEILALLEALFLPKRLSIIHCPGHQKGDSPQAKGNRLADDTAKKAATETHSSLTVLPAGKRTADGSEFEKRTADGSEFESPKKKAKVE

SEQ ID NO: 1212 - protein, 2102 aa, synthetic construct
MPAAKRVKLDGGDKKYSIGLDIGTNSVGWAVITDEYKVPSKKFKVLGNTDRHSIKKNLIGALLFDSGETAEATRLKRTARRRYTRRKNRICYLQEIFSNEMAKVDDSFFHRLEESFLVEEDKKHERHPIFGNIVDEVAYHEKYPTIYHLRKKLVDSTDKADLRLIYLALAHMIKFRGHFLIEGDLNPDNSDVDKLFIQLVQTYNQLFEENPINASGVDAKAILSARLSKSRRLENLIAQLPGEKKNGLFGNLIALSLGLTPNFKSNFDLAEDAKLQLSKDTYDDDLDNLLAQIGDQYADLFLAAKNLSDAILLSDILRVNTEITKAPLSASMIKRYDEHHQDLTLLKALVRQQLPEKYKEIFFDQSKNGYAGYIDGGASQEEFYKFIKPILEKMDGTEELLVKLNREDLLRKQRTFDNGSIPHQIHLGELHAILRRQEDFYPFLKDNREKIEKILTFRIPYYVGPLARGNSRFAWMTRKSEETITPWNFEEVVDKGASAQSFIERMTNFDKNLPNEKVLPKHSLLYEYFTVYNELTKVKYVTEGMRKPAFLSGEQKKAIVDLLFKTNRKVTVKQLKEDYFKKIECFDSVEISGVEDRFNASLGTYHDLLKIIKDKDFLDNEENEDILEDIVLTLTLFEDREMIEERLKTYAHLFDDKVMKQLKRRRYTGWGRLSRKLINGIRDKQSGKTILDFLKSDGFANRNFMQLIHDDSLTFKEDIQKAQVSGQGDSLHEHIANLAGSPAIKKGILQTVKVVDELVKVMGRHKPENIVIEMARENQTTQKGQKNSRERMKRIEEGIKELGSQILKEHPVENTQLQNEKLYLYYLQNGRDMYVDQELDINRLSDYDVDHIVPQSFLKDDSIDNKVLTRSDKARGKSDNVPSEEVVKKMKNYWRQLLNAKLITQRKFDNLTKAERGGLSELDKAGFIKRQLVETRQITKHVAQILDSRMNTKYDENDKLIREVKVITLKSKLVSDFRKDFQFYKVREINNYHHAHDAYLNAVVGTALIKKYPKLESEFVYGDYKVYDVRKMIAKSEQEIGKATAKYFFYSNIMNFFKTEITLANGEIRKRPLIETNGETGEIVWDKGRDFATVRKVLSMPQVNIVKKTEVQTGGFSKESILPKRNSDKLIARKKDWDPKKYGGFDSPTVAYSVLVVAKVEKGKSKKLKSVKELLGITIMERSSFEKNPIDFLEAKGYKEVKKDLIIKLPKYSLFELENGRKRMLASAGELQKGNELALPSKYVNFLYLASHYEKLKGSPEDNEQKQLFVEQHKHYLDEIIEQISEFSKRVILADANLDKVLSAYNKHRDKPIREQAENIIHLFTLTNLGAPAAFKYFDTTIDRKRYTSTKEVLDATLIHQSITGLYETRIDLSQLGGDGGGSSGSSGSSGSSGSSGSSGGTLQLEEEYRLFEPESTQKQEMDIWLKNFPQAWAETGGMGTAHCQAPVLIQLKATATPISIRQYPMPHEAYQGIKPHIRRMLDQGILKPCQSPWNTPLLPVKKPGTEDYRPVQDLREVNKRVEDIHPTVPNPYNLLSTLPPSHPWYTVLDLKDAFFCLRLHSESQLLFAFEWRDPEIGLSGQLTWTRLPQGFKNSPTLFNEALHSDLADFRVRYPALVLLQYVDDLLLAAATRTECLEGTKALLETLGNKGYRASAKKAQICLQEVTYLGYSLKDGQRWLTKARKEAILSIPVPKNSRQVREFLGKAGYCRLFIPGFAELAAPLYPLTRPGTLFQWGTEQQLAFEDIKKALLSSPALGLPDITKPFELFIDENSGFAKGVLVQKLGPWKRPVAYLSKKLDTVASGWPPCLRMVAAIAILVKDAGKLTLGQPLTILTSHPVEALVRQPPNKWLSNARMTHYQAMLLDAERVHFGPTVSLNPATLLPLPSGGNHHDCLQILAETHGTRPDLTDQPLPDADLTWYTDGSSFIRNGEREAGAAVTTESEVIWAAPLPPGTSAQRAELIALTQALKMAEGKKLTVYTDSRYAFATTHVHGEIYRRRGWLTSEGKEIKNKNEILALLEALFLPKRLSIIHCPGHQKGDSPQAKGNRLADDTAKKAATETHSSLTVLPAGKRTADGSEFEKRTADGSEFESPKKKAKVE

SEQ ID NO: 1213 - protein, 2099 aa, synthetic construct
MPAAKRVKLDGGDKKYSIGLDIGTNSVGWAVITDEYKVPSKKFKVLGNTDRHSIKKNLIGALLFDSGETAEATRLKRTARRRYTRRKNRICYLQEIFSNEMAKVDDSFFHRLEESFLVEEDKKHERHPIFGNIVDEVAYHEKYPTIYHLRKKLVDSTDKADLRLIYLALAHMIKFRGHFLIEGDLNPDNSDVDKLFIQLVQTYNQLFEENPINASGVDAKAILSARLSKSRRLENLIAQLPGEKKNGLFGNLIALSLGLTPNFKSNFDLAEDAKLQLSKDTYDDDLDNLLAQIGDQYADLFLAAKNLSDAILLSDILRVNTEITKAPLSASMIKRYDEHHQDLTLLKALVRQQLPEKYKEIFFDQSKNGYAGYIDGGASQEEFYKFIKPILEKMDGTEELLVKLNREDLLRKQRTFDNGSIPHQIHLGELHAILRRQEDFYPFLKDNREKIEKILTFRIPYYVGPLARGNSRFAWMTRKSEETITPWNFEEVVDKGASAQSFIERMTNFDKNLPNEKVLPKHSLLYEYFTVYNELTKVKYVTEGMRKPAFLSGEQKKAIVDLLFKTNRKVTVKQLKEDYFKKIECFDSVEISGVEDRFNASLGTYHDLLKIIKDKDFLDNEENEDILEDIVLTLTLFEDREMIEERLKTYAHLFDDKVMKQLKRRRYTGWGRLSRKLINGIRDKQSGKTILDFLKSDGFANRNFMQLIHDDSLTFKEDIQKAQVSGQGDSLHEHIANLAGSPAIKKGILQTVKVVDELVKVMGRHKPENIVIEMARENQTTQKGQKNSRERMKRIEEGIKELGSQILKEHPVENTQLQNEKLYLYYLQNGRDMYVDQELDINRLSDYDVDHIVPQSFLKDDSIDNKVLTRSDKARGKSDNVPSEEVVKKMKNYWRQLLNAKLITQRKFDNLTKAERGGLSELDKAGFIKRQLVETRQITKHVAQILDSRMNTKYDENDKLIREVKVITLKSKLVSDFRKDFQFYKVREINNYHHAHDAYLNAVVGTALIKKYPKLESEFVYGDYKVYDVRKMIAKSEQEIGKATAKYFFYSNIMNFFKTEITLANGEIRKRPLIETNGETGEIVWDKGRDFATVRKVLSMPQVNIVKKTEVQTGGFSKESILPKRNSDKLIARKKDWDPKKYGGFDSPTVAYSVLVVAKVEKGKSKKLKSVKELLGITIMERSSFEKNPIDFLEAKGYKEVKKDLIIKLPKYSLFELENGRKRMLASAGELQKGNELALPSKYVNFLYLASHYEKLKGSPEDNEQKQLFVEQHKHYLDEIIEQISEFSKRVILADANLDKVLSAYNKHRDKPIREQAENIIHLFTLTNLGAPAAFKYFDTTIDRKRYTSTKEVLDATLIHQSITGLYETRIDLSQLGGDGGEAAAKEAAAKEAAAKGGTLQLEEEYRLFEPESTQKQEMDIWLKNFPQAWAETGGMGTAHCQAPVLIQLKATATPISIRQYPMPHEAYQGIKPHIRRMLDQGILKPCQSPWNTPLLPVKKPGTEDYRPVQDLREVNKRVEDIHPTVPNPYNLLSTLPPSHPWYTVLDLKDAFFCLRLHSESQLLFAFEWRDPEIGLSGQLTWTRLPQGFKNSPTLFNEALHSDLADFRVRYPALVLLQYVDDLLLAAATRTECLEGTKALLETLGNKGYRASAKKAQICLQEVTYLGYSLKDGQRWLTKARKEAILSIPVPKNSRQVREFLGKAGYCRLFIPGFAELAAPLYPLTRPGTLFQWGTEQQLAFEDIKKALLSSPALGLPDITKPFELFIDENSGFAKGVLVQKLGPWKRPVAYLSKKLDTVASGWPPCLRMVAAIAILVKDAGKLTLGQPLTILTSHPVEALVRQPPNKWLSNARMTHYQAMLLDAERVHFGPTVSLNPATLLPLPSGGNHHDCLQILAETHGTRPDLTDQPLPDADLTWYTDGSSFIRNGEREAGAAVTTESEVIWAAPLPPGTSAQRAELIALTQALKMAEGKKLTVYTDSRYAFATTHVHGEIYRRRGWLTSEGKEIKNKNEILALLEALFLPKRLSIIHCPGHQKGDSPQAKGNRLADDTAKKAATETHSSLTVLPAGKRTADGSEFEKRTADGSEFESPKKKAKVE

SEQ ID NO: 1214 - protein, 2095 aa, synthetic construct
MPAAKRVKLDGGDKKYSIGLDIGTNSVGWAVITDEYKVPSKKFKVLGNTDRHSIKKNLIGALLFDSGETAEATRLKRTARRRYTRRKNRICYLQEIFSNEMAKVDDSFFHRLEESFLVEEDKKHERHPIFGNIVDEVAYHEKYPTIYHLRKKLVDSTDKADLRLIYLALAHMIKFRGHFLIEGDLNPDNSDVDKLFIQLVQTYNQLFEENPINASGVDAKAILSARLSKSRRLENLIAQLPGEKKNGLFGNLIALSLGLTPNFKSNFDLAEDAKLQLSKDTYDDDLDNLLAQIGDQYADLFLAAKNLSDAILLSDILRVNTEITKAPLSASMIKRYDEHHQDLTLLKALVRQQLPEKYKEIFFDQSKNGYAGYIDGGASQEEFYKFIKPILEKMDGTEELLVKLNREDLLRKQRTFDNGSIPHQIHLGELHAILRRQEDFYPFLKDNREKIEKILTFRIPYYVGPLARGNSRFAWMTRKSEETITPWNFEEVVDKGASAQSFIERMTNFDKNLPNEKVLPKHSLLYEYFTVYNELTKVKYVTEGMRKPAFLSGEQKKAIVDLLFKTNRKVTVKQLKEDYFKKIECFDSVEISGVEDRFNASLGTYHDLLKIIKDKDFLDNEENEDILEDIVLTLTLFEDREMIEERLKTYAHLFDDKVMKQLKRRRYTGWGRLSRKLINGIRDKQSGKTILDFLKSDGFANRNFMQLIHDDSLTFKEDIQKAQVSGQGDSLHEHIANLAGSPAIKKGILQTVKVVDELVKVMGRHKPENIVIEMARENQTTQKGQKNSRERMKRIEEGIKELGSQILKEHPVENTQLQNEKLYLYYLQNGRDMYVDQELDINRLSDYDVDHIVPQSFLKDDSIDNKVLTRSDKARGKSDNVPSEEVVKKMKNYWRQLLNAKLITQRKFDNLTKAERGGLSELDKAGFIKRQLVETRQITKHVAQILDSRMNTKYDENDKLIREVKVITLKSKLVSDFRKDFQFYKVREINNYHHAHDAYLNAVVGTALIKKYPKLESEFVYGDYKVYDVRKMIAKSEQEIGKATAKYFFYSNIMNFFKTEITLANGEIRKRPLIETNGETGEIVWDKGRDFATVRKVLSMPQVNIVKKTEVQTGGFSKESILPKRNSDKLIARKKDWDPKKYGGFDSPTVAYSVLVVAKVEKGKSKKLKSVKELLGITIMERSSFEKNPIDFLEAKGYKEVKKDLIIKLPKYSLFELENGRKRMLASAGELQKGNELALPSKYVNFLYLASHYEKLKGSPEDNEQKQLFVEQHKHYLDEIIEQISEFSKRVILADANLDKVLSAYNKHRDKPIREQAENIIHLFTLTNLGAPAAFKYFDTTIDRKRYTSTKEVLDATLIHQSITGLYETRIDLSQLGGDGGPAPGSSEAAAKGGTLQLEEEYRLFEPESTQKQEMDIWLKNFPQAWAETGGMGTAHCQAPVLIQLKATATPISIRQYPMPHEAYQGIKPHIRRMLDQGILKPCQSPWNTPLLPVKKPGTEDYRPVQDLREVNKRVEDIHPTVPNPYNLLSTLPPSHPWYTVLDLKDAFFCLRLHSESQLLFAFEWRDPEIGLSGQLTWTRLPQGFKNSPTLFNEALHSDLADFRVRYPALVLLQYVDDLLLAAATRTECLEGTKALLETLGNKGYRASAKKAQICLQEVTYLGYSLKDGQRWLTKARKEAILSIPVPKNSRQVREFLGKAGYCRLFIPGFAELAAPLYPLTRPGTLFQWGTEQQLAFEDIKKALLSSPALGLPDITKPFELFIDENSGFAKGVLVQKLGPWKRPVAYLSKKLDTVASGWPPCLRMVAAIAILVKDAGKLTLGQPLTILTSHPVEALVRQPPNKWLSNARMTHYQAMLLDAERVHFGPTVSLNPATLLPLPSGGNHHDCLQILAETHGTRPDLTDQPLPDADLTWYTDGSSFIRNGEREAGAAVTTESEVIWAAPLPPGTSAQRAELIALTQALKMAEGKKLTVYTDSRYAFATTHVHGEIYRRRGWLTSEGKEIKNKNEILALLEALFLPKRLSIIHCPGHQKGDSPQAKGNRLADDTAKKAATETHSSLTVLPAGKRTADGSEFEKRTADGSEFESPKKKAKVE

SEQ ID NO: 1215 - protein, 2092 aa, synthetic construct
MPAAKRVKLDGGDKKYSIGLDIGTNSVGWAVITDEYKVPSKKFKVLGNTDRHSIKKNLIGALLFDSGETAEATRLKRTARRRYTRRKNRICYLQEIFSNEMAKVDDSFFHRLEESFLVEEDKKHERHPIFGNIVDEVAYHEKYPTIYHLRKKLVDSTDKADLRLIYLALAHMIKFRGHFLIEGDLNPDNSDVDKLFIQLVQTYNQLFEENPINASGVDAKAILSARLSKSRRLENLIAQLPGEKKNGLFGNLIALSLGLTPNFKSNFDLAEDAKLQLSKDTYDDDLDNLLAQIGDQYADLFLAAKNLSDAILLSDILRVNTEITKAPLSASMIKRYDEHHQDLTLLKALVRQQLPEKYKEIFFDQSKNGYAGYIDGGASQEEFYKFIKPILEKMDGTEELLVKLNREDLLRKQRTFDNGSIPHQIHLGELHAILRRQEDFYPFLKDNREKIEKILTFRIPYYVGPLARGNSRFAWMTRKSEETITPWNFEEVVDKGASAQSFIERMTNFDKNLPNEKVLPKHSLLYEYFTVYNELTKVKYVTEGMRKPAFLSGEQKKAIVDLLFKTNRKVTVKQLKEDYFKKIECFDSVEISGVEDRFNASLGTYHDLLKIIKDKDFLDNEENEDILEDIVLTLTLFEDREMIEERLKTYAHLFDDKVMKQLKRRRYTGWGRLSRKLINGIRDKQSGKTILDFLKSDGFANRNFMQLIHDDSLTFKEDIQKAQVSGQGDSLHEHIANLAGSPAIKKGILQTVKVVDELVKVMGRHKPENIVIEMARENQTTQKGQKNSRERMKRIEEGIKELGSQILKEHPVENTQLQNEKLYLYYLQNGRDMYVDQELDINRLSDYDVDHIVPQSFLKDDSIDNKVLTRSDKARGKSDNVPSEEVVKKMKNYWRQLLNAKLITQRKFDNLTKAERGGLSELDKAGFIKRQLVETRQITKHVAQILDSRMNTKYDENDKLIREVKVITLKSKLVSDFRKDFQFYKVREINNYHHAHDAYLNAVVGTALIKKYPKLESEFVYGDYKVYDVRKMIAKSEQEIGKATAKYFFYSNIMNFFKTEITLANGEIRKRPLIETNGETGEIVWDKGRDFATVRKVLSMPQVNIVKKTEVQTGGFSKESILPKRNSDKLIARKKDWDPKKYGGFDSPTVAYSVLVVAKVEKGKSKKLKSVKELLGITIMERSSFEKNPIDFLEAKGYKEVKKDLIIKLPKYSLFELENGRKRMLASAGELQKGNELALPSKYVNFLYLASHYEKLKGSPEDNEQKQLFVEQHKHYLDEIIEQISEFSKRVILADANLDKVLSAYNKHRDKPIREQAENIIHLFTLTNLGAPAAFKYFDTTIDRKRYTSTKEVLDATLIHQSITGLYETRIDLSQLGGDGGGGGGGGGGGGTLQLEEEYRLFEPESTQKQEMDIWLKNFPQAWAETGGMGTAHCQAPVLIQLKATATPISIRQYPMPHEAYQGIKPHIRRMLDQGILKPCQSPWNTPLLPVKKPGTEDYRPVQDLREVNKRVEDIHPTVPNPYNLLSTLPPSHPWYTVLDLKDAFFCLRLHSESQLLFAFEWRDPEIGLSGQLTWTRLPQGFKNSPTLFNEALHSDLADFRVRYPALVLLQYVDDLLLAAATRTECLEGTKALLETLGNKGYRASAKKAQICLQEVTYLGYSLKDGQRWLTKARKEAILSIPVPKNSRQVREFLGKAGYCRLFIPGFAELAAPLYPLTRPGTLFQWGTEQQLAFEDIKKALLSSPALGLPDITKPFELFIDENSGFAKGVLVQKLGPWKRPVAYLSKKLDTVASGWPPCLRMVAAIAILVKDAGKLTLGQPLTILTSHPVEALVRQPPNKWLSNARMTHYQAMLLDAERVHFGPTVSLNPATLLPLPSGGNHHDCLQILAETHGTRPDLTDQPLPDADLTWYTDGSSFIRNGEREAGAAVTTESEVIWAAPLPPGTSAQRAELIALTQALKMAEGKKLTVYTDSRYAFATTHVHGEIYRRRGWLTSEGKEIKNKNEILALLEALFLPKRLSIIHCPGHQKGDSPQAKGNRLADDTAKKAATETHSSLTVLPAGKRTADGSEFEKRTADGSEFESPKKKAKVE

SEQ ID NO: 1216 - protein, 2093 aa, synthetic construct
MPAAKRVKLDGGDKKYSIGLDIGTNSVGWAVITDEYKVPSKKFKVLGNTDRHSIKKNLIGALLFDSGETAEATRLKRTARRRYTRRKNRICYLQEIFSNEMAKVDDSFFHRLEESFLVEEDKKHERHPIFGNIVDEVAYHEKYPTIYHLRKKLVDSTDKADLRLIYLALAHMIKFRGHFLIEGDLNPDNSDVDKLFIQLVQTYNQLFEENPINASGVDAKAILSARLSKSRRLENLIAQLPGEKKNGLFGNLIALSLGLTPNFKSNFDLAEDAKLQLSKDTYDDDLDNLLAQIGDQYADLFLAAKNLSDAILLSDILRVNTEITKAPLSASMIKRYDEHHQDLTLLKALVRQQLPEKYKEIFFDQSKNGYAGYIDGGASQEEFYKFIKPILEKMDGTEELLVKLNREDLLRKQRTFDNGSIPHQIHLGELHAILRRQEDFYPFLKDNREKIEKILTFRIPYYVGPLARGNSRFAWMTRKSEETITPWNFEEVVDKGASAQSFIERMTNFDKNLPNEKVLPKHSLLYEYFTVYNELTKVKYVTEGMRKPAFLSGEQKKAIVDLLFKTNRKVTVKQLKEDYFKKIECFDSVEISGVEDRFNASLGTYHDLLKIIKDKDFLDNEENEDILEDIVLTLTLFEDREMIEERLKTYAHLFDDKVMKQLKRRRYTGWGRLSRKLINGIRDKQSGKTILDFLKSDGFANRNFMQLIHDDSLTFKEDIQKAQVSGQGDSLHEHIANLAGSPAIKKGILQTVKVVDELVKVMGRHKPENIVIEMARENQTTQKGQKNSRERMKRIEEGIKELGSQILKEHPVENTQLQNEKLYLYYLQNGRDMYVDQELDINRLSDYDVDHIVPQSFLKDDSIDNKVLTRSDKARGKSDNVPSEEVVKKMKNYWRQLLNAKLITQRKFDNLTKAERGGLSELDKAGFIKRQLVETRQITKHVAQILDSRMNTKYDENDKLIREVKVITLKSKLVSDFRKDFQFYKVREINNYHHAHDAYLNAVVGTALIKKYPKLESEFVYGDYKVYDVRKMIAKSEQEIGKATAKYFFYSNIMNFFKTEITLANGEIRKRPLIETNGETGEIVWDKGRDFATVRKVLSMPQVNIVKKTEVQTGGFSKESILPKRNSDKLIARKKDWDPKKYGGFDSPTVAYSVLVVAKVEKGKSKKLKSVKELLGITIMERSSFEKNPIDFLEAKGYKEVKKDLIIKLPKYSLFELENGRKRMLASAGELQKGNELALPSKYVNFLYLASHYEKLKGSPEDNEQKQLFVEQHKHYLDEIIEQISEFSKRVILADANLDKVLSAYNKHRDKPIREQAENIIHLFTLTNLGAPAAFKYFDTTIDRKRYTSTKEVLDATLIHQSITGLYETRIDLSQLGGDGGPAPAPAPAPGGTLQLEEEYRLFEPESTQKQEMDIWLKNFPQAWAETGGMGTAHCQAPVLIQLKATATPISIRQYPMPHEAYQGIKPHIRRMLDQGILKPCQSPWNTPLLPVKKPGTEDYRPVQDLREVNKRVEDIHPTVPNPYNLLSTLPPSHPWYTVLDLKDAFFCLRLHSESQLLFAFEWRDPEIGLSGQLTWTRLPQGFKNSPTLFNEALHSDLADFRVRYPALVLLQYVDDLLLAAATRTECLEGTKALLETLGNKGYRASAKKAQICLQEVTYLGYSLKDGQRWLTKARKEAILSIPVPKNSRQVREFLGKAGYCRLFIPGFAELAAPLYPLTRPGTLFQWGTEQQLAFEDIKKALLSSPALGLPDITKPFELFIDENSGFAKGVLVQKLGPWKRPVAYLSKKLDTVASGWPPCLRMVAAIAILVKDAGKLTLGQPLTILTSHPVEALVRQPPNKWLSNARMTHYQAMLLDAERVHFGPTVSLNPATLLPLPSGGNHHDCLQILAETHGTRPDLTDQPLPDADLTWYTDGSSFIRNGEREAGAAVTTESEVIWAAPLPPGTSAQRAELIALTQALKMAEGKKLTVYTDSRYAFATTHVHGEIYRRRGWLTSEGKEIKNKNEILALLEALFLPKRLSIIHCPGHQKGDSPQAKGNRLADDTAKKAATETHSSLTVLPAGKRTADGSEFEKRTADGSEFESPKKKAKVE

SEQ ID NO: 1217 - protein, 2089 aa, synthetic construct
MPAAKRVKLDGGDKKYSIGLDIGTNSVGWAVITDEYKVPSKKFKVLGNTDRHSIKKNLIGALLFDSGETAEATRLKRTARRRYTRRKNRICYLQEIFSNEMAKVDDSFFHRLEESFLVEEDKKHERHPIFGNIVDEVAYHEKYPTIYHLRKKLVDSTDKADLRLIYLALAHMIKFRGHFLIEGDLNPDNSDVDKLFIQLVQTYNQLFEENPINASGVDAKAILSARLSKSRRLENLIAQLPGEKKNGLFGNLIALSLGLTPNFKSNFDLAEDAKLQLSKDTYDDDLDNLLAQIGDQYADLFLAAKNLSDAILLSDILRVNTEITKAPLSASMIKRYDEHHQDLTLLKALVRQQLPEKYKEIFFDQSKNGYAGYIDGGASQEEFYKFIKPILEKMDGTEELLVKLNREDLLRKQRTFDNGSIPHQIHLGELHAILRRQEDFYPFLKDNREKIEKILTFRIPYYVGPLARGNSRFAWMTRKSEETITPWNFEEVVDKGASAQSFIERMTNFDKNLPNEKVLPKHSLLYEYFTVYNELTKVKYVTEGMRKPAFLSGEQKKAIVDLLFKTNRKVTVKQLKEDYFKKIECFDSVEISGVEDRFNASLGTYHDLLKIIKDKDFLDNEENEDILEDIVLTLTLFEDREMIEERLKTYAHLFDDKVMKQLKRRRYTGWGRLSRKLINGIRDKQSGKTILDFLKSDGFANRNFMQLIHDDSLTFKEDIQKAQVSGQGDSLHEHIANLAGSPAIKKGILQTVKVVDELVKVMGRHKPENIVIEMARENQTTQKGQKNSRERMKRIEEGIKELGSQILKEHPVENTQLQNEKLYLYYLQNGRDMYVDQELDINRLSDYDVDHIVPQSFLKDDSIDNKVLTRSDKARGKSDNVPSEEVVKKMKNYWRQLLNAKLITQRKFDNLTKAERGGLSELDKAGFIKRQLVETRQITKHVAQILDSRMNTKYDENDKLIREVKVITLKSKLVSDFRKDFQFYKVREINNYHHAHDAYLNAVVGTALIKKYPKLESEFVYGDYKVYDVRKMIAKSEQEIGKATAKYFFYSNIMNFFKTEITLANGEIRKRPLIETNGETGEIVWDKGRDFATVRKVLSMPQVNIVKKTEVQTGGFSKESILPKRNSDKLIARKKDWDPKKYGGFDSPTVAYSVLVVAKVEKGKSKKLKSVKELLGITIMERSSFEKNPIDFLEAKGYKEVKKDLIIKLPKYSLFELENGRKRMLASAGELQKGNELALPSKYVNFLYLASHYEKLKGSPEDNEQKQLFVEQHKHYLDEIIEQISEFSKRVILADANLDKVLSAYNKHRDKPIREQAENIIHLFTLTNLGAPAAFKYFDTTIDRKRYTSTKEVLDATLIHQSITGLYETRIDLSQLGGDGGGGGGGGGTLQLEEEYRLFEPESTQKQEMDIWLKNFPQAWAETGGMGTAHCQAPVLIQLKATATPISIRQYPMPHEAYQGIKPHIRRMLDQGILKPCQSPWNTPLLPVKKPGTEDYRPVQDLREVNKRVEDIHPTVPNPYNLLSTLPPSHPWYTVLDLKDAFFCLRLHSESQLLFAFEWRDPEIGLSGQLTWTRLPQGFKNSPTLFNEALHSDLADFRVRYPALVLLQYVDDLLLAAATRTECLEGTKALLETLGNKGYRASAKKAQICLQEVTYLGYSLKDGQRWLTKARKEAILSIPVPKNSRQVREFLGKAGYCRLFIPGFAELAAPLYPLTRPGTLFQWGTEQQLAFEDIKKALLSSPALGLPDITKPFELFIDENSGFAKGVLVQKLGPWKRPVAYLSKKLDTVASGWPPCLRMVAAIAILVKDAGKLTLGQPLTILTSHPVEALVRQPPNKWLSNARMTHYQAMLLDAERVHFGPTVSLNPATLLPLPSGGNHHDCLQILAETHGTRPDLTDQPLPDADLTWYTDGSSFIRNGEREAGAAVTTESEVIWAAPLPPGTSAQRAELIALTQALKMAEGKKLTVYTDSRYAFATTHVHGEIYRRRGWLTSEGKEIKNKNEILALLEALFLPKRLSIIHCPGHQKGDSPQAKGNRLADDTAKKAATETHSSLTVLPAGKRTADGSEFEKRTADGSEFESPKKKAKVE

SEQ ID NO: 1218 - protein, 2095 aa, synthetic construct
MPAAKRVKLDGGDKKYSIGLDIGTNSVGWAVITDEYKVPSKKFKVLGNTDRHSIKKNLIGALLFDSGETAEATRLKRTARRRYTRRKNRICYLQEIFSNEMAKVDDSFFHRLEESFLVEEDKKHERHPIFGNIVDEVAYHEKYPTIYHLRKKLVDSTDKADLRLIYLALAHMIKFRGHFLIEGDLNPDNSDVDKLFIQLVQTYNQLFEENPINASGVDAKAILSARLSKSRRLENLIAQLPGEKKNGLFGNLIALSLGLTPNFKSNFDLAEDAKLQLSKDTYDDDLDNLLAQIGDQYADLFLAAKNLSDAILLSDILRVNTEITKAPLSASMIKRYDEHHQDLTLLKALVRQQLPEKYKEIFFDQSKNGYAGYIDGGASQEEFYKFIKPILEKMDGTEELLVKLNREDLLRKQRTFDNGSIPHQIHLGELHAILRRQEDFYPFLKDNREKIEKILTFRIPYYVGPLARGNSRFAWMTRKSEETITPWNFEEVVDKGASAQSFIERMTNFDKNLPNEKVLPKHSLLYEYFTVYNELTKVKYVTEGMRKPAFLSGEQKKAIVDLLFKTNRKVTVKQLKEDYFKKIECFDSVEISGVEDRFNASLGTYHDLLKIIKDKDFLDNEENEDILEDIVLTLTLFEDREMIEERLKTYAHLFDDKVMKQLKRRRYTGWGRLSRKLINGIRDKQSGKTILDFLKSDGFANRNFMQLIHDDSLTFKEDIQKAQVSGQGDSLHEHIANLAGSPAIKKGILQTVKVVDELVKVMGRHKPENIVIEMARENQTTQKGQKNSRERMKRIEEGIKELGSQILKEHPVENTQLQNEKLYLYYLQNGRDMYVDQELDINRLSDYDVDHIVPQSFLKDDSIDNKVLTRSDKARGKSDNVPSEEVVKKMKNYWRQLLNAKLITQRKFDNLTKAERGGLSELDKAGFIKRQLVETRQITKHVAQILDSRMNTKYDENDKLIREVKVITLKSKLVSDFRKDFQFYKVREINNYHHAHDAYLNAVVGTALIKKYPKLESEFVYGDYKVYDVRKMIAKSEQEIGKATAKYFFYSNIMNFFKTEITLANGEIRKRPLIETNGETGEIVWDKGRDFATVRKVLSMPQVNIVKKTEVQTGGFSKESILPKRNSDKLIARKKDWDPKKYGGFDSPTVAYSVLVVAKVEKGKSKKLKSVKELLGITIMERSSFEKNPIDFLEAKGYKEVKKDLIIKLPKYSLFELENGRKRMLASAGELQKGNELALPSKYVNFLYLASHYEKLKGSPEDNEQKQLFVEQHKHYLDEIIEQISEFSKRVILADANLDKVLSAYNKHRDKPIREQAENIIHLFTLTNLGAPAAFKYFDTTIDRKRYTSTKEVLDATLIHQSITGLYETRIDLSQLGGDGGGSSEAAAKPAPGGTLQLEEEYRLFEPESTQKQEMDIWLKNFPQAWAETGGMGTAHCQAPVLIQLKATATPISIRQYPMPHEAYQGIKPHIRRMLDQGILKPCQSPWNTPLLPVKKPGTEDYRPVQDLREVNKRVEDIHPTVPNPYNLLSTLPPSHPWYTVLDLKDAFFCLRLHSESQLLFAFEWRDPEIGLSGQLTWTRLPQGFKNSPTLFNEALHSDLADFRVRYPALVLLQYVDDLLLAAATRTECLEGTKALLETLGNKGYRASAKKAQICLQEVTYLGYSLKDGQRWLTKARKEAILSIPVPKNSRQVREFLGKAGYCRLFIPGFAELAAPLYPLTRPGTLFQWGTEQQLAFEDIKKALLSSPALGLPDITKPFELFIDENSGFAKGVLVQKLGPWKRPVAYLSKKLDTVASGWPPCLRMVAAIAILVKDAGKLTLGQPLTILTSHPVEALVRQPPNKWLSNARMTHYQAMLLDAERVHFGPTVSLNPATLLPLPSGGNHHDCLQILAETHGTRPDLTDQPLPDADLTWYTDGSSFIRNGEREAGAAVTTESEVIWAAPLPPGTSAQRAELIALTQALKMAEGKKLTVYTDSRYAFATTHVHGEIYRRRGWLTSEGKEIKNKNEILALLEALFLPKRLSIIHCPGHQKGDSPQAKGNRLADDTAKKAATETHSSLTVLPAGKRTADGSEFEKRTADGSEFESPKKKAKVE

SEQ ID NO: 1219 - protein, 2097 aa, synthetic construct
MPAAKRVKLDGGDKKYSIGLDIGTNSVGWAVITDEYKVPSKKFKVLGNTDRHSIKKNLIGALLFDSGETAEATRLKRTARRRYTRRKNRICYLQEIFSNEMAKVDDSFFHRLEESFLVEEDKKHERHPIFGNIVDEVAYHEKYPTIYHLRKKLVDSTDKADLRLIYLALAHMIKFRGHFLIEGDLNPDNSDVDKLFIQLVQTYNQLFEENPINASGVDAKAILSARLSKSRRLENLIAQLPGEKKNGLFGNLIALSLGLTPNFKSNFDLAEDAKLQLSKDTYDDDLDNLLAQIGDQYADLFLAAKNLSDAILLSDILRVNTEITKAPLSASMIKRYDEHHQDLTLLKALVRQQLPEKYKEIFFDQSKNGYAGYIDGGASQEEFYKFIKPILEKMDGTEELLVKLNREDLLRKQRTFDNGSIPHQIHLGELHAILRRQEDFYPFLKDNREKIEKILTFRIPYYVGPLARGNSRFAWMTRKSEETITPWNFEEVVDKGASAQSFIERMTNFDKNLPNEKVLPKHSLLYEYFTVYNELTKVKYVTEGMRKPAFLSGEQKKAIVDLLFKTNRKVTVKQLKEDYFKKIECFDSVEISGVEDRFNASLGTYHDLLKIIKDKDFLDNEENEDILEDIVLTLTLFEDREMIEERLKTYAHLFDDKVMKQLKRRRYTGWGRLSRKLINGIRDKQSGKTILDFLKSDGFANRNFMQLIHDDSLTFKEDIQKAQVSGQGDSLHEHIANLAGSPAIKKGILQTVKVVDELVKVMGRHKPENIVIEMARENQTTQKGQKNSRERMKRIEEGIKELGSQILKEHPVENTQLQNEKLYLYYLQNGRDMYVDQELDINRLSDYDVDHIVPQSFLKDDSIDNKVLTRSDKARGKSDNVPSEEVVKKMKNYWRQLLNAKLITQRKFDNLTKAERGGLSELDKAGFIKRQLVETRQITKHVAQILDSRMNTKYDENDKLIREVKVITLKSKLVSDFRKDFQFYKVREINNYHHAHDAYLNAVVGTALIKKYPKLESEFVYGDYKVYDVRKMIAKSEQEIGKATAKYFFYSNIMNFFKTEITLANGEIRKRPLIETNGETGEIVWDKGRDFATVRKVLSMPQVNIVKKTEVQTGGFSKESILPKRNSDKLIARKKDWDPKKYGGFDSPTVAYSVLVVAKVEKGKSKKLKSVKELLGITIMERSSFEKNPIDFLEAKGYKEVKKDLIIKLPKYSLFELENGRKRMLASAGELQKGNELALPSKYVNFLYLASHYEKLKGSPEDNEQKQLFVEQHKHYLDEIIEQISEFSKRVILADANLDKVLSAYNKHRDKPIREQAENIIHLFTLTNLGAPAAFKYFDTTIDRKRYTSTKEVLDATLIHQSITGLYETRIDLSQLGGDGGPAPAPAPAPAPAPGGTLQLEEEYRLFEPESTQKQEMDIWLKNFPQAWAETGGMGTAHCQAPVLIQLKATATPISIRQYPMPHEAYQGIKPHIRRMLDQGILKPCQSPWNTPLLPVKKPGTEDYRPVQDLREVNKRVEDIHPTVPNPYNLLSTLPPSHPWYTVLDLKDAFFCLRLHSESQLLFAFEWRDPEIGLSGQLTWTRLPQGFKNSPTLFNEALHSDLADFRVRYPALVLLQYVDDLLLAAATRTECLEGTKALLETLGNKGYRASAKKAQICLQEVTYLGYSLKDGQRWLTKARKEAILSIPVPKNSRQVREFLGKAGYCRLFIPGFAELAAPLYPLTRPGTLFQWGTEQQLAFEDIKKALLSSPALGLPDITKPFELFIDENSGFAKGVLVQKLGPWKRPVAYLSKKLDTVASGWPPCLRMVAAIAILVKDAGKLTLGQPLTILTSHPVEALVRQPPNKWLSNARMTHYQAMLLDAERVHFGPTVSLNPATLLPLPSGGNHHDCLQILAETHGTRPDLTDQPLPDADLTWYTDGSSFIRNGEREAGAAVTTESEVIWAAPLPPGTSAQRAELIALTQALKMAEGKKLTVYTDSRYAFATTHVHGEIYRRRGWLTSEGKEIKNKNEILALLEALFLPKRLSIIHCPGHQKGDSPQAKGNRLADDTAKKAATETHSSLTVLPAGKRTADGSEFEKRTADGSEFESPKKKAKVE

SEQ ID NO: 1220 - protein, 2095 aa, synthetic construct
MPAAKRVKLDGGDKKYSIGLDIGTNSVGWAVITDEYKVPSKKFKVLGNTDRHSIKKNLIGALLFDSGETAEATRLKRTARRRYTRRKNRICYLQEIFSNEMAKVDDSFFHRLEESFLVEEDKKHERHPIFGNIVDEVAYHEKYPTIYHLRKKLVDSTDKADLRLIYLALAHMIKFRGHFLIEGDLNPDNSDVDKLFIQLVQTYNQLFEENPINASGVDAKAILSARLSKSRRLENLIAQLPGEKKNGLFGNLIALSLGLTPNFKSNFDLAEDAKLQLSKDTYDDDLDNLLAQIGDQYADLFLAAKNLSDAILLSDILRVNTEITKAPLSASMIKRYDEHHQDLTLLKALVRQQLPEKYKEIFFDQSKNGYAGYIDGGASQEEFYKFIKPILEKMDGTEELLVKLNREDLLRKQRTFDNGSIPHQIHLGELHAILRRQEDFYPFLKDNREKIEKILTFRIPYYVGPLARGNSRFAWMTRKSEETITPWNFEEVVDKGASAQSFIERMTNFDKNLPNEKVLPKHSLLYEYFTVYNELTKVKYVTEGMRKPAFLSGEQKKAIVDLLFKTNRKVTVKQLKEDYFKKIECFDSVEISGVEDRFNASLGTYHDLLKIIKDKDFLDNEENEDILEDIVLTLTLFEDREMIEERLKTYAHLFDDKVMKQLKRRRYTGWGRLSRKLINGIRDKQSGKTILDFLKSDGFANRNFMQLIHDDSLTFKEDIQKAQVSGQGDSLHEHIANLAGSPAIKKGILQTVKVVDELVKVMGRHKPENIVIEMARENQTTQKGQKNSRERMKRIEEGIKELGSQILKEHPVENTQLQNEKLYLYYLQNGRDMYVDQELDINRLSDYDVDHIVPQSFLKDDSIDNKVLTRSDKARGKSDNVPSEEVVKKMKNYWRQLLNAKLITQRKFDNLTKAERGGLSELDKAGFIKRQLVETRQITKHVAQILDSRMNTKYDENDKLIREVKVITLKSKLVSDFRKDFQFYKVREINNYHHAHDAYLNAVVGTALIKKYPKLESEFVYGDYKVYDVRKMIAKSEQEIGKATAKYFFYSNIMNFFKTEITLANGEIRKRPLIETNGETGEIVWDKGRDFATVRKVLSMPQVNIVKKTEVQTGGFSKESILPKRNSDKLIARKKDWDPKKYGGFDSPTVAYSVLVVAKVEKGKSKKLKSVKELLGITIMERSSFEKNPIDFLEAKGYKEVKKDLIIKLPKYSLFELENGRKRMLASAGELQKGNELALPSKYVNFLYLASHYEKLKGSPEDNEQKQLFVEQHKHYLDEIIEQISEFSKRVILADANLDKVLSAYNKHRDKPIREQAENIIHLFTLTNLGAPAAFKYFDTTIDRKRYTSTKEVLDATLIHQSITGLYETRIDLSQLGGDGGGGSGSSEAAAKGGTLQLEEEYRLFEPESTQKQEMDIWLKNFPQAWAETGGMGTAHCQAPVLIQLKATATPISIRQYPMPHEAYQGIKPHIRRMLDQGILKPCQSPWNTPLLPVKKPGTEDYRPVQDLREVNKRVEDIHPTVPNPYNLLSTLPPSHPWYTVLDLKDAFFCLRLHSESQLLFAFEWRDPEIGLSGQLTWTRLPQGFKNSPTLFNEALHSDLADFRVRYPALVLLQYVDDLLLAAATRTECLEGTKALLETLGNKGYRASAKKAQICLQEVTYLGYSLKDGQRWLTKARKEAILSIPVPKNSRQVREFLGKAGYCRLFIPGFAELAAPLYPLTRPGTLFQWGTEQQLAFEDIKKALLSSPALGLPDITKPFELFIDENSGFAKGVLVQKLGPWKRPVAYLSKKLDTVASGWPPCLRMVAAIAILVKDAGKLTLGQPLTILTSHPVEALVRQPPNKWLSNARMTHYQAMLLDAERVHFGPTVSLNPATLLPLPSGGNHHDCLQILAETHGTRPDLTDQPLPDADLTWYTDGSSFIRNGEREAGAAVTTESEVIWAAPLPPGTSAQRAELIALTQALKMAEGKKLTVYTDSRYAFATTHVHGEIYRRRGWLTSEGKEIKNKNEILALLEALFLPKRLSIIHCPGHQKGDSPQAKGNRLADDTAKKAATETHSSLTVLPAGKRTADGSEFEKRTADGSEFESPKKKAKVE

SEQ ID NO: 1221 - protein, 2095 aa, synthetic construct
MPAAKRVKLDGGDKKYSIGLDIGTNSVGWAVITDEYKVPSKKFKVLGNTDRHSIKKNLIGALLFDSGETAEATRLKRTARRRYTRRKNRICYLQEIFSNEMAKVDDSFFHRLEESFLVEEDKKHERHPIFGNIVDEVAYHEKYPTIYHLRKKLVDSTDKADLRLIYLALAHMIKFRGHFLIEGDLNPDNSDVDKLFIQLVQTYNQLFEENPINASGVDAKAILSARLSKSRRLENLIAQLPGEKKNGLFGNLIALSLGLTPNFKSNFDLAEDAKLQLSKDTYDDDLDNLLAQIGDQYADLFLAAKNLSDAILLSDILRVNTEITKAPLSASMIKRYDEHHQDLTLLKALVRQQLPEKYKEIFFDQSKNGYAGYIDGGASQEEFYKFIKPILEKMDGTEELLVKLNREDLLRKQRTFDNGSIPHQIHLGELHAILRRQEDFYPFLKDNREKIEKILTFRIPYYVGPLARGNSRFAWMTRKSEETITPWNFEEVVDKGASAQSFIERMTNFDKNLPNEKVLPKHSLLYEYFTVYNELTKVKYVTEGMRKPAFLSGEQKKAIVDLLFKTNRKVTVKQLKEDYFKKIECFDSVEISGVEDRFNASLGTYHDLLKIIKDKDFLDNEENEDILEDIVLTLTLFEDREMIEERLKTYAHLFDDKVMKQLKRRRYTGWGRLSRKLINGIRDKQSGKTILDFLKSDGFANRNFMQLIHDDSLTFKEDIQKAQVSGQGDSLHEHIANLAGSPAIKKGILQTVKVVDELVKVMGRHKPENIVIEMARENQTTQKGQKNSRERMKRIEEGIKELGSQILKEHPVENTQLQNEKLYLYYLQNGRDMYVDQELDINRLSDYDVDHIVPQSFLKDDSIDNKVLTRSDKARGKSDNVPSEEVVKKMKNYWRQLLNAKLITQRKFDNLTKAERGGLSELDKAGFIKRQLVETRQITKHVAQILDSRMNTKYDENDKLIREVKVITLKSKLVSDFRKDFQFYKVREINNYHHAHDAYLNAVVGTALIKKYPKLESEFVYGDYKVYDVRKMIAKSEQEIGKATAKYFFYSNIMNFFKTEITLANGEIRKRPLIETNGETGEIVWDKGRDFATVRKVLSMPQVNIVKKTEVQTGGFSKESILPKRNSDKLIARKKDWDPKKYGGFDSPTVAYSVLVVAKVEKGKSKKLKSVKELLGITIMERSSFEKNPIDFLEAKGYKEVKKDLIIKLPKYSLFELENGRKRMLASAGELQKGNELALPSKYVNFLYLASHYEKLKGSPEDNEQKQLFVEQHKHYLDEIIEQISEFSKRVILADANLDKVLSAYNKHRDKPIREQAENIIHLFTLTNLGAPAAFKYFDTTIDRKRYTSTKEVLDATLIHQSITGLYETRIDLSQLGGDGGGGGPAPEAAAKGGTLQLEEEYRLFEPESTQKQEMDIWLKNFPQAWAETGGMGTAHCQAPVLIQLKATATPISIRQYPMPHEAYQGIKPHIRRMLDQGILKPCQSPWNTPLLPVKKPGTEDYRPVQDLREVNKRVEDIHPTVPNPYNLLSTLPPSHPWYTVLDLKDAFFCLRLHSESQLLFAFEWRDPEIGLSGQLTWTRLPQGFKNSPTLFNEALHSDLADFRVRYPALVLLQYVDDLLLAAATRTECLEGTKALLETLGNKGYRASAKKAQICLQEVTYLGYSLKDGQRWLTKARKEAILSIPVPKNSRQVREFLGKAGYCRLFIPGFAELAAPLYPLTRPGTLFQWGTEQQLAFEDIKKALLSSPALGLPDITKPFELFIDENSGFAKGVLVQKLGPWKRPVAYLSKKLDTVASGWPPCLRMVAAIAILVKDAGKLTLGQPLTILTSHPVEALVRQPPNKWLSNARMTHYQAMLLDAERVHFGPTVSLNPATLLPLPSGGNHHDCLQILAETHGTRPDLTDQPLPDADLTWYTDGSSFIRNGEREAGAAVTTESEVIWAAPLPPGTSAQRAELIALTQALKMAEGKKLTVYTDSRYAFATTHVHGEIYRRRGWLTSEGKEIKNKNEILALLEALFLPKRLSIIHCPGHQKGDSPQAKGNRLADDTAKKAATETHSSLTVLPAGKRTADGSEFEKRTADGSEFESPKKKAKVE

SEQ ID NO: 1222 - protein, 2117 aa, synthetic construct
MPAAKRVKLDGGDKKYSIGLDIGTNSVGWAVITDEYKVPSKKFKVLGNTDRHSIKKNLIGALLFDSGETAEATRLKRTARRRYTRRKNRICYLQEIFSNEMAKVDDSFFHRLEESFLVEEDKKHERHPIFGNIVDEVAYHEKYPTIYHLRKKLVDSTDKADLRLIYLALAHMIKFRGHFLIEGDLNPDNSDVDKLFIQLVQTYNQLFEENPINASGVDAKAILSARLSKSRRLENLIAQLPGEKKNGLFGNLIALSLGLTPNFKSNFDLAEDAKLQLSKDTYDDDLDNLLAQIGDQYADLFLAAKNLSDAILLSDILRVNTEITKAPLSASMIKRYDEHHQDLTLLKALVRQQLPEKYKEIFFDQSKNGYAGYIDGGASQEEFYKFIKPILEKMDGTEELLVKLNREDLLRKQRTFDNGSIPHQIHLGELHAILRRQEDFYPFLKDNREKIEKILTFRIPYYVGPLARGNSRFAWMTRKSEETITPWNFEEVVDKGASAQSFIERMTNFDKNLPNEKVLPKHSLLYEYFTVYNELTKVKYVTEGMRKPAFLSGEQKKAIVDLLFKTNRKVTVKQLKEDYFKKIECFDSVEISGVEDRFNASLGTYHDLLKIIKDKDFLDNEENEDILEDIVLTLTLFEDREMIEERLKTYAHLFDDKVMKQLKRRRYTGWGRLSRKLINGIRDKQSGKTILDFLKSDGFANRNFMQLIHDDSLTFKEDIQKAQVSGQGDSLHEHIANLAGSPAIKKGILQTVKVVDELVKVMGRHKPENIVIEMARENQTTQKGQKNSRERMKRIEEGIKELGSQILKEHPVENTQLQNEKLYLYYLQNGRDMYVDQELDINRLSDYDVDHIVPQSFLKDDSIDNKVLTRSDKARGKSDNVPSEEVVKKMKNYWRQLLNAKLITQRKFDNLTKAERGGLSELDKAGFIKRQLVETRQITKHVAQILDSRMNTKYDENDKLIREVKVITLKSKLVSDFRKDFQFYKVREINNYHHAHDAYLNAVVGTALIKKYPKLESEFVYGDYKVYDVRKMIAKSEQEIGKATAKYFFYSNIMNFFKTEITLANGEIRKRPLIETNGETGEIVWDKGRDFATVRKVLSMPQVNIVKKTEVQTGGFSKESILPKRNSDKLIARKKDWDPKKYGGFDSPTVAYSVLVVAKVEKGKSKKLKSVKELLGITIMERSSFEKNPIDFLEAKGYKEVKKDLIIKLPKYSLFELENGRKRMLASAGELQKGNELALPSKYVNFLYLASHYEKLKGSPEDNEQKQLFVEQHKHYLDEIIEQISEFSKRVILADANLDKVLSAYNKHRDKPIREQAENIIHLFTLTNLGAPAAFKYFDTTIDRKRYTSTKEVLDATLIHQSITGLYETRIDLSQLGGDGGSGGSSGGSSGSETPGTSESATPESSGGSSGGSSGGTLQLEEEYRLFEPESTQKQEMDIWLKNFPQAWAETGGMGTAHCQAPVLIQLKATATPISIRQYPMPHEAYQGIKPHIRRMLDQGILKPCQSPWNTPLLPVKKPGTEDYRPVQDLREVNKRVEDIHPTVPNPYNLLSTLPPSHPWYTVLDLKDAFFCLRLHSESQLLFAFEWRDPEIGLSGQLTWTRLPQGFKNSPTLFNEALHSDLADFRVRYPALVLLQYVDDLLLAAATRTECLEGTKALLETLGNKGYRASAKKAQICLQEVTYLGYSLKDGQRWLTKARKEAILSIPVPKNSRQVREFLGKAGYCRLFIPGFAELAAPLYPLTRPGTLFQWGTEQQLAFEDIKKALLSSPALGLPDITKPFELFIDENSGFAKGVLVQKLGPWKRPVAYLSKKLDTVASGWPPCLRMVAAIAILVKDAGKLTLGQPLTILTSHPVEALVRQPPNKWLSNARMTHYQAMLLDAERVHFGPTVSLNPATLLPLPSGGNHHDCLQILAETHGTRPDLTDQPLPDADLTWYTDGSSFIRNGEREAGAAVTTESEVIWAAPLPPGTSAQRAELIALTQALKMAEGKKLTVYTDSRYAFATTHVHGEIYRRRGWLTSEGKEIKNKNEILALLEALFLPKRLSIIHCPGHQKGDSPQAKGNRLADDTAKKAATETHSSLTVLPAGKRTADGSEFEKRTADGSEFESPKKKAKVE

SEQ ID NO: 1223 - protein, 2087 aa, synthetic construct
MPAAKRVKLDGGDKKYSIGLDIGTNSVGWAVITDEYKVPSKKFKVLGNTDRHSIKKNLIGALLFDSGETAEATRLKRTARRRYTRRKNRICYLQEIFSNEMAKVDDSFFHRLEESFLVEEDKKHERHPIFGNIVDEVAYHEKYPTIYHLRKKLVDSTDKADLRLIYLALAHMIKFRGHFLIEGDLNPDNSDVDKLFIQLVQTYNQLFEENPINASGVDAKAILSARLSKSRRLENLIAQLPGEKKNGLFGNLIALSLGLTPNFKSNFDLAEDAKLQLSKDTYDDDLDNLLAQIGDQYADLFLAAKNLSDAILLSDILRVNTEITKAPLSASMIKRYDEHHQDLTLLKALVRQQLPEKYKEIFFDQSKNGYAGYIDGGASQEEFYKFIKPILEKMDGTEELLVKLNREDLLRKQRTFDNGSIPHQIHLGELHAILRRQEDFYPFLKDNREKIEKILTFRIPYYVGPLARGNSRFAWMTRKSEETITPWNFEEVVDKGASAQSFIERMTNFDKNLPNEKVLPKHSLLYEYFTVYNELTKVKYVTEGMRKPAFLSGEQKKAIVDLLFKTNRKVTVKQLKEDYFKKIECFDSVEISGVEDRFNASLGTYHDLLKIIKDKDFLDNEENEDILEDIVLTLTLFEDREMIEERLKTYAHLFDDKVMKQLKRRRYTGWGRLSRKLINGIRDKQSGKTILDFLKSDGFANRNFMQLIHDDSLTFKEDIQKAQVSGQGDSLHEHIANLAGSPAIKKGILQTVKVVDELVKVMGRHKPENIVIEMARENQTTQKGQKNSRERMKRIEEGIKELGSQILKEHPVENTQLQNEKLYLYYLQNGRDMYVDQELDINRLSDYDVDHIVPQSFLKDDSIDNKVLTRSDKARGKSDNVPSEEVVKKMKNYWRQLLNAKLITQRKFDNLTKAERGGLSELDKAGFIKRQLVETRQITKHVAQILDSRMNTKYDENDKLIREVKVITLKSKLVSDFRKDFQFYKVREINNYHHAHDAYLNAVVGTALIKKYPKLESEFVYGDYKVYDVRKMIAKSEQEIGKATAKYFFYSNIMNFFKTEITLANGEIRKRPLIETNGETGEIVWDKGRDFATVRKVLSMPQVNIVKKTEVQTGGFSKESILPKRNSDKLIARKKDWDPKKYGGFDSPTVAYSVLVVAKVEKGKSKKLKSVKELLGITIMERSSFEKNPIDFLEAKGYKEVKKDLIIKLPKYSLFELENGRKRMLASAGELQKGNELALPSKYVNFLYLASHYEKLKGSPEDNEQKQLFVEQHKHYLDEIIEQISEFSKRVILADANLDKVLSAYNKHRDKPIREQAENIIHLFTLTNLGAPAAFKYFDTTIDRKRYTSTKEVLDATLIHQSITGLYETRIDLSQLGGDGGPAPGGTLQLEEEYRLFEPESTQKQEMDIWLKNFPQAWAETGGMGTAHCQAPVLIQLKATATPISIRQYPMPHEAYQGIKPHIRRMLDQGILKPCQSPWNTPLLPVKKPGTEDYRPVQDLREVNKRVEDIHPTVPNPYNLLSTLPPSHPWYTVLDLKDAFFCLRLHSESQLLFAFEWRDPEIGLSGQLTWTRLPQGFKNSPTLFNEALHSDLADFRVRYPALVLLQYVDDLLLAAATRTECLEGTKALLETLGNKGYRASAKKAQICLQEVTYLGYSLKDGQRWLTKARKEAILSIPVPKNSRQVREFLGKAGYCRLFIPGFAELAAPLYPLTRPGTLFQWGTEQQLAFEDIKKALLSSPALGLPDITKPFELFIDENSGFAKGVLVQKLGPWKRPVAYLSKKLDTVASGWPPCLRMVAAIAILVKDAGKLTLGQPLTILTSHPVEALVRQPPNKWLSNARMTHYQAMLLDAERVHFGPTVSLNPATLLPLPSGGNHHDCLQILAETHGTRPDLTDQPLPDADLTWYTDGSSFIRNGEREAGAAVTTESEVIWAAPLPPGTSAQRAELIALTQALKMAEGKKLTVYTDSRYAFATTHVHGEIYRRRGWLTSEGKEIKNKNEILALLEALFLPKRLSIIHCPGHQKGDSPQAKGNRLADDTAKKAATETHSSLTVLPAGKRTADGSEFEKRTADGSEFESPKKKAKVE

SEQ ID NO: 1224 - protein, 2093 aa, synthetic construct
MPAAKRVKLDGGDKKYSIGLDIGTNSVGWAVITDEYKVPSKKFKVLGNTDRHSIKKNLIGALLFDSGETAEATRLKRTARRRYTRRKNRICYLQEIFSNEMAKVDDSFFHRLEESFLVEEDKKHERHPIFGNIVDEVAYHEKYPTIYHLRKKLVDSTDKADLRLIYLALAHMIKFRGHFLIEGDLNPDNSDVDKLFIQLVQTYNQLFEENPINASGVDAKAILSARLSKSRRLENLIAQLPGEKKNGLFGNLIALSLGLTPNFKSNFDLAEDAKLQLSKDTYDDDLDNLLAQIGDQYADLFLAAKNLSDAILLSDILRVNTEITKAPLSASMIKRYDEHHQDLTLLKALVRQQLPEKYKEIFFDQSKNGYAGYIDGGASQEEFYKFIKPILEKMDGTEELLVKLNREDLLRKQRTFDNGSIPHQIHLGELHAILRRQEDFYPFLKDNREKIEKILTFRIPYYVGPLARGNSRFAWMTRKSEETITPWNFEEVVDKGASAQSFIERMTNFDKNLPNEKVLPKHSLLYEYFTVYNELTKVKYVTEGMRKPAFLSGEQKKAIVDLLFKTNRKVTVKQLKEDYFKKIECFDSVEISGVEDRFNASLGTYHDLLKIIKDKDFLDNEENEDILEDIVLTLTLFEDREMIEERLKTYAHLFDDKVMKQLKRRRYTGWGRLSRKLINGIRDKQSGKTILDFLKSDGFANRNFMQLIHDDSLTFKEDIQKAQVSGQGDSLHEHIANLAGSPAIKKGILQTVKVVDELVKVMGRHKPENIVIEMARENQTTQKGQKNSRERMKRIEEGIKELGSQILKEHPVENTQLQNEKLYLYYLQNGRDMYVDQELDINRLSDYDVDHIVPQSFLKDDSIDNKVLTRSDKARGKSDNVPSEEVVKKMKNYWRQLLNAKLITQRKFDNLTKAERGGLSELDKAGFIKRQLVETRQITKHVAQILDSRMNTKYDENDKLIREVKVITLKSKLVSDFRKDFQFYKVREINNYHHAHDAYLNAVVGTALIKKYPKLESEFVYGDYKVYDVRKMIAKSEQEIGKATAKYFFYSNIMNFFKTEITLANGEIRKRPLIETNGETGEIVWDKGRDFATVRKVLSMPQVNIVKKTEVQTGGFSKESILPKRNSDKLIARKKDWDPKKYGGFDSPTVAYSVLVVAKVEKGKSKKLKSVKELLGITIMERSSFEKNPIDFLEAKGYKEVKKDLIIKLPKYSLFELENGRKRMLASAGELQKGNELALPSKYVNFLYLASHYEKLKGSPEDNEQKQLFVEQHKHYLDEIIEQISEFSKRVILADANLDKVLSAYNKHRDKPIREQAENIIHLFTLTNLGAPAAFKYFDTTIDRKRYTSTKEVLDATLIHQSITGLYETRIDLSQLGGDGGGSSPAPGGGGGTLQLEEEYRLFEPESTQKQEMDIWLKNFPQAWAETGGMGTAHCQAPVLIQLKATATPISIRQYPMPHEAYQGIKPHIRRMLDQGILKPCQSPWNTPLLPVKKPGTEDYRPVQDLREVNKRVEDIHPTVPNPYNLLSTLPPSHPWYTVLDLKDAFFCLRLHSESQLLFAFEWRDPEIGLSGQLTWTRLPQGFKNSPTLFNEALHSDLADFRVRYPALVLLQYVDDLLLAAATRTECLEGTKALLETLGNKGYRASAKKAQICLQEVTYLGYSLKDGQRWLTKARKEAILSIPVPKNSRQVREFLGKAGYCRLFIPGFAELAAPLYPLTRPGTLFQWGTEQQLAFEDIKKALLSSPALGLPDITKPFELFIDENSGFAKGVLVQKLGPWKRPVAYLSKKLDTVASGWPPCLRMVAAIAILVKDAGKLTLGQPLTILTSHPVEALVRQPPNKWLSNARMTHYQAMLLDAERVHFGPTVSLNPATLLPLPSGGNHHDCLQILAETHGTRPDLTDQPLPDADLTWYTDGSSFIRNGEREAGAAVTTESEVIWAAPLPPGTSAQRAELIALTQALKMAEGKKLTVYTDSRYAFATTHVHGEIYRRRGWLTSEGKEIKNKNEILALLEALFLPKRLSIIHCPGHQKGDSPQAKGNRLADDTAKKAATETHSSLTVLPAGKRTADGSEFEKRTADGSEFESPKKKAKVE

SEQ ID NO: 1225 - protein, 2095 aa, synthetic construct
MPAAKRVKLDGGDKKYSIGLDIGTNSVGWAVITDEYKVPSKKFKVLGNTDRHSIKKNLIGALLFDSGETAEATRLKRTARRRYTRRKNRICYLQEIFSNEMAKVDDSFFHRLEESFLVEEDKKHERHPIFGNIVDEVAYHEKYPTIYHLRKKLVDSTDKADLRLIYLALAHMIKFRGHFLIEGDLNPDNSDVDKLFIQLVQTYNQLFEENPINASGVDAKAILSARLSKSRRLENLIAQLPGEKKNGLFGNLIALSLGLTPNFKSNFDLAEDAKLQLSKDTYDDDLDNLLAQIGDQYADLFLAAKNLSDAILLSDILRVNTEITKAPLSASMIKRYDEHHQDLTLLKALVRQQLPEKYKEIFFDQSKNGYAGYIDGGASQEEFYKFIKPILEKMDGTEELLVKLNREDLLRKQRTFDNGSIPHQIHLGELHAILRRQEDFYPFLKDNREKIEKILTFRIPYYVGPLARGNSRFAWMTRKSEETITPWNFEEVVDKGASAQSFIERMTNFDKNLPNEKVLPKHSLLYEYFTVYNELTKVKYVTEGMRKPAFLSGEQKKAIVDLLFKTNRKVTVKQLKEDYFKKIECFDSVEISGVEDRFNASLGTYHDLLKIIKDKDFLDNEENEDILEDIVLTLTLFEDREMIEERLKTYAHLFDDKVMKQLKRRRYTGWGRLSRKLINGIRDKQSGKTILDFLKSDGFANRNFMQLIHDDSLTFKEDIQKAQVSGQGDSLHEHIANLAGSPAIKKGILQTVKVVDELVKVMGRHKPENIVIEMARENQTTQKGQKNSRERMKRIEEGIKELGSQILKEHPVENTQLQNEKLYLYYLQNGRDMYVDQELDINRLSDYDVDHIVPQSFLKDDSIDNKVLTRSDKARGKSDNVPSEEVVKKMKNYWRQLLNAKLITQRKFDNLTKAERGGLSELDKAGFIKRQLVETRQITKHVAQILDSRMNTKYDENDKLIREVKVITLKSKLVSDFRKDFQFYKVREINNYHHAHDAYLNAVVGTALIKKYPKLESEFVYGDYKVYDVRKMIAKSEQEIGKATAKYFFYSNIMNFFKTEITLANGEIRKRPLIETNGETGEIVWDKGRDFATVRKVLSMPQVNIVKKTEVQTGGFSKESILPKRNSDKLIARKKDWDPKKYGGFDSPTVAYSVLVVAKVEKGKSKKLKSVKELLGITIMERSSFEKNPIDFLEAKGYKEVKKDLIIKLPKYSLFELENGRKRMLASAGELQKGNELALPSKYVNFLYLASHYEKLKGSPEDNEQKQLFVEQHKHYLDEIIEQISEFSKRVILADANLDKVLSAYNKHRDKPIREQAENIIHLFTLTNLGAPAAFKYFDTTIDRKRYTSTKEVLDATLIHQSITGLYETRIDLSQLGGDGGGSSPAPEAAAKGGTLQLEEEYRLFEPESTQKQEMDIWLKNFPQAWAETGGMGTAHCQAPVLIQLKATATPISIRQYPMPHEAYQGIKPHIRRMLDQGILKPCQSPWNTPLLPVKKPGTEDYRPVQDLREVNKRVEDIHPTVPNPYNLLSTLPPSHPWYTVLDLKDAFFCLRLHSESQLLFAFEWRDPEIGLSGQLTWTRLPQGFKNSPTLFNEALHSDLADFRVRYPALVLLQYVDDLLLAAATRTECLEGTKALLETLGNKGYRASAKKAQICLQEVTYLGYSLKDGQRWLTKARKEAILSIPVPKNSRQVREFLGKAGYCRLFIPGFAELAAPLYPLTRPGTLFQWGTEQQLAFEDIKKALLSSPALGLPDITKPFELFIDENSGFAKGVLVQKLGPWKRPVAYLSKKLDTVASGWPPCLRMVAAIAILVKDAGKLTLGQPLTILTSHPVEALVRQPPNKWLSNARMTHYQAMLLDAERVHFGPTVSLNPATLLPLPSGGNHHDCLQILAETHGTRPDLTDQPLPDADLTWYTDGSSFIRNGEREAGAAVTTESEVIWAAPLPPGTSAQRAELIALTQALKMAEGKKLTVYTDSRYAFATTHVHGEIYRRRGWLTSEGKEIKNKNEILALLEALFLPKRLSIIHCPGHQKGDSPQAKGNRLADDTAKKAATETHSSLTVLPAGKRTADGSEFEKRTADGSEFESPKKKAKVE

SEQ ID NO: 1226 - protein, 2087 aa, synthetic construct
MPAAKRVKLDGGDKKYSIGLDIGTNSVGWAVITDEYKVPSKKFKVLGNTDRHSIKKNLIGALLFDSGETAEATRLKRTARRRYTRRKNRICYLQEIFSNEMAKVDDSFFHRLEESFLVEEDKKHERHPIFGNIVDEVAYHEKYPTIYHLRKKLVDSTDKADLRLIYLALAHMIKFRGHFLIEGDLNPDNSDVDKLFIQLVQTYNQLFEENPINASGVDAKAILSARLSKSRRLENLIAQLPGEKKNGLFGNLIALSLGLTPNFKSNFDLAEDAKLQLSKDTYDDDLDNLLAQIGDQYADLFLAAKNLSDAILLSDILRVNTEITKAPLSASMIKRYDEHHQDLTLLKALVRQQLPEKYKEIFFDQSKNGYAGYIDGGASQEEFYKFIKPILEKMDGTEELLVKLNREDLLRKQRTFDNGSIPHQIHLGELHAILRRQEDFYPFLKDNREKIEKILTFRIPYYVGPLARGNSRFAWMTRKSEETITPWNFEEVVDKGASAQSFIERMTNFDKNLPNEKVLPKHSLLYEYFTVYNELTKVKYVTEGMRKPAFLSGEQKKAIVDLLFKTNRKVTVKQLKEDYFKKIECFDSVEISGVEDRFNASLGTYHDLLKIIKDKDFLDNEENEDILEDIVLTLTLFEDREMIEERLKTYAHLFDDKVMKQLKRRRYTGWGRLSRKLINGIRDKQSGKTILDFLKSDGFANRNFMQLIHDDSLTFKEDIQKAQVSGQGDSLHEHIANLAGSPAIKKGILQTVKVVDELVKVMGRHKPENIVIEMARENQTTQKGQKNSRERMKRIEEGIKELGSQILKEHPVENTQLQNEKLYLYYLQNGRDMYVDQELDINRLSDYDVDHIVPQSFLKDDSIDNKVLTRSDKARGKSDNVPSEEVVKKMKNYWRQLLNAKLITQRKFDNLTKAERGGLSELDKAGFIKRQLVETRQITKHVAQILDSRMNTKYDENDKLIREVKVITLKSKLVSDFRKDFQFYKVREINNYHHAHDAYLNAVVGTALIKKYPKLESEFVYGDYKVYDVRKMIAKSEQEIGKATAKYFFYSNIMNFFKTEITLANGEIRKRPLIETNGETGEIVWDKGRDFATVRKVLSMPQVNIVKKTEVQTGGFSKESILPKRNSDKLIARKKDWDPKKYGGFDSPTVAYSVLVVAKVEKGKSKKLKSVKELLGITIMERSSFEKNPIDFLEAKGYKEVKKDLIIKLPKYSLFELENGRKRMLASAGELQKGNELALPSKYVNFLYLASHYEKLKGSPEDNEQKQLFVEQHKHYLDEIIEQISEFSKRVILADANLDKVLSAYNKHRDKPIREQAENIIHLFTLTNLGAPAAFKYFDTTIDRKRYTSTKEVLDATLIHQSITGLYETRIDLSQLGGDGGGSSGGTLQLEEEYRLFEPESTQKQEMDIWLKNFPQAWAETGGMGTAHCQAPVLIQLKATATPISIRQYPMPHEAYQGIKPHIRRMLDQGILKPCQSPWNTPLLPVKKPGTEDYRPVQDLREVNKRVEDIHPTVPNPYNLLSTLPPSHPWYTVLDLKDAFFCLRLHSESQLLFAFEWRDPEIGLSGQLTWTRLPQGFKNSPTLFNEALHSDLADFRVRYPALVLLQYVDDLLLAAATRTECLEGTKALLETLGNKGYRASAKKAQICLQEVTYLGYSLKDGQRWLTKARKEAILSIPVPKNSRQVREFLGKAGYCRLFIPGFAELAAPLYPLTRPGTLFQWGTEQQLAFEDIKKALLSSPALGLPDITKPFELFIDENSGFAKGVLVQKLGPWKRPVAYLSKKLDTVASGWPPCLRMVAAIAILVKDAGKLTLGQPLTILTSHPVEALVRQPPNKWLSNARMTHYQAMLLDAERVHFGPTVSLNPATLLPLPSGGNHHDCLQILAETHGTRPDLTDQPLPDADLTWYTDGSSFIRNGEREAGAAVTTESEVIWAAPLPPGTSAQRAELIALTQALKMAEGKKLTVYTDSRYAFATTHVHGEIYRRRGWLTSEGKEIKNKNEILALLEALFLPKRLSIIHCPGHQKGDSPQAKGNRLADDTAKKAATETHSSLTVLPAGKRTADGSEFEKRTADGSEFESPKKKAKVE

SEQ ID NO: 1227 - protein, 2095 aa, synthetic construct
MPAAKRVKLDGGDKKYSIGLDIGTNSVGWAVITDEYKVPSKKFKVLGNTDRHSIKKNLIGALLFDSGETAEATRLKRTARRRYTRRKNRICYLQEIFSNEMAKVDDSFFHRLEESFLVEEDKKHERHPIFGNIVDEVAYHEKYPTIYHLRKKLVDSTDKADLRLIYLALAHMIKFRGHFLIEGDLNPDNSDVDKLFIQLVQTYNQLFEENPINASGVDAKAILSARLSKSRRLENLIAQLPGEKKNGLFGNLIALSLGLTPNFKSNFDLAEDAKLQLSKDTYDDDLDNLLAQIGDQYADLFLAAKNLSDAILLSDILRVNTEITKAPLSASMIKRYDEHHQDLTLLKALVRQQLPEKYKEIFFDQSKNGYAGYIDGGASQEEFYKFIKPILEKMDGTEELLVKLNREDLLRKQRTFDNGSIPHQIHLGELHAILRRQEDFYPFLKDNREKIEKILTFRIPYYVGPLARGNSRFAWMTRKSEETITPWNFEEVVDKGASAQSFIERMTNFDKNLPNEKVLPKHSLLYEYFTVYNELTKVKYVTEGMRKPAFLSGEQKKAIVDLLFKTNRKVTVKQLKEDYFKKIECFDSVEISGVEDRFNASLGTYHDLLKIIKDKDFLDNEENEDILEDIVLTLTLFEDREMIEERLKTYAHLFDDKVMKQLKRRRYTGWGRLSRKLINGIRDKQSGKTILDFLKSDGFANRNFMQLIHDDSLTFKEDIQKAQVSGQGDSLHEHIANLAGSPAIKKGILQTVKVVDELVKVMGRHKPENIVIEMARENQTTQKGQKNSRERMKRIEEGIKELGSQILKEHPVENTQLQNEKLYLYYLQNGRDMYVDQELDINRLSDYDVDHIVPQSFLKDDSIDNKVLTRSDKARGKSDNVPSEEVVKKMKNYWRQLLNAKLITQRKFDNLTKAERGGLSELDKAGFIKRQLVETRQITKHVAQILDSRMNTKYDENDKLIREVKVITLKSKLVSDFRKDFQFYKVREINNYHHAHDAYLNAVVGTALIKKYPKLESEFVYGDYKVYDVRKMIAKSEQEIGKATAKYFFYSNIMNFFKTEITLANGEIRKRPLIETNGETGEIVWDKGRDFATVRKVLSMPQVNIVKKTEVQTGGFSKESILPKRNSDKLIARKKDWDPKKYGGFDSPTVAYSVLVVAKVEKGKSKKLKSVKELLGITIMERSSFEKNPIDFLEAKGYKEVKKDLIIKLPKYSLFELENGRKRMLASAGELQKGNELALPSKYVNFLYLASHYEKLKGSPEDNEQKQLFVEQHKHYLDEIIEQISEFSKRVILADANLDKVLSAYNKHRDKPIREQAENIIHLFTLTNLGAPAAFKYFDTTIDRKRYTSTKEVLDATLIHQSITGLYETRIDLSQLGGDGGGSSGGGEAAAKGGTLQLEEEYRLFEPESTQKQEMDIWLKNFPQAWAETGGMGTAHCQAPVLIQLKATATPISIRQYPMPHEAYQGIKPHIRRMLDQGILKPCQSPWNTPLLPVKKPGTEDYRPVQDLREVNKRVEDIHPTVPNPYNLLSTLPPSHPWYTVLDLKDAFFCLRLHSESQLLFAFEWRDPEIGLSGQLTWTRLPQGFKNSPTLFNEALHSDLADFRVRYPALVLLQYVDDLLLAAATRTECLEGTKALLETLGNKGYRASAKKAQICLQEVTYLGYSLKDGQRWLTKARKEAILSIPVPKNSRQVREFLGKAGYCRLFIPGFAELAAPLYPLTRPGTLFQWGTEQQLAFEDIKKALLSSPALGLPDITKPFELFIDENSGFAKGVLVQKLGPWKRPVAYLSKKLDTVASGWPPCLRMVAAIAILVKDAGKLTLGQPLTILTSHPVEALVRQPPNKWLSNARMTHYQAMLLDAERVHFGPTVSLNPATLLPLPSGGNHHDCLQILAETHGTRPDLTDQPLPDADLTWYTDGSSFIRNGEREAGAAVTTESEVIWAAPLPPGTSAQRAELIALTQALKMAEGKKLTVYTDSRYAFATTHVHGEIYRRRGWLTSEGKEIKNKNEILALLEALFLPKRLSIIHCPGHQKGDSPQAKGNRLADDTAKKAATETHSSLTVLPAGKRTADGSEFEKRTADGSEFESPKKKAKVE

SEQ ID NO: 1228 - protein, 2090 aa, synthetic construct
MPAAKRVKLDGGDKKYSIGLDIGTNSVGWAVITDEYKVPSKKFKVLGNTDRHSIKKNLIGALLFDSGETAEATRLKRTARRRYTRRKNRICYLQEIFSNEMAKVDDSFFHRLEESFLVEEDKKHERHPIFGNIVDEVAYHEKYPTIYHLRKKLVDSTDKADLRLIYLALAHMIKFRGHFLIEGDLNPDNSDVDKLFIQLVQTYNQLFEENPINASGVDAKAILSARLSKSRRLENLIAQLPGEKKNGLFGNLIALSLGLTPNFKSNFDLAEDAKLQLSKDTYDDDLDNLLAQIGDQYADLFLAAKNLSDAILLSDILRVNTEITKAPLSASMIKRYDEHHQDLTLLKALVRQQLPEKYKEIFFDQSKNGYAGYIDGGASQEEFYKFIKPILEKMDGTEELLVKLNREDLLRKQRTFDNGSIPHQIHLGELHAILRRQEDFYPFLKDNREKIEKILTFRIPYYVGPLARGNSRFAWMTRKSEETITPWNFEEVVDKGASAQSFIERMTNFDKNLPNEKVLPKHSLLYEYFTVYNELTKVKYVTEGMRKPAFLSGEQKKAIVDLLFKTNRKVTVKQLKEDYFKKIECFDSVEISGVEDRFNASLGTYHDLLKIIKDKDFLDNEENEDILEDIVLTLTLFEDREMIEERLKTYAHLFDDKVMKQLKRRRYTGWGRLSRKLINGIRDKQSGKTILDFLKSDGFANRNFMQLIHDDSLTFKEDIQKAQVSGQGDSLHEHIANLAGSPAIKKGILQTVKVVDELVKVMGRHKPENIVIEMARENQTTQKGQKNSRERMKRIEEGIKELGSQILKEHPVENTQLQNEKLYLYYLQNGRDMYVDQELDINRLSDYDVDHIVPQSFLKDDSIDNKVLTRSDKARGKSDNVPSEEVVKKMKNYWRQLLNAKLITQRKFDNLTKAERGGLSELDKAGFIKRQLVETRQITKHVAQILDSRMNTKYDENDKLIREVKVITLKSKLVSDFRKDFQFYKVREINNYHHAHDAYLNAVVGTALIKKYPKLESEFVYGDYKVYDVRKMIAKSEQEIGKATAKYFFYSNIMNFFKTEITLANGEIRKRPLIETNGETGEIVWDKGRDFATVRKVLSMPQVNIVKKTEVQTGGFSKESILPKRNSDKLIARKKDWDPKKYGGFDSPTVAYSVLVVAKVEKGKSKKLKSVKELLGITIMERSSFEKNPIDFLEAKGYKEVKKDLIIKLPKYSLFELENGRKRMLASAGELQKGNELALPSKYVNFLYLASHYEKLKGSPEDNEQKQLFVEQHKHYLDEIIEQISEFSKRVILADANLDKVLSAYNKHRDKPIREQAENIIHLFTLTNLGAPAAFKYFDTTIDRKRYTSTKEVLDATLIHQSITGLYETRIDLSQLGGDGGPAPGGSGGTLQLEEEYRLFEPESTQKQEMDIWLKNFPQAWAETGGMGTAHCQAPVLIQLKATATPISIRQYPMPHEAYQGIKPHIRRMLDQGILKPCQSPWNTPLLPVKKPGTEDYRPVQDLREVNKRVEDIHPTVPNPYNLLSTLPPSHPWYTVLDLKDAFFCLRLHSESQLLFAFEWRDPEIGLSGQLTWTRLPQGFKNSPTLFNEALHSDLADFRVRYPALVLLQYVDDLLLAAATRTECLEGTKALLETLGNKGYRASAKKAQICLQEVTYLGYSLKDGQRWLTKARKEAILSIPVPKNSRQVREFLGKAGYCRLFIPGFAELAAPLYPLTRPGTLFQWGTEQQLAFEDIKKALLSSPALGLPDITKPFELFIDENSGFAKGVLVQKLGPWKRPVAYLSKKLDTVASGWPPCLRMVAAIAILVKDAGKLTLGQPLTILTSHPVEALVRQPPNKWLSNARMTHYQAMLLDAERVHFGPTVSLNPATLLPLPSGGNHHDCLQILAETHGTRPDLTDQPLPDADLTWYTDGSSFIRNGEREAGAAVTTESEVIWAAPLPPGTSAQRAELIALTQALKMAEGKKLTVYTDSRYAFATTHVHGEIYRRRGWLTSEGKEIKNKNEILALLEALFLPKRLSIIHCPGHQKGDSPQAKGNRLADDTAKKAATETHSSLTVLPAGKRTADGSEFEKRTADGSEFESPKKKAKVE

SEQ ID NO: 1229 - protein, 2090 aa, synthetic construct
MPAAKRVKLDGGDKKYSIGLDIGTNSVGWAVITDEYKVPSKKFKVLGNTDRHSIKKNLIGALLFDSGETAEATRLKRTARRRYTRRKNRICYLQEIFSNEMAKVDDSFFHRLEESFLVEEDKKHERHPIFGNIVDEVAYHEKYPTIYHLRKKLVDSTDKADLRLIYLALAHMIKFRGHFLIEGDLNPDNSDVDKLFIQLVQTYNQLFEENPINASGVDAKAILSARLSKSRRLENLIAQLPGEKKNGLFGNLIALSLGLTPNFKSNFDLAEDAKLQLSKDTYDDDLDNLLAQIGDQYADLFLAAKNLSDAILLSDILRVNTEITKAPLSASMIKRYDEHHQDLTLLKALVRQQLPEKYKEIFFDQSKNGYAGYIDGGASQEEFYKFIKPILEKMDGTEELLVKLNREDLLRKQRTFDNGSIPHQIHLGELHAILRRQEDFYPFLKDNREKIEKILTFRIPYYVGPLARGNSRFAWMTRKSEETITPWNFEEVVDKGASAQSFIERMTNFDKNLPNEKVLPKHSLLYEYFTVYNELTKVKYVTEGMRKPAFLSGEQKKAIVDLLFKTNRKVTVKQLKEDYFKKIECFDSVEISGVEDRFNASLGTYHDLLKIIKDKDFLDNEENEDILEDIVLTLTLFEDREMIEERLKTYAHLFDDKVMKQLKRRRYTGWGRLSRKLINGIRDKQSGKTILDFLKSDGFANRNFMQLIHDDSLTFKEDIQKAQVSGQGDSLHEHIANLAGSPAIKKGILQTVKVVDELVKVMGRHKPENIVIEMARENQTTQKGQKNSRERMKRIEEGIKELGSQILKEHPVENTQLQNEKLYLYYLQNGRDMYVDQELDINRLSDYDVDHIVPQSFLKDDSIDNKVLTRSDKARGKSDNVPSEEVVKKMKNYWRQLLNAKLITQRKFDNLTKAERGGLSELDKAGFIKRQLVETRQITKHVAQILDSRMNTKYDENDKLIREVKVITLKSKLVSDFRKDFQFYKVREINNYHHAHDAYLNAVVGTALIKKYPKLESEFVYGDYKVYDVRKMIAKSEQEIGKATAKYFFYSNIMNFFKTEITLANGEIRKRPLIETNGETGEIVWDKGRDFATVRKVLSMPQVNIVKKTEVQTGGFSKESILPKRNSDKLIARKKDWDPKKYGGFDSPTVAYSVLVVAKVEKGKSKKLKSVKELLGITIMERSSFEKNPIDFLEAKGYKEVKKDLIIKLPKYSLFELENGRKRMLASAGELQKGNELALPSKYVNFLYLASHYEKLKGSPEDNEQKQLFVEQHKHYLDEIIEQISEFSKRVILADANLDKVLSAYNKHRDKPIREQAENIIHLFTLTNLGAPAAFKYFDTTIDRKRYTSTKEVLDATLIHQSITGLYETRIDLSQLGGDGGGGGPAPGGTLQLEEEYRLFEPESTQKQEMDIWLKNFPQAWAETGGMGTAHCQAPVLIQLKATATPISIRQYPMPHEAYQGIKPHIRRMLDQGILKPCQSPWNTPLLPVKKPGTEDYRPVQDLREVNKRVEDIHPTVPNPYNLLSTLPPSHPWYTVLDLKDAFFCLRLHSESQLLFAFEWRDPEIGLSGQLTWTRLPQGFKNSPTLFNEALHSDLADFRVRYPALVLLQYVDDLLLAAATRTECLEGTKALLETLGNKGYRASAKKAQICLQEVTYLGYSLKDGQRWLTKARKEAILSIPVPKNSRQVREFLGKAGYCRLFIPGFAELAAPLYPLTRPGTLFQWGTEQQLAFEDIKKALLSSPALGLPDITKPFELFIDENSGFAKGVLVQKLGPWKRPVAYLSKKLDTVASGWPPCLRMVAAIAILVKDAGKLTLGQPLTILTSHPVEALVRQPPNKWLSNARMTHYQAMLLDAERVHFGPTVSLNPATLLPLPSGGNHHDCLQILAETHGTRPDLTDQPLPDADLTWYTDGSSFIRNGEREAGAAVTTESEVIWAAPLPPGTSAQRAELIALTQALKMAEGKKLTVYTDSRYAFATTHVHGEIYRRRGWLTSEGKEIKNKNEILALLEALFLPKRLSIIHCPGHQKGDSPQAKGNRLADDTAKKAATETHSSLTVLPAGKRTADGSEFEKRTADGSEFESPKKKAKVE

SEQ ID NO: 1230 - protein, 2092 aa, synthetic construct
MPAAKRVKLDGGDKKYSIGLDIGTNSVGWAVITDEYKVPSKKFKVLGNTDRHSIKKNLIGALLFDSGETAEATRLKRTARRRYTRRKNRICYLQEIFSNEMAKVDDSFFHRLEESFLVEEDKKHERHPIFGNIVDEVAYHEKYPTIYHLRKKLVDSTDKADLRLIYLALAHMIKFRGHFLIEGDLNPDNSDVDKLFIQLVQTYNQLFEENPINASGVDAKAILSARLSKSRRLENLIAQLPGEKKNGLFGNLIALSLGLTPNFKSNFDLAEDAKLQLSKDTYDDDLDNLLAQIGDQYADLFLAAKNLSDAILLSDILRVNTEITKAPLSASMIKRYDEHHQDLTLLKALVRQQLPEKYKEIFFDQSKNGYAGYIDGGASQEEFYKFIKPILEKMDGTEELLVKLNREDLLRKQRTFDNGSIPHQIHLGELHAILRRQEDFYPFLKDNREKIEKILTFRIPYYVGPLARGNSRFAWMTRKSEETITPWNFEEVVDKGASAQSFIERMTNFDKNLPNEKVLPKHSLLYEYFTVYNELTKVKYVTEGMRKPAFLSGEQKKAIVDLLFKTNRKVTVKQLKEDYFKKIECFDSVEISGVEDRFNASLGTYHDLLKIIKDKDFLDNEENEDILEDIVLTLTLFEDREMIEERLKTYAHLFDDKVMKQLKRRRYTGWGRLSRKLINGIRDKQSGKTILDFLKSDGFANRNFMQLIHDDSLTFKEDIQKAQVSGQGDSLHEHIANLAGSPAIKKGILQTVKVVDELVKVMGRHKPENIVIEMARENQTTQKGQKNSRERMKRIEEGIKELGSQILKEHPVENTQLQNEKLYLYYLQNGRDMYVDQELDINRLSDYDVDHIVPQSFLKDDSIDNKVLTRSDKARGKSDNVPSEEVVKKMKNYWRQLLNAKLITQRKFDNLTKAERGGLSELDKAGFIKRQLVETRQITKHVAQILDSRMNTKYDENDKLIREVKVITLKSKLVSDFRKDFQFYKVREINNYHHAHDAYLNAVVGTALIKKYPKLESEFVYGDYKVYDVRKMIAKSEQEIGKATAKYFFYSNIMNFFKTEITLANGEIRKRPLIETNGETGEIVWDKGRDFATVRKVLSMPQVNIVKKTEVQTGGFSKESILPKRNSDKLIARKKDWDPKKYGGFDSPTVAYSVLVVAKVEKGKSKKLKSVKELLGITIMERSSFEKNPIDFLEAKGYKEVKKDLIIKLPKYSLFELENGRKRMLASAGELQKGNELALPSKYVNFLYLASHYEKLKGSPEDNEQKQLFVEQHKHYLDEIIEQISEFSKRVILADANLDKVLSAYNKHRDKPIREQAENIIHLFTLTNLGAPAAFKYFDTTIDRKRYTSTKEVLDATLIHQSITGLYETRIDLSQLGGDGGPAPEAAAKGGTLQLEEEYRLFEPESTQKQEMDIWLKNFPQAWAETGGMGTAHCQAPVLIQLKATATPISIRQYPMPHEAYQGIKPHIRRMLDQGILKPCQSPWNTPLLPVKKPGTEDYRPVQDLREVNKRVEDIHPTVPNPYNLLSTLPPSHPWYTVLDLKDAFFCLRLHSESQLLFAFEWRDPEIGLSGQLTWTRLPQGFKNSPTLFNEALHSDLADFRVRYPALVLLQYVDDLLLAAATRTECLEGTKALLETLGNKGYRASAKKAQICLQEVTYLGYSLKDGQRWLTKARKEAILSIPVPKNSRQVREFLGKAGYCRLFIPGFAELAAPLYPLTRPGTLFQWGTEQQLAFEDIKKALLSSPALGLPDITKPFELFIDENSGFAKGVLVQKLGPWKRPVAYLSKKLDTVASGWPPCLRMVAAIAILVKDAGKLTLGQPLTILTSHPVEALVRQPPNKWLSNARMTHYQAMLLDAERVHFGPTVSLNPATLLPLPSGGNHHDCLQILAETHGTRPDLTDQPLPDADLTWYTDGSSFIRNGEREAGAAVTTESEVIWAAPLPPGTSAQRAELIALTQALKMAEGKKLTVYTDSRYAFATTHVHGEIYRRRGWLTSEGKEIKNKNEILALLEALFLPKRLSIIHCPGHQKGDSPQAKGNRLADDTAKKAATETHSSLTVLPAGKRTADGSEFEKRTADGSEFESPKKKAKVE

SEQ ID NO: 1231 - protein, 2099 aa, synthetic construct
MPAAKRVKLDGGDKKYSIGLDIGTNSVGWAVITDEYKVPSKKFKVLGNTDRHSIKKNLIGALLFDSGETAEATRLKRTARRRYTRRKNRICYLQEIFSNEMAKVDDSFFHRLEESFLVEEDKKHERHPIFGNIVDEVAYHEKYPTIYHLRKKLVDSTDKADLRLIYLALAHMIKFRGHFLIEGDLNPDNSDVDKLFIQLVQTYNQLFEENPINASGVDAKAILSARLSKSRRLENLIAQLPGEKKNGLFGNLIALSLGLTPNFKSNFDLAEDAKLQLSKDTYDDDLDNLLAQIGDQYADLFLAAKNLSDAILLSDILRVNTEITKAPLSASMIKRYDEHHQDLTLLKALVRQQLPEKYKEIFFDQSKNGYAGYIDGGASQEEFYKFIKPILEKMDGTEELLVKLNREDLLRKQRTFDNGSIPHQIHLGELHAILRRQEDFYPFLKDNREKIEKILTFRIPYYVGPLARGNSRFAWMTRKSEETITPWNFEEVVDKGASAQSFIERMTNFDKNLPNEKVLPKHSLLYEYFTVYNELTKVKYVTEGMRKPAFLSGEQKKAIVDLLFKTNRKVTVKQLKEDYFKKIECFDSVEISGVEDRFNASLGTYHDLLKIIKDKDFLDNEENEDILEDIVLTLTLFEDREMIEERLKTYAHLFDDKVMKQLKRRRYTGWGRLSRKLINGIRDKQSGKTILDFLKSDGFANRNFMQLIHDDSLTFKEDIQKAQVSGQGDSLHEHIANLAGSPAIKKGILQTVKVVDELVKVMGRHKPENIVIEMARENQTTQKGQKNSRERMKRIEEGIKELGSQILKEHPVENTQLQNEKLYLYYLQNGRDMYVDQELDINRLSDYDVDHIVPQSFLKDDSIDNKVLTRSDKARGKSDNVPSEEVVKKMKNYWRQLLNAKLITQRKFDNLTKAERGGLSELDKAGFIKRQLVETRQITKHVAQILDSRMNTKYDENDKLIREVKVITLKSKLVSDFRKDFQFYKVREINNYHHAHDAYLNAVVGTALIKKYPKLESEFVYGDYKVYDVRKMIAKSEQEIGKATAKYFFYSNIMNFFKTEITLANGEIRKRPLIETNGETGEIVWDKGRDFATVRKVLSMPQVNIVKKTEVQTGGFSKESILPKRNSDKLIARKKDWDPKKYGGFDSPTVAYSVLVVAKVEKGKSKKLKSVKELLGITIMERSSFEKNPIDFLEAKGYKEVKKDLIIKLPKYSLFELENGRKRMLASAGELQKGNELALPSKYVNFLYLASHYEKLKGSPEDNEQKQLFVEQHKHYLDEIIEQISEFSKRVILADANLDKVLSAYNKHRDKPIREQAENIIHLFTLTNLGAPAAFKYFDTTIDRKRYTSTKEVLDATLIHQSITGLYETRIDLSQLGGDGGGGGGSGGGGSGGGGSGGTLQLEEEYRLFEPESTQKQEMDIWLKNFPQAWAETGGMGTAHCQAPVLIQLKATATPISIRQYPMPHEAYQGIKPHIRRMLDQGILKPCQSPWNTPLLPVKKPGTEDYRPVQDLREVNKRVEDIHPTVPNPYNLLSTLPPSHPWYTVLDLKDAFFCLRLHSESQLLFAFEWRDPEIGLSGQLTWTRLPQGFKNSPTLFNEALHSDLADFRVRYPALVLLQYVDDLLLAAATRTECLEGTKALLETLGNKGYRASAKKAQICLQEVTYLGYSLKDGQRWLTKARKEAILSIPVPKNSRQVREFLGKAGYCRLFIPGFAELAAPLYPLTRPGTLFQWGTEQQLAFEDIKKALLSSPALGLPDITKPFELFIDENSGFAKGVLVQKLGPWKRPVAYLSKKLDTVASGWPPCLRMVAAIAILVKDAGKLTLGQPLTILTSHPVEALVRQPPNKWLSNARMTHYQAMLLDAERVHFGPTVSLNPATLLPLPSGGNHHDCLQILAETHGTRPDLTDQPLPDADLTWYTDGSSFIRNGEREAGAAVTTESEVIWAAPLPPGTSAQRAELIALTQALKMAEGKKLTVYTDSRYAFATTHVHGEIYRRRGWLTSEGKEIKNKNEILALLEALFLPKRLSIIHCPGHQKGDSPQAKGNRLADDTAKKAATETHSSLTVLPAGKRTADGSEFEKRTADGSEFESPKKKAKVE

SEQ ID NO: 1232 - protein, 2095 aa, synthetic construct
MPAAKRVKLDGGDKKYSIGLDIGTNSVGWAVITDEYKVPSKKFKVLGNTDRHSIKKNLIGALLFDSGETAEATRLKRTARRRYTRRKNRICYLQEIFSNEMAKVDDSFFHRLEESFLVEEDKKHERHPIFGNIVDEVAYHEKYPTIYHLRKKLVDSTDKADLRLIYLALAHMIKFRGHFLIEGDLNPDNSDVDKLFIQLVQTYNQLFEENPINASGVDAKAILSARLSKSRRLENLIAQLPGEKKNGLFGNLIALSLGLTPNFKSNFDLAEDAKLQLSKDTYDDDLDNLLAQIGDQYADLFLAAKNLSDAILLSDILRVNTEITKAPLSASMIKRYDEHHQDLTLLKALVRQQLPEKYKEIFFDQSKNGYAGYIDGGASQEEFYKFIKPILEKMDGTEELLVKLNREDLLRKQRTFDNGSIPHQIHLGELHAILRRQEDFYPFLKDNREKIEKILTFRIPYYVGPLARGNSRFAWMTRKSEETITPWNFEEVVDKGASAQSFIERMTNFDKNLPNEKVLPKHSLLYEYFTVYNELTKVKYVTEGMRKPAFLSGEQKKAIVDLLFKTNRKVTVKQLKEDYFKKIECFDSVEISGVEDRFNASLGTYHDLLKIIKDKDFLDNEENEDILEDIVLTLTLFEDREMIEERLKTYAHLFDDKVMKQLKRRRYTGWGRLSRKLINGIRDKQSGKTILDFLKSDGFANRNFMQLIHDDSLTFKEDIQKAQVSGQGDSLHEHIANLAGSPAIKKGILQTVKVVDELVKVMGRHKPENIVIEMARENQTTQKGQKNSRERMKRIEEGIKELGSQILKEHPVENTQLQNEKLYLYYLQNGRDMYVDQELDINRLSDYDVDHIVPQSFLKDDSIDNKVLTRSDKARGKSDNVPSEEVVKKMKNYWRQLLNAKLITQRKFDNLTKAERGGLSELDKAGFIKRQLVETRQITKHVAQILDSRMNTKYDENDKLIREVKVITLKSKLVSDFRKDFQFYKVREINNYHHAHDAYLNAVVGTALIKKYPKLESEFVYGDYKVYDVRKMIAKSEQEIGKATAKYFFYSNIMNFFKTEITLANGEIRKRPLIETNGETGEIVWDKGRDFATVRKVLSMPQVNIVKKTEVQTGGFSKESILPKRNSDKLIARKKDWDPKKYGGFDSPTVAYSVLVVAKVEKGKSKKLKSVKELLGITIMERSSFEKNPIDFLEAKGYKEVKKDLIIKLPKYSLFELENGRKRMLASAGELQKGNELALPSKYVNFLYLASHYEKLKGSPEDNEQKQLFVEQHKHYLDEIIEQISEFSKRVILADANLDKVLSAYNKHRDKPIREQAENIIHLFTLTNLGAPAAFKYFDTTIDRKRYTSTKEVLDATLIHQSITGLYETRIDLSQLGGDGGPAPAPAPAPAPGGTLQLEEEYRLFEPESTQKQEMDIWLKNFPQAWAETGGMGTAHCQAPVLIQLKATATPISIRQYPMPHEAYQGIKPHIRRMLDQGILKPCQSPWNTPLLPVKKPGTEDYRPVQDLREVNKRVEDIHPTVPNPYNLLSTLPPSHPWYTVLDLKDAFFCLRLHSESQLLFAFEWRDPEIGLSGQLTWTRLPQGFKNSPTLFNEALHSDLADFRVRYPALVLLQYVDDLLLAAATRTECLEGTKALLETLGNKGYRASAKKAQICLQEVTYLGYSLKDGQRWLTKARKEAILSIPVPKNSRQVREFLGKAGYCRLFIPGFAELAAPLYPLTRPGTLFQWGTEQQLAFEDIKKALLSSPALGLPDITKPFELFIDENSGFAKGVLVQKLGPWKRPVAYLSKKLDTVASGWPPCLRMVAAIAILVKDAGKLTLGQPLTILTSHPVEALVRQPPNKWLSNARMTHYQAMLLDAERVHFGPTVSLNPATLLPLPSGGNHHDCLQILAETHGTRPDLTDQPLPDADLTWYTDGSSFIRNGEREAGAAVTTESEVIWAAPLPPGTSAQRAELIALTQALKMAEGKKLTVYTDSRYAFATTHVHGEIYRRRGWLTSEGKEIKNKNEILALLEALFLPKRLSIIHCPGHQKGDSPQAKGNRLADDTAKKAATETHSSLTVLPAGKRTADGSEFEKRTADGSEFESPKKKAKVE

SEQ ID NO: 1233 - protein, 2094 aa, synthetic construct
MPAAKRVKLDGGDKKYSIGLDIGTNSVGWAVITDEYKVPSKKFKVLGNTDRHSIKKNLIGALLFDSGETAEATRLKRTARRRYTRRKNRICYLQEIFSNEMAKVDDSFFHRLEESFLVEEDKKHERHPIFGNIVDEVAYHEKYPTIYHLRKKLVDSTDKADLRLIYLALAHMIKFRGHFLIEGDLNPDNSDVDKLFIQLVQTYNQLFEENPINASGVDAKAILSARLSKSRRLENLIAQLPGEKKNGLFGNLIALSLGLTPNFKSNFDLAEDAKLQLSKDTYDDDLDNLLAQIGDQYADLFLAAKNLSDAILLSDILRVNTEITKAPLSASMIKRYDEHHQDLTLLKALVRQQLPEKYKEIFFDQSKNGYAGYIDGGASQEEFYKFIKPILEKMDGTEELLVKLNREDLLRKQRTFDNGSIPHQIHLGELHAILRRQEDFYPFLKDNREKIEKILTFRIPYYVGPLARGNSRFAWMTRKSEETITPWNFEEVVDKGASAQSFIERMTNFDKNLPNEKVLPKHSLLYEYFTVYNELTKVKYVTEGMRKPAFLSGEQKKAIVDLLFKTNRKVTVKQLKEDYFKKIECFDSVEISGVEDRFNASLGTYHDLLKIIKDKDFLDNEENEDILEDIVLTLTLFEDREMIEERLKTYAHLFDDKVMKQLKRRRYTGWGRLSRKLINGIRDKQSGKTILDFLKSDGFANRNFMQLIHDDSLTFKEDIQKAQVSGQGDSLHEHIANLAGSPAIKKGILQTVKVVDELVKVMGRHKPENIVIEMARENQTTQKGQKNSRERMKRIEEGIKELGSQILKEHPVENTQLQNEKLYLYYLQNGRDMYVDQELDINRLSDYDVDHIVPQSFLKDDSIDNKVLTRSDKARGKSDNVPSEEVVKKMKNYWRQLLNAKLITQRKFDNLTKAERGGLSELDKAGFIKRQLVETRQITKHVAQILDSRMNTKYDENDKLIREVKVITLKSKLVSDFRKDFQFYKVREINNYHHAHDAYLNAVVGTALIKKYPKLESEFVYGDYKVYDVRKMIAKSEQEIGKATAKYFFYSNIMNFFKTEITLANGEIRKRPLIETNGETGEIVWDKGRDFATVRKVLSMPQVNIVKKTEVQTGGFSKESILPKRNSDKLIARKKDWDPKKYGGFDSPTVAYSVLVVAKVEKGKSKKLKSVKELLGITIMERSSFEKNPIDFLEAKGYKEVKKDLIIKLPKYSLFELENGRKRMLASAGELQKGNELALPSKYVNFLYLASHYEKLKGSPEDNEQKQLFVEQHKHYLDEIIEQISEFSKRVILADANLDKVLSAYNKHRDKPIREQAENIIHLFTLTNLGAPAAFKYFDTTIDRKRYTSTKEVLDATLIHQSITGLYETRIDLSQLGGDGGGGGGSGGGGSGGTLQLEEEYRLFEPESTQKQEMDIWLKNFPQAWAETGGMGTAHCQAPVLIQLKATATPISIRQYPMPHEAYQGIKPHIRRMLDQGILKPCQSPWNTPLLPVKKPGTEDYRPVQDLREVNKRVEDIHPTVPNPYNLLSTLPPSHPWYTVLDLKDAFFCLRLHSESQLLFAFEWRDPEIGLSGQLTWTRLPQGFKNSPTLFNEALHSDLADFRVRYPALVLLQYVDDLLLAAATRTECLEGTKALLETLGNKGYRASAKKAQICLQEVTYLGYSLKDGQRWLTKARKEAILSIPVPKNSRQVREFLGKAGYCRLFIPGFAELAAPLYPLTRPGTLFQWGTEQQLAFEDIKKALLSSPALGLPDITKPFELFIDENSGFAKGVLVQKLGPWKRPVAYLSKKLDTVASGWPPCLRMVAAIAILVKDAGKLTLGQPLTILTSHPVEALVRQPPNKWLSNARMTHYQAMLLDAERVHFGPTVSLNPATLLPLPSGGNHHDCLQILAETHGTRPDLTDQPLPDADLTWYTDGSSFIRNGEREAGAAVTTESEVIWAAPLPPGTSAQRAELIALTQALKMAEGKKLTVYTDSRYAFATTHVHGEIYRRRGWLTSEGKEIKNKNEILALLEALFLPKRLSIIHCPGHQKGDSPQAKGNRLADDTAKKAATETHSSLTVLPAGKRTADGSEFEKRTADGSEFESPKKKAKVE

SEQ ID NO: 1234 - protein, 2095 aa, synthetic construct
MPAAKRVKLDGGDKKYSIGLDIGTNSVGWAVITDEYKVPSKKFKVLGNTDRHSIKKNLIGALLFDSGETAEATRLKRTARRRYTRRKNRICYLQEIFSNEMAKVDDSFFHRLEESFLVEEDKKHERHPIFGNIVDEVAYHEKYPTIYHLRKKLVDSTDKADLRLIYLALAHMIKFRGHFLIEGDLNPDNSDVDKLFIQLVQTYNQLFEENPINASGVDAKAILSARLSKSRRLENLIAQLPGEKKNGLFGNLIALSLGLTPNFKSNFDLAEDAKLQLSKDTYDDDLDNLLAQIGDQYADLFLAAKNLSDAILLSDILRVNTEITKAPLSASMIKRYDEHHQDLTLLKALVRQQLPEKYKEIFFDQSKNGYAGYIDGGASQEEFYKFIKPILEKMDGTEELLVKLNREDLLRKQRTFDNGSIPHQIHLGELHAILRRQEDFYPFLKDNREKIEKILTFRIPYYVGPLARGNSRFAWMTRKSEETITPWNFEEVVDKGASAQSFIERMTNFDKNLPNEKVLPKHSLLYEYFTVYNELTKVKYVTEGMRKPAFLSGEQKKAIVDLLFKTNRKVTVKQLKEDYFKKIECFDSVEISGVEDRFNASLGTYHDLLKIIKDKDFLDNEENEDILEDIVLTLTLFEDREMIEERLKTYAHLFDDKVMKQLKRRRYTGWGRLSRKLINGIRDKQSGKTILDFLKSDGFANRNFMQLIHDDSLTFKEDIQKAQVSGQGDSLHEHIANLAGSPAIKKGILQTVKVVDELVKVMGRHKPENIVIEMARENQTTQKGQKNSRERMKRIEEGIKELGSQILKEHPVENTQLQNEKLYLYYLQNGRDMYVDQELDINRLSDYDVDHIVPQSFLKDDSIDNKVLTRSDKARGKSDNVPSEEVVKKMKNYWRQLLNAKLITQRKFDNLTKAERGGLSELDKAGFIKRQLVETRQITKHVAQILDSRMNTKYDENDKLIREVKVITLKSKLVSDFRKDFQFYKVREINNYHHAHDAYLNAVVGTALIKKYPKLESEFVYGDYKVYDVRKMIAKSEQEIGKATAKYFFYSNIMNFFKTEITLANGEIRKRPLIETNGETGEIVWDKGRDFATVRKVLSMPQVNIVKKTEVQTGGFSKESILPKRNSDKLIARKKDWDPKKYGGFDSPTVAYSVLVVAKVEKGKSKKLKSVKELLGITIMERSSFEKNPIDFLEAKGYKEVKKDLIIKLPKYSLFELENGRKRMLASAGELQKGNELALPSKYVNFLYLASHYEKLKGSPEDNEQKQLFVEQHKHYLDEIIEQISEFSKRVILADANLDKVLSAYNKHRDKPIREQAENIIHLFTLTNLGAPAAFKYFDTTIDRKRYTSTKEVLDATLIHQSITGLYETRIDLSQLGGDGGEAAAKGSSGGSGGTLQLEEEYRLFEPESTQKQEMDIWLKNFPQAWAETGGMGTAHCQAPVLIQLKATATPISIRQYPMPHEAYQGIKPHIRRMLDQGILKPCQSPWNTPLLPVKKPGTEDYRPVQDLREVNKRVEDIHPTVPNPYNLLSTLPPSHPWYTVLDLKDAFFCLRLHSESQLLFAFEWRDPEIGLSGQLTWTRLPQGFKNSPTLFNEALHSDLADFRVRYPALVLLQYVDDLLLAAATRTECLEGTKALLETLGNKGYRASAKKAQICLQEVTYLGYSLKDGQRWLTKARKEAILSIPVPKNSRQVREFLGKAGYCRLFIPGFAELAAPLYPLTRPGTLFQWGTEQQLAFEDIKKALLSSPALGLPDITKPFELFIDENSGFAKGVLVQKLGPWKRPVAYLSKKLDTVASGWPPCLRMVAAIAILVKDAGKLTLGQPLTILTSHPVEALVRQPPNKWLSNARMTHYQAMLLDAERVHFGPTVSLNPATLLPLPSGGNHHDCLQILAETHGTRPDLTDQPLPDADLTWYTDGSSFIRNGEREAGAAVTTESEVIWAAPLPPGTSAQRAELIALTQALKMAEGKKLTVYTDSRYAFATTHVHGEIYRRRGWLTSEGKEIKNKNEILALLEALFLPKRLSIIHCPGHQKGDSPQAKGNRLADDTAKKAATETHSSLTVLPAGKRTADGSEFEKRTADGSEFESPKKKAKVE

SEQ ID NO: 1235 - protein, 2095 aa, synthetic construct
MPAAKRVKLDGGDKKYSIGLDIGTNSVGWAVITDEYKVPSKKFKVLGNTDRHSIKKNLIGALLFDSGETAEATRLKRTARRRYTRRKNRICYLQEIFSNEMAKVDDSFFHRLEESFLVEEDKKHERHPIFGNIVDEVAYHEKYPTIYHLRKKLVDSTDKADLRLIYLALAHMIKFRGHFLIEGDLNPDNSDVDKLFIQLVQTYNQLFEENPINASGVDAKAILSARLSKSRRLENLIAQLPGEKKNGLFGNLIALSLGLTPNFKSNFDLAEDAKLQLSKDTYDDDLDNLLAQIGDQYADLFLAAKNLSDAILLSDILRVNTEITKAPLSASMIKRYDEHHQDLTLLKALVRQQLPEKYKEIFFDQSKNGYAGYIDGGASQEEFYKFIKPILEKMDGTEELLVKLNREDLLRKQRTFDNGSIPHQIHLGELHAILRRQEDFYPFLKDNREKIEKILTFRIPYYVGPLARGNSRFAWMTRKSEETITPWNFEEVVDKGASAQSFIERMTNFDKNLPNEKVLPKHSLLYEYFTVYNELTKVKYVTEGMRKPAFLSGEQKKAIVDLLFKTNRKVTVKQLKEDYFKKIECFDSVEISGVEDRFNASLGTYHDLLKIIKDKDFLDNEENEDILEDIVLTLTLFEDREMIEERLKTYAHLFDDKVMKQLKRRRYTGWGRLSRKLINGIRDKQSGKTILDFLKSDGFANRNFMQLIHDDSLTFKEDIQKAQVSGQGDSLHEHIANLAGSPAIKKGILQTVKVVDELVKVMGRHKPENIVIEMARENQTTQKGQKNSRERMKRIEEGIKELGSQILKEHPVENTQLQNEKLYLYYLQNGRDMYVDQELDINRLSDYDVDHIVPQSFLKDDSIDNKVLTRSDKARGKSDNVPSEEVVKKMKNYWRQLLNAKLITQRKFDNLTKAERGGLSELDKAGFIKRQLVETRQITKHVAQILDSRMNTKYDENDKLIREVKVITLKSKLVSDFRKDFQFYKVREINNYHHAHDAYLNAVVGTALIKKYPKLESEFVYGDYKVYDVRKMIAKSEQEIGKATAKYFFYSNIMNFFKTEITLANGEIRKRPLIETNGETGEIVWDKGRDFATVRKVLSMPQVNIVKKTEVQTGGFSKESILPKRNSDKLIARKKDWDPKKYGGFDSPTVAYSVLVVAKVEKGKSKKLKSVKELLGITIMERSSFEKNPIDFLEAKGYKEVKKDLIIKLPKYSLFELENGRKRMLASAGELQKGNELALPSKYVNFLYLASHYEKLKGSPEDNEQKQLFVEQHKHYLDEIIEQISEFSKRVILADANLDKVLSAYNKHRDKPIREQAENIIHLFTLTNLGAPAAFKYFDTTIDRKRYTSTKEVLDATLIHQSITGLYETRIDLSQLGGDGGEAAAKGGGGGSGGTLQLEEEYRLFEPESTQKQEMDIWLKNFPQAWAETGGMGTAHCQAPVLIQLKATATPISIRQYPMPHEAYQGIKPHIRRMLDQGILKPCQSPWNTPLLPVKKPGTEDYRPVQDLREVNKRVEDIHPTVPNPYNLLSTLPPSHPWYTVLDLKDAFFCLRLHSESQLLFAFEWRDPEIGLSGQLTWTRLPQGFKNSPTLFNEALHSDLADFRVRYPALVLLQYVDDLLLAAATRTECLEGTKALLETLGNKGYRASAKKAQICLQEVTYLGYSLKDGQRWLTKARKEAILSIPVPKNSRQVREFLGKAGYCRLFIPGFAELAAPLYPLTRPGTLFQWGTEQQLAFEDIKKALLSSPALGLPDITKPFELFIDENSGFAKGVLVQKLGPWKRPVAYLSKKLDTVASGWPPCLRMVAAIAILVKDAGKLTLGQPLTILTSHPVEALVRQPPNKWLSNARMTHYQAMLLDAERVHFGPTVSLNPATLLPLPSGGNHHDCLQILAETHGTRPDLTDQPLPDADLTWYTDGSSFIRNGEREAGAAVTTESEVIWAAPLPPGTSAQRAELIALTQALKMAEGKKLTVYTDSRYAFATTHVHGEIYRRRGWLTSEGKEIKNKNEILALLEALFLPKRLSIIHCPGHQKGDSPQAKGNRLADDTAKKAATETHSSLTVLPAGKRTADGSEFEKRTADGSEFESPKKKAKVE

SEQ ID NO: 1236 - protein, 2092 aa, synthetic construct
MPAAKRVKLDGGDKKYSIGLDIGTNSVGWAVITDEYKVPSKKFKVLGNTDRHSIKKNLIGALLFDSGETAEATRLKRTARRRYTRRKNRICYLQEIFSNEMAKVDDSFFHRLEESFLVEEDKKHERHPIFGNIVDEVAYHEKYPTIYHLRKKLVDSTDKADLRLIYLALAHMIKFRGHFLIEGDLNPDNSDVDKLFIQLVQTYNQLFEENPINASGVDAKAILSARLSKSRRLENLIAQLPGEKKNGLFGNLIALSLGLTPNFKSNFDLAEDAKLQLSKDTYDDDLDNLLAQIGDQYADLFLAAKNLSDAILLSDILRVNTEITKAPLSASMIKRYDEHHQDLTLLKALVRQQLPEKYKEIFFDQSKNGYAGYIDGGASQEEFYKFIKPILEKMDGTEELLVKLNREDLLRKQRTFDNGSIPHQIHLGELHAILRRQEDFYPFLKDNREKIEKILTFRIPYYVGPLARGNSRFAWMTRKSEETITPWNFEEVVDKGASAQSFIERMTNFDKNLPNEKVLPKHSLLYEYFTVYNELTKVKYVTEGMRKPAFLSGEQKKAIVDLLFKTNRKVTVKQLKEDYFKKIECFDSVEISGVEDRFNASLGTYHDLLKIIKDKDFLDNEENEDILEDIVLTLTLFEDREMIEERLKTYAHLFDDKVMKQLKRRRYTGWGRLSRKLINGIRDKQSGKTILDFLKSDGFANRNFMQLIHDDSLTFKEDIQKAQVSGQGDSLHEHIANLAGSPAIKKGILQTVKVVDELVKVMGRHKPENIVIEMARENQTTQKGQKNSRERMKRIEEGIKELGSQILKEHPVENTQLQNEKLYLYYLQNGRDMYVDQELDINRLSDYDVDHIVPQSFLKDDSIDNKVLTRSDKARGKSDNVPSEEVVKKMKNYWRQLLNAKLITQRKFDNLTKAERGGLSELDKAGFIKRQLVETRQITKHVAQILDSRMNTKYDENDKLIREVKVITLKSKLVSDFRKDFQFYKVREINNYHHAHDAYLNAVVGTALIKKYPKLESEFVYGDYKVYDVRKMIAKSEQEIGKATAKYFFYSNIMNFFKTEITLANGEIRKRPLIETNGETGEIVWDKGRDFATVRKVLSMPQVNIVKKTEVQTGGFSKESILPKRNSDKLIARKKDWDPKKYGGFDSPTVAYSVLVVAKVEKGKSKKLKSVKELLGITIMERSSFEKNPIDFLEAKGYKEVKKDLIIKLPKYSLFELENGRKRMLASAGELQKGNELALPSKYVNFLYLASHYEKLKGSPEDNEQKQLFVEQHKHYLDEIIEQISEFSKRVILADANLDKVLSAYNKHRDKPIREQAENIIHLFTLTNLGAPAAFKYFDTTIDRKRYTSTKEVLDATLIHQSITGLYETRIDLSQLGGDGGGSSEAAAKGGTLQLEEEYRLFEPESTQKQEMDIWLKNFPQAWAETGGMGTAHCQAPVLIQLKATATPISIRQYPMPHEAYQGIKPHIRRMLDQGILKPCQSPWNTPLLPVKKPGTEDYRPVQDLREVNKRVEDIHPTVPNPYNLLSTLPPSHPWYTVLDLKDAFFCLRLHSESQLLFAFEWRDPEIGLSGQLTWTRLPQGFKNSPTLFNEALHSDLADFRVRYPALVLLQYVDDLLLAAATRTECLEGTKALLETLGNKGYRASAKKAQICLQEVTYLGYSLKDGQRWLTKARKEAILSIPVPKNSRQVREFLGKAGYCRLFIPGFAELAAPLYPLTRPGTLFQWGTEQQLAFEDIKKALLSSPALGLPDITKPFELFIDENSGFAKGVLVQKLGPWKRPVAYLSKKLDTVASGWPPCLRMVAAIAILVKDAGKLTLGQPLTILTSHPVEALVRQPPNKWLSNARMTHYQAMLLDAERVHFGPTVSLNPATLLPLPSGGNHHDCLQILAETHGTRPDLTDQPLPDADLTWYTDGSSFIRNGEREAGAAVTTESEVIWAAPLPPGTSAQRAELIALTQALKMAEGKKLTVYTDSRYAFATTHVHGEIYRRRGWLTSEGKEIKNKNEILALLEALFLPKRLSIIHCPGHQKGDSPQAKGNRLADDTAKKAATETHSSLTVLPAGKRTADGSEFEKRTADGSEFESPKKKAKVE

SEQ ID NO: 1237 - protein, 2095 aa, synthetic construct
MPAAKRVKLDGGDKKYSIGLDIGTNSVGWAVITDEYKVPSKKFKVLGNTDRHSIKKNLIGALLFDSGETAEATRLKRTARRRYTRRKNRICYLQEIFSNEMAKVDDSFFHRLEESFLVEEDKKHERHPIFGNIVDEVAYHEKYPTIYHLRKKLVDSTDKADLRLIYLALAHMIKFRGHFLIEGDLNPDNSDVDKLFIQLVQTYNQLFEENPINASGVDAKAILSARLSKSRRLENLIAQLPGEKKNGLFGNLIALSLGLTPNFKSNFDLAEDAKLQLSKDTYDDDLDNLLAQIGDQYADLFLAAKNLSDAILLSDILRVNTEITKAPLSASMIKRYDEHHQDLTLLKALVRQQLPEKYKEIFFDQSKNGYAGYIDGGASQEEFYKFIKPILEKMDGTEELLVKLNREDLLRKQRTFDNGSIPHQIHLGELHAILRRQEDFYPFLKDNREKIEKILTFRIPYYVGPLARGNSRFAWMTRKSEETITPWNFEEVVDKGASAQSFIERMTNFDKNLPNEKVLPKHSLLYEYFTVYNELTKVKYVTEGMRKPAFLSGEQKKAIVDLLFKTNRKVTVKQLKEDYFKKIECFDSVEISGVEDRFNASLGTYHDLLKIIKDKDFLDNEENEDILEDIVLTLTLFEDREMIEERLKTYAHLFDDKVMKQLKRRRYTGWGRLSRKLINGIRDKQSGKTILDFLKSDGFANRNFMQLIHDDSLTFKEDIQKAQVSGQGDSLHEHIANLAGSPAIKKGILQTVKVVDELVKVMGRHKPENIVIEMARENQTTQKGQKNSRERMKRIEEGIKELGSQILKEHPVENTQLQNEKLYLYYLQNGRDMYVDQELDINRLSDYDVDHIVPQSFLKDDSIDNKVLTRSDKARGKSDNVPSEEVVKKMKNYWRQLLNAKLITQRKFDNLTKAERGGLSELDKAGFIKRQLVETRQITKHVAQILDSRMNTKYDENDKLIREVKVITLKSKLVSDFRKDFQFYKVREINNYHHAHDAYLNAVVGTALIKKYPKLESEFVYGDYKVYDVRKMIAKSEQEIGKATAKYFFYSNIMNFFKTEITLANGEIRKRPLIETNGETGEIVWDKGRDFATVRKVLSMPQVNIVKKTEVQTGGFSKESILPKRNSDKLIARKKDWDPKKYGGFDSPTVAYSVLVVAKVEKGKSKKLKSVKELLGITIMERSSFEKNPIDFLEAKGYKEVKKDLIIKLPKYSLFELENGRKRMLASAGELQKGNELALPSKYVNFLYLASHYEKLKGSPEDNEQKQLFVEQHKHYLDEIIEQISEFSKRVILADANLDKVLSAYNKHRDKPIREQAENIIHLFTLTNLGAPAAFKYFDTTIDRKRYTSTKEVLDATLIHQSITGLYETRIDLSQLGGDGGGGSEAAAKGGGGGTLQLEEEYRLFEPESTQKQEMDIWLKNFPQAWAETGGMGTAHCQAPVLIQLKATATPISIRQYPMPHEAYQGIKPHIRRMLDQGILKPCQSPWNTPLLPVKKPGTEDYRPVQDLREVNKRVEDIHPTVPNPYNLLSTLPPSHPWYTVLDLKDAFFCLRLHSESQLLFAFEWRDPEIGLSGQLTWTRLPQGFKNSPTLFNEALHSDLADFRVRYPALVLLQYVDDLLLAAATRTECLEGTKALLETLGNKGYRASAKKAQICLQEVTYLGYSLKDGQRWLTKARKEAILSIPVPKNSRQVREFLGKAGYCRLFIPGFAELAAPLYPLTRPGTLFQWGTEQQLAFEDIKKALLSSPALGLPDITKPFELFIDENSGFAKGVLVQKLGPWKRPVAYLSKKLDTVASGWPPCLRMVAAIAILVKDAGKLTLGQPLTILTSHPVEALVRQPPNKWLSNARMTHYQAMLLDAERVHFGPTVSLNPATLLPLPSGGNHHDCLQILAETHGTRPDLTDQPLPDADLTWYTDGSSFIRNGEREAGAAVTTESEVIWAAPLPPGTSAQRAELIALTQALKMAEGKKLTVYTDSRYAFATTHVHGEIYRRRGWLTSEGKEIKNKNEILALLEALFLPKRLSIIHCPGHQKGDSPQAKGNRLADDTAKKAATETHSSLTVLPAGKRTADGSEFEKRTADGSEFESPKKKAKVE

SEQ ID NO: 1238 - protein, 2093 aa, synthetic construct
MPAAKRVKLDGGDKKYSIGLDIGTNSVGWAVITDEYKVPSKKFKVLGNTDRHSIKKNLIGALLFDSGETAEATRLKRTARRRYTRRKNRICYLQEIFSNEMAKVDDSFFHRLEESFLVEEDKKHERHPIFGNIVDEVAYHEKYPTIYHLRKKLVDSTDKADLRLIYLALAHMIKFRGHFLIEGDLNPDNSDVDKLFIQLVQTYNQLFEENPINASGVDAKAILSARLSKSRRLENLIAQLPGEKKNGLFGNLIALSLGLTPNFKSNFDLAEDAKLQLSKDTYDDDLDNLLAQIGDQYADLFLAAKNLSDAILLSDILRVNTEITKAPLSASMIKRYDEHHQDLTLLKALVRQQLPEKYKEIFFDQSKNGYAGYIDGGASQEEFYKFIKPILEKMDGTEELLVKLNREDLLRKQRTFDNGSIPHQIHLGELHAILRRQEDFYPFLKDNREKIEKILTFRIPYYVGPLARGNSRFAWMTRKSEETITPWNFEEVVDKGASAQSFIERMTNFDKNLPNEKVLPKHSLLYEYFTVYNELTKVKYVTEGMRKPAFLSGEQKKAIVDLLFKTNRKVTVKQLKEDYFKKIECFDSVEISGVEDRFNASLGTYHDLLKIIKDKDFLDNEENEDILEDIVLTLTLFEDREMIEERLKTYAHLFDDKVMKQLKRRRYTGWGRLSRKLINGIRDKQSGKTILDFLKSDGFANRNFMQLIHDDSLTFKEDIQKAQVSGQGDSLHEHIANLAGSPAIKKGILQTVKVVDELVKVMGRHKPENIVIEMARENQTTQKGQKNSRERMKRIEEGIKELGSQILKEHPVENTQLQNEKLYLYYLQNGRDMYVDQELDINRLSDYDVDHIVPQSFLKDDSIDNKVLTRSDKARGKSDNVPSEEVVKKMKNYWRQLLNAKLITQRKFDNLTKAERGGLSELDKAGFIKRQLVETRQITKHVAQILDSRMNTKYDENDKLIREVKVITLKSKLVSDFRKDFQFYKVREINNYHHAHDAYLNAVVGTALIKKYPKLESEFVYGDYKVYDVRKMIAKSEQEIGKATAKYFFYSNIMNFFKTEITLANGEIRKRPLIETNGETGEIVWDKGRDFATVRKVLSMPQVNIVKKTEVQTGGFSKESILPKRNSDKLIARKKDWDPKKYGGFDSPTVAYSVLVVAKVEKGKSKKLKSVKELLGITIMERSSFEKNPIDFLEAKGYKEVKKDLIIKLPKYSLFELENGRKRMLASAGELQKGNELALPSKYVNFLYLASHYEKLKGSPEDNEQKQLFVEQHKHYLDEIIEQISEFSKRVILADANLDKVLSAYNKHRDKPIREQAENIIHLFTLTNLGAPAAFKYFDTTIDRKRYTSTKEVLDATLIHQSITGLYETRIDLSQLGGDGGPAPGSSGGGGGTLQLEEEYRLFEPESTQKQEMDIWLKNFPQAWAETGGMGTAHCQAPVLIQLKATATPISIRQYPMPHEAYQGIKPHIRRMLDQGILKPCQSPWNTPLLPVKKPGTEDYRPVQDLREVNKRVEDIHPTVPNPYNLLSTLPPSHPWYTVLDLKDAFFCLRLHSESQLLFAFEWRDPEIGLSGQLTWTRLPQGFKNSPTLFNEALHSDLADFRVRYPALVLLQYVDDLLLAAATRTECLEGTKALLETLGNKGYRASAKKAQICLQEVTYLGYSLKDGQRWLTKARKEAILSIPVPKNSRQVREFLGKAGYCRLFIPGFAELAAPLYPLTRPGTLFQWGTEQQLAFEDIKKALLSSPALGLPDITKPFELFIDENSGFAKGVLVQKLGPWKRPVAYLSKKLDTVASGWPPCLRMVAAIAILVKDAGKLTLGQPLTILTSHPVEALVRQPPNKWLSNARMTHYQAMLLDAERVHFGPTVSLNPATLLPLPSGGNHHDCLQILAETHGTRPDLTDQPLPDADLTWYTDGSSFIRNGEREAGAAVTTESEVIWAAPLPPGTSAQRAELIALTQALKMAEGKKLTVYTDSRYAFATTHVHGEIYRRRGWLTSEGKEIKNKNEILALLEALFLPKRLSIIHCPGHQKGDSPQAKGNRLADDTAKKAATETHSSLTVLPAGKRTADGSEFEKRTADGSEFESPKKKAKVE

SEQ ID NO: 1239 - protein, 2095 aa, synthetic construct
MPAAKRVKLDGGDKKYSIGLDIGTNSVGWAVITDEYKVPSKKFKVLGNTDRHSIKKNLIGALLFDSGETAEATRLKRTARRRYTRRKNRICYLQEIFSNEMAKVDDSFFHRLEESFLVEEDKKHERHPIFGNIVDEVAYHEKYPTIYHLRKKLVDSTDKADLRLIYLALAHMIKFRGHFLIEGDLNPDNSDVDKLFIQLVQTYNQLFEENPINASGVDAKAILSARLSKSRRLENLIAQLPGEKKNGLFGNLIALSLGLTPNFKSNFDLAEDAKLQLSKDTYDDDLDNLLAQIGDQYADLFLAAKNLSDAILLSDILRVNTEITKAPLSASMIKRYDEHHQDLTLLKALVRQQLPEKYKEIFFDQSKNGYAGYIDGGASQEEFYKFIKPILEKMDGTEELLVKLNREDLLRKQRTFDNGSIPHQIHLGELHAILRRQEDFYPFLKDNREKIEKILTFRIPYYVGPLARGNSRFAWMTRKSEETITPWNFEEVVDKGASAQSFIERMTNFDKNLPNEKVLPKHSLLYEYFTVYNELTKVKYVTEGMRKPAFLSGEQKKAIVDLLFKTNRKVTVKQLKEDYFKKIECFDSVEISGVEDRFNASLGTYHDLLKIIKDKDFLDNEENEDILEDIVLTLTLFEDREMIEERLKTYAHLFDDKVMKQLKRRRYTGWGRLSRKLINGIRDKQSGKTILDFLKSDGFANRNFMQLIHDDSLTFKEDIQKAQVSGQGDSLHEHIANLAGSPAIKKGILQTVKVVDELVKVMGRHKPENIVIEMARENQTTQKGQKNSRERMKRIEEGIKELGSQILKEHPVENTQLQNEKLYLYYLQNGRDMYVDQELDINRLSDYDVDHIVPQSFLKDDSIDNKVLTRSDKARGKSDNVPSEEVVKKMKNYWRQLLNAKLITQRKFDNLTKAERGGLSELDKAGFIKRQLVETRQITKHVAQILDSRMNTKYDENDKLIREVKVITLKSKLVSDFRKDFQFYKVREINNYHHAHDAYLNAVVGTALIKKYPKLESEFVYGDYKVYDVRKMIAKSEQEIGKATAKYFFYSNIMNFFKTEITLANGEIRKRPLIETNGETGEIVWDKGRDFATVRKVLSMPQVNIVKKTEVQTGGFSKESILPKRNSDKLIARKKDWDPKKYGGFDSPTVAYSVLVVAKVEKGKSKKLKSVKELLGITIMERSSFEKNPIDFLEAKGYKEVKKDLIIKLPKYSLFELENGRKRMLASAGELQKGNELALPSKYVNFLYLASHYEKLKGSPEDNEQKQLFVEQHKHYLDEIIEQISEFSKRVILADANLDKVLSAYNKHRDKPIREQAENIIHLFTLTNLGAPAAFKYFDTTIDRKRYTSTKEVLDATLIHQSITGLYETRIDLSQLGGDGGPAPGGSEAAAKGGTLQLEEEYRLFEPESTQKQEMDIWLKNFPQAWAETGGMGTAHCQAPVLIQLKATATPISIRQYPMPHEAYQGIKPHIRRMLDQGILKPCQSPWNTPLLPVKKPGTEDYRPVQDLREVNKRVEDIHPTVPNPYNLLSTLPPSHPWYTVLDLKDAFFCLRLHSESQLLFAFEWRDPEIGLSGQLTWTRLPQGFKNSPTLFNEALHSDLADFRVRYPALVLLQYVDDLLLAAATRTECLEGTKALLETLGNKGYRASAKKAQICLQEVTYLGYSLKDGQRWLTKARKEAILSIPVPKNSRQVREFLGKAGYCRLFIPGFAELAAPLYPLTRPGTLFQWGTEQQLAFEDIKKALLSSPALGLPDITKPFELFIDENSGFAKGVLVQKLGPWKRPVAYLSKKLDTVASGWPPCLRMVAAIAILVKDAGKLTLGQPLTILTSHPVEALVRQPPNKWLSNARMTHYQAMLLDAERVHFGPTVSLNPATLLPLPSGGNHHDCLQILAETHGTRPDLTDQPLPDADLTWYTDGSSFIRNGEREAGAAVTTESEVIWAAPLPPGTSAQRAELIALTQALKMAEGKKLTVYTDSRYAFATTHVHGEIYRRRGWLTSEGKEIKNKNEILALLEALFLPKRLSIIHCPGHQKGDSPQAKGNRLADDTAKKAATETHSSLTVLPAGKRTADGSEFEKRTADGSEFESPKKKAKVE

SEQ ID NO: 1240 - protein, 2093 aa, synthetic construct
MPAAKRVKLDGGDKKYSIGLDIGTNSVGWAVITDEYKVPSKKFKVLGNTDRHSIKKNLIGALLFDSGETAEATRLKRTARRRYTRRKNRICYLQEIFSNEMAKVDDSFFHRLEESFLVEEDKKHERHPIFGNIVDEVAYHEKYPTIYHLRKKLVDSTDKADLRLIYLALAHMIKFRGHFLIEGDLNPDNSDVDKLFIQLVQTYNQLFEENPINASGVDAKAILSARLSKSRRLENLIAQLPGEKKNGLFGNLIALSLGLTPNFKSNFDLAEDAKLQLSKDTYDDDLDNLLAQIGDQYADLFLAAKNLSDAILLSDILRVNTEITKAPLSASMIKRYDEHHQDLTLLKALVRQQLPEKYKEIFFDQSKNGYAGYIDGGASQEEFYKFIKPILEKMDGTEELLVKLNREDLLRKQRTFDNGSIPHQIHLGELHAILRRQEDFYPFLKDNREKIEKILTFRIPYYVGPLARGNSRFAWMTRKSEETITPWNFEEVVDKGASAQSFIERMTNFDKNLPNEKVLPKHSLLYEYFTVYNELTKVKYVTEGMRKPAFLSGEQKKAIVDLLFKTNRKVTVKQLKEDYFKKIECFDSVEISGVEDRFNASLGTYHDLLKIIKDKDFLDNEENEDILEDIVLTLTLFEDREMIEERLKTYAHLFDDKVMKQLKRRRYTGWGRLSRKLINGIRDKQSGKTILDFLKSDGFANRNFMQLIHDDSLTFKEDIQKAQVSGQGDSLHEHIANLAGSPAIKKGILQTVKVVDELVKVMGRHKPENIVIEMARENQTTQKGQKNSRERMKRIEEGIKELGSQILKEHPVENTQLQNEKLYLYYLQNGRDMYVDQELDINRLSDYDVDHIVPQSFLKDDSIDNKVLTRSDKARGKSDNVPSEEVVKKMKNYWRQLLNAKLITQRKFDNLTKAERGGLSELDKAGFIKRQLVETRQITKHVAQILDSRMNTKYDENDKLIREVKVITLKSKLVSDFRKDFQFYKVREINNYHHAHDAYLNAVVGTALIKKYPKLESEFVYGDYKVYDVRKMIAKSEQEIGKATAKYFFYSNIMNFFKTEITLANGEIRKRPLIETNGETGEIVWDKGRDFATVRKVLSMPQVNIVKKTEVQTGGFSKESILPKRNSDKLIARKKDWDPKKYGGFDSPTVAYSVLVVAKVEKGKSKKLKSVKELLGITIMERSSFEKNPIDFLEAKGYKEVKKDLIIKLPKYSLFELENGRKRMLASAGELQKGNELALPSKYVNFLYLASHYEKLKGSPEDNEQKQLFVEQHKHYLDEIIEQISEFSKRVILADANLDKVLSAYNKHRDKPIREQAENIIHLFTLTNLGAPAAFKYFDTTIDRKRYTSTKEVLDATLIHQSITGLYETRIDLSQLGGDGGGSSGGGPAPGGTLQLEEEYRLFEPESTQKQEMDIWLKNFPQAWAETGGMGTAHCQAPVLIQLKATATPISIRQYPMPHEAYQGIKPHIRRMLDQGILKPCQSPWNTPLLPVKKPGTEDYRPVQDLREVNKRVEDIHPTVPNPYNLLSTLPPSHPWYTVLDLKDAFFCLRLHSESQLLFAFEWRDPEIGLSGQLTWTRLPQGFKNSPTLFNEALHSDLADFRVRYPALVLLQYVDDLLLAAATRTECLEGTKALLETLGNKGYRASAKKAQICLQEVTYLGYSLKDGQRWLTKARKEAILSIPVPKNSRQVREFLGKAGYCRLFIPGFAELAAPLYPLTRPGTLFQWGTEQQLAFEDIKKALLSSPALGLPDITKPFELFIDENSGFAKGVLVQKLGPWKRPVAYLSKKLDTVASGWPPCLRMVAAIAILVKDAGKLTLGQPLTILTSHPVEALVRQPPNKWLSNARMTHYQAMLLDAERVHFGPTVSLNPATLLPLPSGGNHHDCLQILAETHGTRPDLTDQPLPDADLTWYTDGSSFIRNGEREAGAAVTTESEVIWAAPLPPGTSAQRAELIALTQALKMAEGKKLTVYTDSRYAFATTHVHGEIYRRRGWLTSEGKEIKNKNEILALLEALFLPKRLSIIHCPGHQKGDSPQAKGNRLADDTAKKAATETHSSLTVLPAGKRTADGSEFEKRTADGSEFESPKKKAKVE

SEQ ID NO: 1241 - protein, 2095 aa, synthetic construct
MPAAKRVKLDGGDKKYSIGLDIGTNSVGWAVITDEYKVPSKKFKVLGNTDRHSIKKNLIGALLFDSGETAEATRLKRTARRRYTRRKNRICYLQEIFSNEMAKVDDSFFHRLEESFLVEEDKKHERHPIFGNIVDEVAYHEKYPTIYHLRKKLVDSTDKADLRLIYLALAHMIKFRGHFLIEGDLNPDNSDVDKLFIQLVQTYNQLFEENPINASGVDAKAILSARLSKSRRLENLIAQLPGEKKNGLFGNLIALSLGLTPNFKSNFDLAEDAKLQLSKDTYDDDLDNLLAQIGDQYADLFLAAKNLSDAILLSDILRVNTEITKAPLSASMIKRYDEHHQDLTLLKALVRQQLPEKYKEIFFDQSKNGYAGYIDGGASQEEFYKFIKPILEKMDGTEELLVKLNREDLLRKQRTFDNGSIPHQIHLGELHAILRRQEDFYPFLKDNREKIEKILTFRIPYYVGPLARGNSRFAWMTRKSEETITPWNFEEVVDKGASAQSFIERMTNFDKNLPNEKVLPKHSLLYEYFTVYNELTKVKYVTEGMRKPAFLSGEQKKAIVDLLFKTNRKVTVKQLKEDYFKKIECFDSVEISGVEDRFNASLGTYHDLLKIIKDKDFLDNEENEDILEDIVLTLTLFEDREMIEERLKTYAHLFDDKVMKQLKRRRYTGWGRLSRKLINGIRDKQSGKTILDFLKSDGFANRNFMQLIHDDSLTFKEDIQKAQVSGQGDSLHEHIANLAGSPAIKKGILQTVKVVDELVKVMGRHKPENIVIEMARENQTTQKGQKNSRERMKRIEEGIKELGSQILKEHPVENTQLQNEKLYLYYLQNGRDMYVDQELDINRLSDYDVDHIVPQSFLKDDSIDNKVLTRSDKARGKSDNVPSEEVVKKMKNYWRQLLNAKLITQRKFDNLTKAERGGLSELDKAGFIKRQLVETRQITKHVAQILDSRMNTKYDENDKLIREVKVITLKSKLVSDFRKDFQFYKVREINNYHHAHDAYLNAVVGTALIKKYPKLESEFVYGDYKVYDVRKMIAKSEQEIGKATAKYFFYSNIMNFFKTEITLANGEIRKRPLIETNGETGEIVWDKGRDFATVRKVLSMPQVNIVKKTEVQTGGFSKESILPKRNSDKLIARKKDWDPKKYGGFDSPTVAYSVLVVAKVEKGKSKKLKSVKELLGITIMERSSFEKNPIDFLEAKGYKEVKKDLIIKLPKYSLFELENGRKRMLASAGELQKGNELALPSKYVNFLYLASHYEKLKGSPEDNEQKQLFVEQHKHYLDEIIEQISEFSKRVILADANLDKVLSAYNKHRDKPIREQAENIIHLFTLTNLGAPAAFKYFDTTIDRKRYTSTKEVLDATLIHQSITGLYETRIDLSQLGGDGGEAAAKGGSGSSGGTLQLEEEYRLFEPESTQKQEMDIWLKNFPQAWAETGGMGTAHCQAPVLIQLKATATPISIRQYPMPHEAYQGIKPHIRRMLDQGILKPCQSPWNTPLLPVKKPGTEDYRPVQDLREVNKRVEDIHPTVPNPYNLLSTLPPSHPWYTVLDLKDAFFCLRLHSESQLLFAFEWRDPEIGLSGQLTWTRLPQGFKNSPTLFNEALHSDLADFRVRYPALVLLQYVDDLLLAAATRTECLEGTKALLETLGNKGYRASAKKAQICLQEVTYLGYSLKDGQRWLTKARKEAILSIPVPKNSRQVREFLGKAGYCRLFIPGFAELAAPLYPLTRPGTLFQWGTEQQLAFEDIKKALLSSPALGLPDITKPFELFIDENSGFAKGVLVQKLGPWKRPVAYLSKKLDTVASGWPPCLRMVAAIAILVKDAGKLTLGQPLTILTSHPVEALVRQPPNKWLSNARMTHYQAMLLDAERVHFGPTVSLNPATLLPLPSGGNHHDCLQILAETHGTRPDLTDQPLPDADLTWYTDGSSFIRNGEREAGAAVTTESEVIWAAPLPPGTSAQRAELIALTQALKMAEGKKLTVYTDSRYAFATTHVHGEIYRRRGWLTSEGKEIKNKNEILALLEALFLPKRLSIIHCPGHQKGDSPQAKGNRLADDTAKKAATETHSSLTVLPAGKRTADGSEFEKRTADGSEFESPKKKAKVE

SEQ ID NO: 1242 - protein, 2095 aa, synthetic construct
MPAAKRVKLDGGDKKYSIGLDIGTNSVGWAVITDEYKVPSKKFKVLGNTDRHSIKKNLIGALLFDSGETAEATRLKRTARRRYTRRKNRICYLQEIFSNEMAKVDDSFFHRLEESFLVEEDKKHERHPIFGNIVDEVAYHEKYPTIYHLRKKLVDSTDKADLRLIYLALAHMIKFRGHFLIEGDLNPDNSDVDKLFIQLVQTYNQLFEENPINASGVDAKAILSARLSKSRRLENLIAQLPGEKKNGLFGNLIALSLGLTPNFKSNFDLAEDAKLQLSKDTYDDDLDNLLAQIGDQYADLFLAAKNLSDAILLSDILRVNTEITKAPLSASMIKRYDEHHQDLTLLKALVRQQLPEKYKEIFFDQSKNGYAGYIDGGASQEEFYKFIKPILEKMDGTEELLVKLNREDLLRKQRTFDNGSIPHQIHLGELHAILRRQEDFYPFLKDNREKIEKILTFRIPYYVGPLARGNSRFAWMTRKSEETITPWNFEEVVDKGASAQSFIERMTNFDKNLPNEKVLPKHSLLYEYFTVYNELTKVKYVTEGMRKPAFLSGEQKKAIVDLLFKTNRKVTVKQLKEDYFKKIECFDSVEISGVEDRFNASLGTYHDLLKIIKDKDFLDNEENEDILEDIVLTLTLFEDREMIEERLKTYAHLFDDKVMKQLKRRRYTGWGRLSRKLINGIRDKQSGKTILDFLKSDGFANRNFMQLIHDDSLTFKEDIQKAQVSGQGDSLHEHIANLAGSPAIKKGILQTVKVVDELVKVMGRHKPENIVIEMARENQTTQKGQKNSRERMKRIEEGIKELGSQILKEHPVENTQLQNEKLYLYYLQNGRDMYVDQELDINRLSDYDVDHIVPQSFLKDDSIDNKVLTRSDKARGKSDNVPSEEVVKKMKNYWRQLLNAKLITQRKFDNLTKAERGGLSELDKAGFIKRQLVETRQITKHVAQILDSRMNTKYDENDKLIREVKVITLKSKLVSDFRKDFQFYKVREINNYHHAHDAYLNAVVGTALIKKYPKLESEFVYGDYKVYDVRKMIAKSEQEIGKATAKYFFYSNIMNFFKTEITLANGEIRKRPLIETNGETGEIVWDKGRDFATVRKVLSMPQVNIVKKTEVQTGGFSKESILPKRNSDKLIARKKDWDPKKYGGFDSPTVAYSVLVVAKVEKGKSKKLKSVKELLGITIMERSSFEKNPIDFLEAKGYKEVKKDLIIKLPKYSLFELENGRKRMLASAGELQKGNELALPSKYVNFLYLASHYEKLKGSPEDNEQKQLFVEQHKHYLDEIIEQISEFSKRVILADANLDKVLSAYNKHRDKPIREQAENIIHLFTLTNLGAPAAFKYFDTTIDRKRYTSTKEVLDATLIHQSITGLYETRIDLSQLGGDGGGSSGGSEAAAKGGTLQLEEEYRLFEPESTQKQEMDIWLKNFPQAWAETGGMGTAHCQAPVLIQLKATATPISIRQYPMPHEAYQGIKPHIRRMLDQGILKPCQSPWNTPLLPVKKPGTEDYRPVQDLREVNKRVEDIHPTVPNPYNLLSTLPPSHPWYTVLDLKDAFFCLRLHSESQLLFAFEWRDPEIGLSGQLTWTRLPQGFKNSPTLFNEALHSDLADFRVRYPALVLLQYVDDLLLAAATRTECLEGTKALLETLGNKGYRASAKKAQICLQEVTYLGYSLKDGQRWLTKARKEAILSIPVPKNSRQVREFLGKAGYCRLFIPGFAELAAPLYPLTRPGTLFQWGTEQQLAFEDIKKALLSSPALGLPDITKPFELFIDENSGFAKGVLVQKLGPWKRPVAYLSKKLDTVASGWPPCLRMVAAIAILVKDAGKLTLGQPLTILTSHPVEALVRQPPNKWLSNARMTHYQAMLLDAERVHFGPTVSLNPATLLPLPSGGNHHDCLQILAETHGTRPDLTDQPLPDADLTWYTDGSSFIRNGEREAGAAVTTESEVIWAAPLPPGTSAQRAELIALTQALKMAEGKKLTVYTDSRYAFATTHVHGEIYRRRGWLTSEGKEIKNKNEILALLEALFLPKRLSIIHCPGHQKGDSPQAKGNRLADDTAKKAATETHSSLTVLPAGKRTADGSEFEKRTADGSEFESPKKKAKVE

SEQ ID NO: 1243 - protein, 2099 aa, synthetic construct
MPAAKRVKLDGGDKKYSIGLDIGTNSVGWAVITDEYKVPSKKFKVLGNTDRHSIKKNLIGALLFDSGETAEATRLKRTARRRYTRRKNRICYLQEIFSNEMAKVDDSFFHRLEESFLVEEDKKHERHPIFGNIVDEVAYHEKYPTIYHLRKKLVDSTDKADLRLIYLALAHMIKFRGHFLIEGDLNPDNSDVDKLFIQLVQTYNQLFEENPINASGVDAKAILSARLSKSRRLENLIAQLPGEKKNGLFGNLIALSLGLTPNFKSNFDLAEDAKLQLSKDTYDDDLDNLLAQIGDQYADLFLAAKNLSDAILLSDILRVNTEITKAPLSASMIKRYDEHHQDLTLLKALVRQQLPEKYKEIFFDQSKNGYAGYIDGGASQEEFYKFIKPILEKMDGTEELLVKLNREDLLRKQRTFDNGSIPHQIHLGELHAILRRQEDFYPFLKDNREKIEKILTFRIPYYVGPLARGNSRFAWMTRKSEETITPWNFEEVVDKGASAQSFIERMTNFDKNLPNEKVLPKHSLLYEYFTVYNELTKVKYVTEGMRKPAFLSGEQKKAIVDLLFKTNRKVTVKQLKEDYFKKIECFDSVEISGVEDRFNASLGTYHDLLKIIKDKDFLDNEENEDILEDIVLTLTLFEDREMIEERLKTYAHLFDDKVMKQLKRRRYTGWGRLSRKLINGIRDKQSGKTILDFLKSDGFANRNFMQLIHDDSLTFKEDIQKAQVSGQGDSLHEHIANLAGSPAIKKGILQTVKVVDELVKVMGRHKPENIVIEMARENQTTQKGQKNSRERMKRIEEGIKELGSQILKEHPVENTQLQNEKLYLYYLQNGRDMYVDQELDINRLSDYDVDHIVPQSFLKDDSIDNKVLTRSDKARGKSDNVPSEEVVKKMKNYWRQLLNAKLITQRKFDNLTKAERGGLSELDKAGFIKRQLVETRQITKHVAQILDSRMNTKYDENDKLIREVKVITLKSKLVSDFRKDFQFYKVREINNYHHAHDAYLNAVVGTALIKKYPKLESEFVYGDYKVYDVRKMIAKSEQEIGKATAKYFFYSNIMNFFKTEITLANGEIRKRPLIETNGETGEIVWDKGRDFATVRKVLSMPQVNIVKKTEVQTGGFSKESILPKRNSDKLIARKKDWDPKKYGGFDSPTVAYSVLVVAKVEKGKSKKLKSVKELLGITIMERSSFEKNPIDFLEAKGYKEVKKDLIIKLPKYSLFELENGRKRMLASAGELQKGNELALPSKYVNFLYLASHYEKLKGSPEDNEQKQLFVEQHKHYLDEIIEQISEFSKRVILADANLDKVLSAYNKHRDKPIREQAENIIHLFTLTNLGAPAAFKYFDTTIDRKRYTSTKEVLDATLIHQSITGLYETRIDLSQLGGDGGEAAAKGGGGSEAAAKGGTLQLEEEYRLFEPESTQKQEMDIWLKNFPQAWAETGGMGTAHCQAPVLIQLKATATPISIRQYPMPHEAYQGIKPHIRRMLDQGILKPCQSPWNTPLLPVKKPGTEDYRPVQDLREVNKRVEDIHPTVPNPYNLLSTLPPSHPWYTVLDLKDAFFCLRLHSESQLLFAFEWRDPEIGLSGQLTWTRLPQGFKNSPTLFNEALHSDLADFRVRYPALVLLQYVDDLLLAAATRTECLEGTKALLETLGNKGYRASAKKAQICLQEVTYLGYSLKDGQRWLTKARKEAILSIPVPKNSRQVREFLGKAGYCRLFIPGFAELAAPLYPLTRPGTLFQWGTEQQLAFEDIKKALLSSPALGLPDITKPFELFIDENSGFAKGVLVQKLGPWKRPVAYLSKKLDTVASGWPPCLRMVAAIAILVKDAGKLTLGQPLTILTSHPVEALVRQPPNKWLSNARMTHYQAMLLDAERVHFGPTVSLNPATLLPLPSGGNHHDCLQILAETHGTRPDLTDQPLPDADLTWYTDGSSFIRNGEREAGAAVTTESEVIWAAPLPPGTSAQRAELIALTQALKMAEGKKLTVYTDSRYAFATTHVHGEIYRRRGWLTSEGKEIKNKNEILALLEALFLPKRLSIIHCPGHQKGDSPQAKGNRLADDTAKKAATETHSSLTVLPAGKRTADGSEFEKRTADGSEFESPKKKAKVE

SEQ ID NO: 1244 - protein, 2093 aa, synthetic construct
MPAAKRVKLDGGDKKYSIGLDIGTNSVGWAVITDEYKVPSKKFKVLGNTDRHSIKKNLIGALLFDSGETAEATRLKRTARRRYTRRKNRICYLQEIFSNEMAKVDDSFFHRLEESFLVEEDKKHERHPIFGNIVDEVAYHEKYPTIYHLRKKLVDSTDKADLRLIYLALAHMIKFRGHFLIEGDLNPDNSDVDKLFIQLVQTYNQLFEENPINASGVDAKAILSARLSKSRRLENLIAQLPGEKKNGLFGNLIALSLGLTPNFKSNFDLAEDAKLQLSKDTYDDDLDNLLAQIGDQYADLFLAAKNLSDAILLSDILRVNTEITKAPLSASMIKRYDEHHQDLTLLKALVRQQLPEKYKEIFFDQSKNGYAGYIDGGASQEEFYKFIKPILEKMDGTEELLVKLNREDLLRKQRTFDNGSIPHQIHLGELHAILRRQEDFYPFLKDNREKIEKILTFRIPYYVGPLARGNSRFAWMTRKSEETITPWNFEEVVDKGASAQSFIERMTNFDKNLPNEKVLPKHSLLYEYFTVYNELTKVKYVTEGMRKPAFLSGEQKKAIVDLLFKTNRKVTVKQLKEDYFKKIECFDSVEISGVEDRFNASLGTYHDLLKIIKDKDFLDNEENEDILEDIVLTLTLFEDREMIEERLKTYAHLFDDKVMKQLKRRRYTGWGRLSRKLINGIRDKQSGKTILDFLKSDGFANRNFMQLIHDDSLTFKEDIQKAQVSGQGDSLHEHIANLAGSPAIKKGILQTVKVVDELVKVMGRHKPENIVIEMARENQTTQKGQKNSRERMKRIEEGIKELGSQILKEHPVENTQLQNEKLYLYYLQNGRDMYVDQELDINRLSDYDVDHIVPQSFLKDDSIDNKVLTRSDKARGKSDNVPSEEVVKKMKNYWRQLLNAKLITQRKFDNLTKAERGGLSELDKAGFIKRQLVETRQITKHVAQILDSRMNTKYDENDKLIREVKVITLKSKLVSDFRKDFQFYKVREINNYHHAHDAYLNAVVGTALIKKYPKLESEFVYGDYKVYDVRKMIAKSEQEIGKATAKYFFYSNIMNFFKTEITLANGEIRKRPLIETNGETGEIVWDKGRDFATVRKVLSMPQVNIVKKTEVQTGGFSKESILPKRNSDKLIARKKDWDPKKYGGFDSPTVAYSVLVVAKVEKGKSKKLKSVKELLGITIMERSSFEKNPIDFLEAKGYKEVKKDLIIKLPKYSLFELENGRKRMLASAGELQKGNELALPSKYVNFLYLASHYEKLKGSPEDNEQKQLFVEQHKHYLDEIIEQISEFSKRVILADANLDKVLSAYNKHRDKPIREQAENIIHLFTLTNLGAPAAFKYFDTTIDRKRYTSTKEVLDATLIHQSITGLYETRIDLSQLGGDGGGGSGSSPAPGGTLQLEEEYRLFEPESTQKQEMDIWLKNFPQAWAETGGMGTAHCQAPVLIQLKATATPISIRQYPMPHEAYQGIKPHIRRMLDQGILKPCQSPWNTPLLPVKKPGTEDYRPVQDLREVNKRVEDIHPTVPNPYNLLSTLPPSHPWYTVLDLKDAFFCLRLHSESQLLFAFEWRDPEIGLSGQLTWTRLPQGFKNSPTLFNEALHSDLADFRVRYPALVLLQYVDDLLLAAATRTECLEGTKALLETLGNKGYRASAKKAQICLQEVTYLGYSLKDGQRWLTKARKEAILSIPVPKNSRQVREFLGKAGYCRLFIPGFAELAAPLYPLTRPGTLFQWGTEQQLAFEDIKKALLSSPALGLPDITKPFELFIDENSGFAKGVLVQKLGPWKRPVAYLSKKLDTVASGWPPCLRMVAAIAILVKDAGKLTLGQPLTILTSHPVEALVRQPPNKWLSNARMTHYQAMLLDAERVHFGPTVSLNPATLLPLPSGGNHHDCLQILAETHGTRPDLTDQPLPDADLTWYTDGSSFIRNGEREAGAAVTTESEVIWAAPLPPGTSAQRAELIALTQALKMAEGKKLTVYTDSRYAFATTHVHGEIYRRRGWLTSEGKEIKNKNEILALLEALFLPKRLSIIHCPGHQKGDSPQAKGNRLADDTAKKAATETHSSLTVLPAGKRTADGSEFEKRTADGSEFESPKKKAKVE

SEQ ID NO: 1245 - protein, 2090 aa, synthetic construct
MPAAKRVKLDGGDKKYSIGLDIGTNSVGWAVITDEYKVPSKKFKVLGNTDRHSIKKNLIGALLFDSGETAEATRLKRTARRRYTRRKNRICYLQEIFSNEMAKVDDSFFHRLEESFLVEEDKKHERHPIFGNIVDEVAYHEKYPTIYHLRKKLVDSTDKADLRLIYLALAHMIKFRGHFLIEGDLNPDNSDVDKLFIQLVQTYNQLFEENPINASGVDAKAILSARLSKSRRLENLIAQLPGEKKNGLFGNLIALSLGLTPNFKSNFDLAEDAKLQLSKDTYDDDLDNLLAQIGDQYADLFLAAKNLSDAILLSDILRVNTEITKAPLSASMIKRYDEHHQDLTLLKALVRQQLPEKYKEIFFDQSKNGYAGYIDGGASQEEFYKFIKPILEKMDGTEELLVKLNREDLLRKQRTFDNGSIPHQIHLGELHAILRRQEDFYPFLKDNREKIEKILTFRIPYYVGPLARGNSRFAWMTRKSEETITPWNFEEVVDKGASAQSFIERMTNFDKNLPNEKVLPKHSLLYEYFTVYNELTKVKYVTEGMRKPAFLSGEQKKAIVDLLFKTNRKVTVKQLKEDYFKKIECFDSVEISGVEDRFNASLGTYHDLLKIIKDKDFLDNEENEDILEDIVLTLTLFEDREMIEERLKTYAHLFDDKVMKQLKRRRYTGWGRLSRKLINGIRDKQSGKTILDFLKSDGFANRNFMQLIHDDSLTFKEDIQKAQVSGQGDSLHEHIANLAGSPAIKKGILQTVKVVDELVKVMGRHKPENIVIEMARENQTTQKGQKNSRERMKRIEEGIKELGSQILKEHPVENTQLQNEKLYLYYLQNGRDMYVDQELDINRLSDYDVDHIVPQSFLKDDSIDNKVLTRSDKARGKSDNVPSEEVVKKMKNYWRQLLNAKLITQRKFDNLTKAERGGLSELDKAGFIKRQLVETRQITKHVAQILDSRMNTKYDENDKLIREVKVITLKSKLVSDFRKDFQFYKVREINNYHHAHDAYLNAVVGTALIKKYPKLESEFVYGDYKVYDVRKMIAKSEQEIGKATAKYFFYSNIMNFFKTEITLANGEIRKRPLIETNGETGEIVWDKGRDFATVRKVLSMPQVNIVKKTEVQTGGFSKESILPKRNSDKLIARKKDWDPKKYGGFDSPTVAYSVLVVAKVEKGKSKKLKSVKELLGITIMERSSFEKNPIDFLEAKGYKEVKKDLIIKLPKYSLFELENGRKRMLASAGELQKGNELALPSKYVNFLYLASHYEKLKGSPEDNEQKQLFVEQHKHYLDEIIEQISEFSKRVILADANLDKVLSAYNKHRDKPIREQAENIIHLFTLTNLGAPAAFKYFDTTIDRKRYTSTKEVLDATLIHQSITGLYETRIDLSQLGGDGGGSSPAPGGTLQLEEEYRLFEPESTQKQEMDIWLKNFPQAWAETGGMGTAHCQAPVLIQLKATATPISIRQYPMPHEAYQGIKPHIRRMLDQGILKPCQSPWNTPLLPVKKPGTEDYRPVQDLREVNKRVEDIHPTVPNPYNLLSTLPPSHPWYTVLDLKDAFFCLRLHSESQLLFAFEWRDPEIGLSGQLTWTRLPQGFKNSPTLFNEALHSDLADFRVRYPALVLLQYVDDLLLAAATRTECLEGTKALLETLGNKGYRASAKKAQICLQEVTYLGYSLKDGQRWLTKARKEAILSIPVPKNSRQVREFLGKAGYCRLFIPGFAELAAPLYPLTRPGTLFQWGTEQQLAFEDIKKALLSSPALGLPDITKPFELFIDENSGFAKGVLVQKLGPWKRPVAYLSKKLDTVASGWPPCLRMVAAIAILVKDAGKLTLGQPLTILTSHPVEALVRQPPNKWLSNARMTHYQAMLLDAERVHFGPTVSLNPATLLPLPSGGNHHDCLQILAETHGTRPDLTDQPLPDADLTWYTDGSSFIRNGEREAGAAVTTESEVIWAAPLPPGTSAQRAELIALTQALKMAEGKKLTVYTDSRYAFATTHVHGEIYRRRGWLTSEGKEIKNKNEILALLEALFLPKRLSIIHCPGHQKGDSPQAKGNRLADDTAKKAATETHSSLTVLPAGKRTADGSEFEKRTADGSEFESPKKKAKVE

SEQ ID NO: 1246 - protein, 2089 aa, synthetic construct
MPAAKRVKLDGGDKKYSIGLDIGTNSVGWAVITDEYKVPSKKFKVLGNTDRHSIKKNLIGALLFDSGETAEATRLKRTARRRYTRRKNRICYLQEIFSNEMAKVDDSFFHRLEESFLVEEDKKHERHPIFGNIVDEVAYHEKYPTIYHLRKKLVDSTDKADLRLIYLALAHMIKFRGHFLIEGDLNPDNSDVDKLFIQLVQTYNQLFEENPINASGVDAKAILSARLSKSRRLENLIAQLPGEKKNGLFGNLIALSLGLTPNFKSNFDLAEDAKLQLSKDTYDDDLDNLLAQIGDQYADLFLAAKNLSDAILLSDILRVNTEITKAPLSASMIKRYDEHHQDLTLLKALVRQQLPEKYKEIFFDQSKNGYAGYIDGGASQEEFYKFIKPILEKMDGTEELLVKLNREDLLRKQRTFDNGSIPHQIHLGELHAILRRQEDFYPFLKDNREKIEKILTFRIPYYVGPLARGNSRFAWMTRKSEETITPWNFEEVVDKGASAQSFIERMTNFDKNLPNEKVLPKHSLLYEYFTVYNELTKVKYVTEGMRKPAFLSGEQKKAIVDLLFKTNRKVTVKQLKEDYFKKIECFDSVEISGVEDRFNASLGTYHDLLKIIKDKDFLDNEENEDILEDIVLTLTLFEDREMIEERLKTYAHLFDDKVMKQLKRRRYTGWGRLSRKLINGIRDKQSGKTILDFLKSDGFANRNFMQLIHDDSLTFKEDIQKAQVSGQGDSLHEHIANLAGSPAIKKGILQTVKVVDELVKVMGRHKPENIVIEMARENQTTQKGQKNSRERMKRIEEGIKELGSQILKEHPVENTQLQNEKLYLYYLQNGRDMYVDQELDINRLSDYDVDHIVPQSFLKDDSIDNKVLTRSDKARGKSDNVPSEEVVKKMKNYWRQLLNAKLITQRKFDNLTKAERGGLSELDKAGFIKRQLVETRQITKHVAQILDSRMNTKYDENDKLIREVKVITLKSKLVSDFRKDFQFYKVREINNYHHAHDAYLNAVVGTALIKKYPKLESEFVYGDYKVYDVRKMIAKSEQEIGKATAKYFFYSNIMNFFKTEITLANGEIRKRPLIETNGETGEIVWDKGRDFATVRKVLSMPQVNIVKKTEVQTGGFSKESILPKRNSDKLIARKKDWDPKKYGGFDSPTVAYSVLVVAKVEKGKSKKLKSVKELLGITIMERSSFEKNPIDFLEAKGYKEVKKDLIIKLPKYSLFELENGRKRMLASAGELQKGNELALPSKYVNFLYLASHYEKLKGSPEDNEQKQLFVEQHKHYLDEIIEQISEFSKRVILADANLDKVLSAYNKHRDKPIREQAENIIHLFTLTNLGAPAAFKYFDTTIDRKRYTSTKEVLDATLIHQSITGLYETRIDLSQLGGDGGPAPAPGGTLQLEEEYRLFEPESTQKQEMDIWLKNFPQAWAETGGMGTAHCQAPVLIQLKATATPISIRQYPMPHEAYQGIKPHIRRMLDQGILKPCQSPWNTPLLPVKKPGTEDYRPVQDLREVNKRVEDIHPTVPNPYNLLSTLPPSHPWYTVLDLKDAFFCLRLHSESQLLFAFEWRDPEIGLSGQLTWTRLPQGFKNSPTLFNEALHSDLADFRVRYPALVLLQYVDDLLLAAATRTECLEGTKALLETLGNKGYRASAKKAQICLQEVTYLGYSLKDGQRWLTKARKEAILSIPVPKNSRQVREFLGKAGYCRLFIPGFAELAAPLYPLTRPGTLFQWGTEQQLAFEDIKKALLSSPALGLPDITKPFELFIDENSGFAKGVLVQKLGPWKRPVAYLSKKLDTVASGWPPCLRMVAAIAILVKDAGKLTLGQPLTILTSHPVEALVRQPPNKWLSNARMTHYQAMLLDAERVHFGPTVSLNPATLLPLPSGGNHHDCLQILAETHGTRPDLTDQPLPDADLTWYTDGSSFIRNGEREAGAAVTTESEVIWAAPLPPGTSAQRAELIALTQALKMAEGKKLTVYTDSRYAFATTHVHGEIYRRRGWLTSEGKEIKNKNEILALLEALFLPKRLSIIHCPGHQKGDSPQAKGNRLADDTAKKAATETHSSLTVLPAGKRTADGSEFEKRTADGSEFESPKKKAKVE

SEQ ID NO: 1247 - protein, 2093 aa, synthetic construct
MPAAKRVKLDGGDKKYSIGLDIGTNSVGWAVITDEYKVPSKKFKVLGNTDRHSIKKNLIGALLFDSGETAEATRLKRTARRRYTRRKNRICYLQEIFSNEMAKVDDSFFHRLEESFLVEEDKKHERHPIFGNIVDEVAYHEKYPTIYHLRKKLVDSTDKADLRLIYLALAHMIKFRGHFLIEGDLNPDNSDVDKLFIQLVQTYNQLFEENPINASGVDAKAILSARLSKSRRLENLIAQLPGEKKNGLFGNLIALSLGLTPNFKSNFDLAEDAKLQLSKDTYDDDLDNLLAQIGDQYADLFLAAKNLSDAILLSDILRVNTEITKAPLSASMIKRYDEHHQDLTLLKALVRQQLPEKYKEIFFDQSKNGYAGYIDGGASQEEFYKFIKPILEKMDGTEELLVKLNREDLLRKQRTFDNGSIPHQIHLGELHAILRRQEDFYPFLKDNREKIEKILTFRIPYYVGPLARGNSRFAWMTRKSEETITPWNFEEVVDKGASAQSFIERMTNFDKNLPNEKVLPKHSLLYEYFTVYNELTKVKYVTEGMRKPAFLSGEQKKAIVDLLFKTNRKVTVKQLKEDYFKKIECFDSVEISGVEDRFNASLGTYHDLLKIIKDKDFLDNEENEDILEDIVLTLTLFEDREMIEERLKTYAHLFDDKVMKQLKRRRYTGWGRLSRKLINGIRDKQSGKTILDFLKSDGFANRNFMQLIHDDSLTFKEDIQKAQVSGQGDSLHEHIANLAGSPAIKKGILQTVKVVDELVKVMGRHKPENIVIEMARENQTTQKGQKNSRERMKRIEEGIKELGSQILKEHPVENTQLQNEKLYLYYLQNGRDMYVDQELDINRLSDYDVDHIVPQSFLKDDSIDNKVLTRSDKARGKSDNVPSEEVVKKMKNYWRQLLNAKLITQRKFDNLTKAERGGLSELDKAGFIKRQLVETRQITKHVAQILDSRMNTKYDENDKLIREVKVITLKSKLVSDFRKDFQFYKVREINNYHHAHDAYLNAVVGTALIKKYPKLESEFVYGDYKVYDVRKMIAKSEQEIGKATAKYFFYSNIMNFFKTEITLANGEIRKRPLIETNGETGEIVWDKGRDFATVRKVLSMPQVNIVKKTEVQTGGFSKESILPKRNSDKLIARKKDWDPKKYGGFDSPTVAYSVLVVAKVEKGKSKKLKSVKELLGITIMERSSFEKNPIDFLEAKGYKEVKKDLIIKLPKYSLFELENGRKRMLASAGELQKGNELALPSKYVNFLYLASHYEKLKGSPEDNEQKQLFVEQHKHYLDEIIEQISEFSKRVILADANLDKVLSAYNKHRDKPIREQAENIIHLFTLTNLGAPAAFKYFDTTIDRKRYTSTKEVLDATLIHQSITGLYETRIDLSQLGGDGGGGGGSSGGSGGTLQLEEEYRLFEPESTQKQEMDIWLKNFPQAWAETGGMGTAHCQAPVLIQLKATATPISIRQYPMPHEAYQGIKPHIRRMLDQGILKPCQSPWNTPLLPVKKPGTEDYRPVQDLREVNKRVEDIHPTVPNPYNLLSTLPPSHPWYTVLDLKDAFFCLRLHSESQLLFAFEWRDPEIGLSGQLTWTRLPQGFKNSPTLFNEALHSDLADFRVRYPALVLLQYVDDLLLAAATRTECLEGTKALLETLGNKGYRASAKKAQICLQEVTYLGYSLKDGQRWLTKARKEAILSIPVPKNSRQVREFLGKAGYCRLFIPGFAELAAPLYPLTRPGTLFQWGTEQQLAFEDIKKALLSSPALGLPDITKPFELFIDENSGFAKGVLVQKLGPWKRPVAYLSKKLDTVASGWPPCLRMVAAIAILVKDAGKLTLGQPLTILTSHPVEALVRQPPNKWLSNARMTHYQAMLLDAERVHFGPTVSLNPATLLPLPSGGNHHDCLQILAETHGTRPDLTDQPLPDADLTWYTDGSSFIRNGEREAGAAVTTESEVIWAAPLPPGTSAQRAELIALTQALKMAEGKKLTVYTDSRYAFATTHVHGEIYRRRGWLTSEGKEIKNKNEILALLEALFLPKRLSIIHCPGHQKGDSPQAKGNRLADDTAKKAATETHSSLTVLPAGKRTADGSEFEKRTADGSEFESPKKKAKVE

SEQ ID NO: 1248 - protein, 2090 aa, synthetic construct
MPAAKRVKLDGGDKKYSIGLDIGTNSVGWAVITDEYKVPSKKFKVLGNTDRHSIKKNLIGALLFDSGETAEATRLKRTARRRYTRRKNRICYLQEIFSNEMAKVDDSFFHRLEESFLVEEDKKHERHPIFGNIVDEVAYHEKYPTIYHLRKKLVDSTDKADLRLIYLALAHMIKFRGHFLIEGDLNPDNSDVDKLFIQLVQTYNQLFEENPINASGVDAKAILSARLSKSRRLENLIAQLPGEKKNGLFGNLIALSLGLTPNFKSNFDLAEDAKLQLSKDTYDDDLDNLLAQIGDQYADLFLAAKNLSDAILLSDILRVNTEITKAPLSASMIKRYDEHHQDLTLLKALVRQQLPEKYKEIFFDQSKNGYAGYIDGGASQEEFYKFIKPILEKMDGTEELLVKLNREDLLRKQRTFDNGSIPHQIHLGELHAILRRQEDFYPFLKDNREKIEKILTFRIPYYVGPLARGNSRFAWMTRKSEETITPWNFEEVVDKGASAQSFIERMTNFDKNLPNEKVLPKHSLLYEYFTVYNELTKVKYVTEGMRKPAFLSGEQKKAIVDLLFKTNRKVTVKQLKEDYFKKIECFDSVEISGVEDRFNASLGTYHDLLKIIKDKDFLDNEENEDILEDIVLTLTLFEDREMIEERLKTYAHLFDDKVMKQLKRRRYTGWGRLSRKLINGIRDKQSGKTILDFLKSDGFANRNFMQLIHDDSLTFKEDIQKAQVSGQGDSLHEHIANLAGSPAIKKGILQTVKVVDELVKVMGRHKPENIVIEMARENQTTQKGQKNSRERMKRIEEGIKELGSQILKEHPVENTQLQNEKLYLYYLQNGRDMYVDQELDINRLSDYDVDHIVPQSFLKDDSIDNKVLTRSDKARGKSDNVPSEEVVKKMKNYWRQLLNAKLITQRKFDNLTKAERGGLSELDKAGFIKRQLVETRQITKHVAQILDSRMNTKYDENDKLIREVKVITLKSKLVSDFRKDFQFYKVREINNYHHAHDAYLNAVVGTALIKKYPKLESEFVYGDYKVYDVRKMIAKSEQEIGKATAKYFFYSNIMNFFKTEITLANGEIRKRPLIETNGETGEIVWDKGRDFATVRKVLSMPQVNIVKKTEVQTGGFSKESILPKRNSDKLIARKKDWDPKKYGGFDSPTVAYSVLVVAKVEKGKSKKLKSVKELLGITIMERSSFEKNPIDFLEAKGYKEVKKDLIIKLPKYSLFELENGRKRMLASAGELQKGNELALPSKYVNFLYLASHYEKLKGSPEDNEQKQLFVEQHKHYLDEIIEQISEFSKRVILADANLDKVLSAYNKHRDKPIREQAENIIHLFTLTNLGAPAAFKYFDTTIDRKRYTSTKEVLDATLIHQSITGLYETRIDLSQLGGDGGPAPGGGGGTLQLEEEYRLFEPESTQKQEMDIWLKNFPQAWAETGGMGTAHCQAPVLIQLKATATPISIRQYPMPHEAYQGIKPHIRRMLDQGILKPCQSPWNTPLLPVKKPGTEDYRPVQDLREVNKRVEDIHPTVPNPYNLLSTLPPSHPWYTVLDLKDAFFCLRLHSESQLLFAFEWRDPEIGLSGQLTWTRLPQGFKNSPTLFNEALHSDLADFRVRYPALVLLQYVDDLLLAAATRTECLEGTKALLETLGNKGYRASAKKAQICLQEVTYLGYSLKDGQRWLTKARKEAILSIPVPKNSRQVREFLGKAGYCRLFIPGFAELAAPLYPLTRPGTLFQWGTEQQLAFEDIKKALLSSPALGLPDITKPFELFIDENSGFAKGVLVQKLGPWKRPVAYLSKKLDTVASGWPPCLRMVAAIAILVKDAGKLTLGQPLTILTSHPVEALVRQPPNKWLSNARMTHYQAMLLDAERVHFGPTVSLNPATLLPLPSGGNHHDCLQILAETHGTRPDLTDQPLPDADLTWYTDGSSFIRNGEREAGAAVTTESEVIWAAPLPPGTSAQRAELIALTQALKMAEGKKLTVYTDSRYAFATTHVHGEIYRRRGWLTSEGKEIKNKNEILALLEALFLPKRLSIIHCPGHQKGDSPQAKGNRLADDTAKKAATETHSSLTVLPAGKRTADGSEFEKRTADGSEFESPKKKAKVE

SEQ ID NO: 1249 - protein, 2090 aa, synthetic construct
MPAAKRVKLDGGDKKYSIGLDIGTNSVGWAVITDEYKVPSKKFKVLGNTDRHSIKKNLIGALLFDSGETAEATRLKRTARRRYTRRKNRICYLQEIFSNEMAKVDDSFFHRLEESFLVEEDKKHERHPIFGNIVDEVAYHEKYPTIYHLRKKLVDSTDKADLRLIYLALAHMIKFRGHFLIEGDLNPDNSDVDKLFIQLVQTYNQLFEENPINASGVDAKAILSARLSKSRRLENLIAQLPGEKKNGLFGNLIALSLGLTPNFKSNFDLAEDAKLQLSKDTYDDDLDNLLAQIGDQYADLFLAAKNLSDAILLSDILRVNTEITKAPLSASMIKRYDEHHQDLTLLKALVRQQLPEKYKEIFFDQSKNGYAGYIDGGASQEEFYKFIKPILEKMDGTEELLVKLNREDLLRKQRTFDNGSIPHQIHLGELHAILRRQEDFYPFLKDNREKIEKILTFRIPYYVGPLARGNSRFAWMTRKSEETITPWNFEEVVDKGASAQSFIERMTNFDKNLPNEKVLPKHSLLYEYFTVYNELTKVKYVTEGMRKPAFLSGEQKKAIVDLLFKTNRKVTVKQLKEDYFKKIECFDSVEISGVEDRFNASLGTYHDLLKIIKDKDFLDNEENEDILEDIVLTLTLFEDREMIEERLKTYAHLFDDKVMKQLKRRRYTGWGRLSRKLINGIRDKQSGKTILDFLKSDGFANRNFMQLIHDDSLTFKEDIQKAQVSGQGDSLHEHIANLAGSPAIKKGILQTVKVVDELVKVMGRHKPENIVIEMARENQTTQKGQKNSRERMKRIEEGIKELGSQILKEHPVENTQLQNEKLYLYYLQNGRDMYVDQELDINRLSDYDVDHIVPQSFLKDDSIDNKVLTRSDKARGKSDNVPSEEVVKKMKNYWRQLLNAKLITQRKFDNLTKAERGGLSELDKAGFIKRQLVETRQITKHVAQILDSRMNTKYDENDKLIREVKVITLKSKLVSDFRKDFQFYKVREINNYHHAHDAYLNAVVGTALIKKYPKLESEFVYGDYKVYDVRKMIAKSEQEIGKATAKYFFYSNIMNFFKTEITLANGEIRKRPLIETNGETGEIVWDKGRDFATVRKVLSMPQVNIVKKTEVQTGGFSKESILPKRNSDKLIARKKDWDPKKYGGFDSPTVAYSVLVVAKVEKGKSKKLKSVKELLGITIMERSSFEKNPIDFLEAKGYKEVKKDLIIKLPKYSLFELENGRKRMLASAGELQKGNELALPSKYVNFLYLASHYEKLKGSPEDNEQKQLFVEQHKHYLDEIIEQISEFSKRVILADANLDKVLSAYNKHRDKPIREQAENIIHLFTLTNLGAPAAFKYFDTTIDRKRYTSTKEVLDATLIHQSITGLYETRIDLSQLGGDGGGSSGGGGGTLQLEEEYRLFEPESTQKQEMDIWLKNFPQAWAETGGMGTAHCQAPVLIQLKATATPISIRQYPMPHEAYQGIKPHIRRMLDQGILKPCQSPWNTPLLPVKKPGTEDYRPVQDLREVNKRVEDIHPTVPNPYNLLSTLPPSHPWYTVLDLKDAFFCLRLHSESQLLFAFEWRDPEIGLSGQLTWTRLPQGFKNSPTLFNEALHSDLADFRVRYPALVLLQYVDDLLLAAATRTECLEGTKALLETLGNKGYRASAKKAQICLQEVTYLGYSLKDGQRWLTKARKEAILSIPVPKNSRQVREFLGKAGYCRLFIPGFAELAAPLYPLTRPGTLFQWGTEQQLAFEDIKKALLSSPALGLPDITKPFELFIDENSGFAKGVLVQKLGPWKRPVAYLSKKLDTVASGWPPCLRMVAAIAILVKDAGKLTLGQPLTILTSHPVEALVRQPPNKWLSNARMTHYQAMLLDAERVHFGPTVSLNPATLLPLPSGGNHHDCLQILAETHGTRPDLTDQPLPDADLTWYTDGSSFIRNGEREAGAAVTTESEVIWAAPLPPGTSAQRAELIALTQALKMAEGKKLTVYTDSRYAFATTHVHGEIYRRRGWLTSEGKEIKNKNEILALLEALFLPKRLSIIHCPGHQKGDSPQAKGNRLADDTAKKAATETHSSLTVLPAGKRTADGSEFEKRTADGSEFESPKKKAKVE

SEQ ID NO: 1250 - protein, 2090 aa, synthetic construct
MPAAKRVKLDGGDKKYSIGLDIGTNSVGWAVITDEYKVPSKKFKVLGNTDRHSIKKNLIGALLFDSGETAEATRLKRTARRRYTRRKNRICYLQEIFSNEMAKVDDSFFHRLEESFLVEEDKKHERHPIFGNIVDEVAYHEKYPTIYHLRKKLVDSTDKADLRLIYLALAHMIKFRGHFLIEGDLNPDNSDVDKLFIQLVQTYNQLFEENPINASGVDAKAILSARLSKSRRLENLIAQLPGEKKNGLFGNLIALSLGLTPNFKSNFDLAEDAKLQLSKDTYDDDLDNLLAQIGDQYADLFLAAKNLSDAILLSDILRVNTEITKAPLSASMIKRYDEHHQDLTLLKALVRQQLPEKYKEIFFDQSKNGYAGYIDGGASQEEFYKFIKPILEKMDGTEELLVKLNREDLLRKQRTFDNGSIPHQIHLGELHAILRRQEDFYPFLKDNREKIEKILTFRIPYYVGPLARGNSRFAWMTRKSEETITPWNFEEVVDKGASAQSFIERMTNFDKNLPNEKVLPKHSLLYEYFTVYNELTKVKYVTEGMRKPAFLSGEQKKAIVDLLFKTNRKVTVKQLKEDYFKKIECFDSVEISGVEDRFNASLGTYHDLLKIIKDKDFLDNEENEDILEDIVLTLTLFEDREMIEERLKTYAHLFDDKVMKQLKRRRYTGWGRLSRKLINGIRDKQSGKTILDFLKSDGFANRNFMQLIHDDSLTFKEDIQKAQVSGQGDSLHEHIANLAGSPAIKKGILQTVKVVDELVKVMGRHKPENIVIEMARENQTTQKGQKNSRERMKRIEEGIKELGSQILKEHPVENTQLQNEKLYLYYLQNGRDMYVDQELDINRLSDYDVDHIVPQSFLKDDSIDNKVLTRSDKARGKSDNVPSEEVVKKMKNYWRQLLNAKLITQRKFDNLTKAERGGLSELDKAGFIKRQLVETRQITKHVAQILDSRMNTKYDENDKLIREVKVITLKSKLVSDFRKDFQFYKVREINNYHHAHDAYLNAVVGTALIKKYPKLESEFVYGDYKVYDVRKMIAKSEQEIGKATAKYFFYSNIMNFFKTEITLANGEIRKRPLIETNGETGEIVWDKGRDFATVRKVLSMPQVNIVKKTEVQTGGFSKESILPKRNSDKLIARKKDWDPKKYGGFDSPTVAYSVLVVAKVEKGKSKKLKSVKELLGITIMERSSFEKNPIDFLEAKGYKEVKKDLIIKLPKYSLFELENGRKRMLASAGELQKGNELALPSKYVNFLYLASHYEKLKGSPEDNEQKQLFVEQHKHYLDEIIEQISEFSKRVILADANLDKVLSAYNKHRDKPIREQAENIIHLFTLTNLGAPAAFKYFDTTIDRKRYTSTKEVLDATLIHQSITGLYETRIDLSQLGGDGGGSSGSSGGTLQLEEEYRLFEPESTQKQEMDIWLKNFPQAWAETGGMGTAHCQAPVLIQLKATATPISIRQYPMPHEAYQGIKPHIRRMLDQGILKPCQSPWNTPLLPVKKPGTEDYRPVQDLREVNKRVEDIHPTVPNPYNLLSTLPPSHPWYTVLDLKDAFFCLRLHSESQLLFAFEWRDPEIGLSGQLTWTRLPQGFKNSPTLFNEALHSDLADFRVRYPALVLLQYVDDLLLAAATRTECLEGTKALLETLGNKGYRASAKKAQICLQEVTYLGYSLKDGQRWLTKARKEAILSIPVPKNSRQVREFLGKAGYCRLFIPGFAELAAPLYPLTRPGTLFQWGTEQQLAFEDIKKALLSSPALGLPDITKPFELFIDENSGFAKGVLVQKLGPWKRPVAYLSKKLDTVASGWPPCLRMVAAIAILVKDAGKLTLGQPLTILTSHPVEALVRQPPNKWLSNARMTHYQAMLLDAERVHFGPTVSLNPATLLPLPSGGNHHDCLQILAETHGTRPDLTDQPLPDADLTWYTDGSSFIRNGEREAGAAVTTESEVIWAAPLPPGTSAQRAELIALTQALKMAEGKKLTVYTDSRYAFATTHVHGEIYRRRGWLTSEGKEIKNKNEILALLEALFLPKRLSIIHCPGHQKGDSPQAKGNRLADDTAKKAATETHSSLTVLPAGKRTADGSEFEKRTADGSEFESPKKKAKVE

SEQ ID NO: 1251 - protein, 2088 aa, synthetic construct
MPAAKRVKLDGGDKKYSIGLDIGTNSVGWAVITDEYKVPSKKFKVLGNTDRHSIKKNLIGALLFDSGETAEATRLKRTARRRYTRRKNRICYLQEIFSNEMAKVDDSFFHRLEESFLVEEDKKHERHPIFGNIVDEVAYHEKYPTIYHLRKKLVDSTDKADLRLIYLALAHMIKFRGHFLIEGDLNPDNSDVDKLFIQLVQTYNQLFEENPINASGVDAKAILSARLSKSRRLENLIAQLPGEKKNGLFGNLIALSLGLTPNFKSNFDLAEDAKLQLSKDTYDDDLDNLLAQIGDQYADLFLAAKNLSDAILLSDILRVNTEITKAPLSASMIKRYDEHHQDLTLLKALVRQQLPEKYKEIFFDQSKNGYAGYIDGGASQEEFYKFIKPILEKMDGTEELLVKLNREDLLRKQRTFDNGSIPHQIHLGELHAILRRQEDFYPFLKDNREKIEKILTFRIPYYVGPLARGNSRFAWMTRKSEETITPWNFEEVVDKGASAQSFIERMTNFDKNLPNEKVLPKHSLLYEYFTVYNELTKVKYVTEGMRKPAFLSGEQKKAIVDLLFKTNRKVTVKQLKEDYFKKIECFDSVEISGVEDRFNASLGTYHDLLKIIKDKDFLDNEENEDILEDIVLTLTLFEDREMIEERLKTYAHLFDDKVMKQLKRRRYTGWGRLSRKLINGIRDKQSGKTILDFLKSDGFANRNFMQLIHDDSLTFKEDIQKAQVSGQGDSLHEHIANLAGSPAIKKGILQTVKVVDELVKVMGRHKPENIVIEMARENQTTQKGQKNSRERMKRIEEGIKELGSQILKEHPVENTQLQNEKLYLYYLQNGRDMYVDQELDINRLSDYDVDHIVPQSFLKDDSIDNKVLTRSDKARGKSDNVPSEEVVKKMKNYWRQLLNAKLITQRKFDNLTKAERGGLSELDKAGFIKRQLVETRQITKHVAQILDSRMNTKYDENDKLIREVKVITLKSKLVSDFRKDFQFYKVREINNYHHAHDAYLNAVVGTALIKKYPKLESEFVYGDYKVYDVRKMIAKSEQEIGKATAKYFFYSNIMNFFKTEITLANGEIRKRPLIETNGETGEIVWDKGRDFATVRKVLSMPQVNIVKKTEVQTGGFSKESILPKRNSDKLIARKKDWDPKKYGGFDSPTVAYSVLVVAKVEKGKSKKLKSVKELLGITIMERSSFEKNPIDFLEAKGYKEVKKDLIIKLPKYSLFELENGRKRMLASAGELQKGNELALPSKYVNFLYLASHYEKLKGSPEDNEQKQLFVEQHKHYLDEIIEQISEFSKRVILADANLDKVLSAYNKHRDKPIREQAENIIHLFTLTNLGAPAAFKYFDTTIDRKRYTSTKEVLDATLIHQSITGLYETRIDLSQLGGDGGGGGGGGTLQLEEEYRLFEPESTQKQEMDIWLKNFPQAWAETGGMGTAHCQAPVLIQLKATATPISIRQYPMPHEAYQGIKPHIRRMLDQGILKPCQSPWNTPLLPVKKPGTEDYRPVQDLREVNKRVEDIHPTVPNPYNLLSTLPPSHPWYTVLDLKDAFFCLRLHSESQLLFAFEWRDPEIGLSGQLTWTRLPQGFKNSPTLFNEALHSDLADFRVRYPALVLLQYVDDLLLAAATRTECLEGTKALLETLGNKGYRASAKKAQICLQEVTYLGYSLKDGQRWLTKARKEAILSIPVPKNSRQVREFLGKAGYCRLFIPGFAELAAPLYPLTRPGTLFQWGTEQQLAFEDIKKALLSSPALGLPDITKPFELFIDENSGFAKGVLVQKLGPWKRPVAYLSKKLDTVASGWPPCLRMVAAIAILVKDAGKLTLGQPLTILTSHPVEALVRQPPNKWLSNARMTHYQAMLLDAERVHFGPTVSLNPATLLPLPSGGNHHDCLQILAETHGTRPDLTDQPLPDADLTWYTDGSSFIRNGEREAGAAVTTESEVIWAAPLPPGTSAQRAELIALTQALKMAEGKKLTVYTDSRYAFATTHVHGEIYRRRGWLTSEGKEIKNKNEILALLEALFLPKRLSIIHCPGHQKGDSPQAKGNRLADDTAKKAATETHSSLTVLPAGKRTADGSEFEKRTADGSEFESPKKKAKVE

SEQ ID NO: 1252 - protein, 2090 aa, synthetic construct
MPAAKRVKLDGGDKKYSIGLDIGTNSVGWAVITDEYKVPSKKFKVLGNTDRHSIKKNLIGALLFDSGETAEATRLKRTARRRYTRRKNRICYLQEIFSNEMAKVDDSFFHRLEESFLVEEDKKHERHPIFGNIVDEVAYHEKYPTIYHLRKKLVDSTDKADLRLIYLALAHMIKFRGHFLIEGDLNPDNSDVDKLFIQLVQTYNQLFEENPINASGVDAKAILSARLSKSRRLENLIAQLPGEKKNGLFGNLIALSLGLTPNFKSNFDLAEDAKLQLSKDTYDDDLDNLLAQIGDQYADLFLAAKNLSDAILLSDILRVNTEITKAPLSASMIKRYDEHHQDLTLLKALVRQQLPEKYKEIFFDQSKNGYAGYIDGGASQEEFYKFIKPILEKMDGTEELLVKLNREDLLRKQRTFDNGSIPHQIHLGELHAILRRQEDFYPFLKDNREKIEKILTFRIPYYVGPLARGNSRFAWMTRKSEETITPWNFEEVVDKGASAQSFIERMTNFDKNLPNEKVLPKHSLLYEYFTVYNELTKVKYVTEGMRKPAFLSGEQKKAIVDLLFKTNRKVTVKQLKEDYFKKIECFDSVEISGVEDRFNASLGTYHDLLKIIKDKDFLDNEENEDILEDIVLTLTLFEDREMIEERLKTYAHLFDDKVMKQLKRRRYTGWGRLSRKLINGIRDKQSGKTILDFLKSDGFANRNFMQLIHDDSLTFKEDIQKAQVSGQGDSLHEHIANLAGSPAIKKGILQTVKVVDELVKVMGRHKPENIVIEMARENQTTQKGQKNSRERMKRIEEGIKELGSQILKEHPVENTQLQNEKLYLYYLQNGRDMYVDQELDINRLSDYDVDHIVPQSFLKDDSIDNKVLTRSDKARGKSDNVPSEEVVKKMKNYWRQLLNAKLITQRKFDNLTKAERGGLSELDKAGFIKRQLVETRQITKHVAQILDSRMNTKYDENDKLIREVKVITLKSKLVSDFRKDFQFYKVREINNYHHAHDAYLNAVVGTALIKKYPKLESEFVYGDYKVYDVRKMIAKSEQEIGKATAKYFFYSNIMNFFKTEITLANGEIRKRPLIETNGETGEIVWDKGRDFATVRKVLSMPQVNIVKKTEVQTGGFSKESILPKRNSDKLIARKKDWDPKKYGGFDSPTVAYSVLVVAKVEKGKSKKLKSVKELLGITIMERSSFEKNPIDFLEAKGYKEVKKDLIIKLPKYSLFELENGRKRMLASAGELQKGNELALPSKYVNFLYLASHYEKLKGSPEDNEQKQLFVEQHKHYLDEIIEQISEFSKRVILADANLDKVLSAYNKHRDKPIREQAENIIHLFTLTNLGAPAAFKYFDTTIDRKRYTSTKEVLDATLIHQSITGLYETRIDLSQLGGDGGPAPGSSGGTLQLEEEYRLFEPESTQKQEMDIWLKNFPQAWAETGGMGTAHCQAPVLIQLKATATPISIRQYPMPHEAYQGIKPHIRRMLDQGILKPCQSPWNTPLLPVKKPGTEDYRPVQDLREVNKRVEDIHPTVPNPYNLLSTLPPSHPWYTVLDLKDAFFCLRLHSESQLLFAFEWRDPEIGLSGQLTWTRLPQGFKNSPTLFNEALHSDLADFRVRYPALVLLQYVDDLLLAAATRTECLEGTKALLETLGNKGYRASAKKAQICLQEVTYLGYSLKDGQRWLTKARKEAILSIPVPKNSRQVREFLGKAGYCRLFIPGFAELAAPLYPLTRPGTLFQWGTEQQLAFEDIKKALLSSPALGLPDITKPFELFIDENSGFAKGVLVQKLGPWKRPVAYLSKKLDTVASGWPPCLRMVAAIAILVKDAGKLTLGQPLTILTSHPVEALVRQPPNKWLSNARMTHYQAMLLDAERVHFGPTVSLNPATLLPLPSGGNHHDCLQILAETHGTRPDLTDQPLPDADLTWYTDGSSFIRNGEREAGAAVTTESEVIWAAPLPPGTSAQRAELIALTQALKMAEGKKLTVYTDSRYAFATTHVHGEIYRRRGWLTSEGKEIKNKNEILALLEALFLPKRLSIIHCPGHQKGDSPQAKGNRLADDTAKKAATETHSSLTVLPAGKRTADGSEFEKRTADGSEFESPKKKAKVE

SEQ ID NO: 1253 - protein, 2095 aa, synthetic construct
MPAAKRVKLDGGDKKYSIGLDIGTNSVGWAVITDEYKVPSKKFKVLGNTDRHSIKKNLIGALLFDSGETAEATRLKRTARRRYTRRKNRICYLQEIFSNEMAKVDDSFFHRLEESFLVEEDKKHERHPIFGNIVDEVAYHEKYPTIYHLRKKLVDSTDKADLRLIYLALAHMIKFRGHFLIEGDLNPDNSDVDKLFIQLVQTYNQLFEENPINASGVDAKAILSARLSKSRRLENLIAQLPGEKKNGLFGNLIALSLGLTPNFKSNFDLAEDAKLQLSKDTYDDDLDNLLAQIGDQYADLFLAAKNLSDAILLSDILRVNTEITKAPLSASMIKRYDEHHQDLTLLKALVRQQLPEKYKEIFFDQSKNGYAGYIDGGASQEEFYKFIKPILEKMDGTEELLVKLNREDLLRKQRTFDNGSIPHQIHLGELHAILRRQEDFYPFLKDNREKIEKILTFRIPYYVGPLARGNSRFAWMTRKSEETITPWNFEEVVDKGASAQSFIERMTNFDKNLPNEKVLPKHSLLYEYFTVYNELTKVKYVTEGMRKPAFLSGEQKKAIVDLLFKTNRKVTVKQLKEDYFKKIECFDSVEISGVEDRFNASLGTYHDLLKIIKDKDFLDNEENEDILEDIVLTLTLFEDREMIEERLKTYAHLFDDKVMKQLKRRRYTGWGRLSRKLINGIRDKQSGKTILDFLKSDGFANRNFMQLIHDDSLTFKEDIQKAQVSGQGDSLHEHIANLAGSPAIKKGILQTVKVVDELVKVMGRHKPENIVIEMARENQTTQKGQKNSRERMKRIEEGIKELGSQILKEHPVENTQLQNEKLYLYYLQNGRDMYVDQELDINRLSDYDVDHIVPQSFLKDDSIDNKVLTRSDKARGKSDNVPSEEVVKKMKNYWRQLLNAKLITQRKFDNLTKAERGGLSELDKAGFIKRQLVETRQITKHVAQILDSRMNTKYDENDKLIREVKVITLKSKLVSDFRKDFQFYKVREINNYHHAHDAYLNAVVGTALIKKYPKLESEFVYGDYKVYDVRKMIAKSEQEIGKATAKYFFYSNIMNFFKTEITLANGEIRKRPLIETNGETGEIVWDKGRDFATVRKVLSMPQVNIVKKTEVQTGGFSKESILPKRNSDKLIARKKDWDPKKYGGFDSPTVAYSVLVVAKVEKGKSKKLKSVKELLGITIMERSSFEKNPIDFLEAKGYKEVKKDLIIKLPKYSLFELENGRKRMLASAGELQKGNELALPSKYVNFLYLASHYEKLKGSPEDNEQKQLFVEQHKHYLDEIIEQISEFSKRVILADANLDKVLSAYNKHRDKPIREQAENIIHLFTLTNLGAPAAFKYFDTTIDRKRYTSTKEVLDATLIHQSITGLYETRIDLSQLGGDGGEAAAKGGGPAPGGTLQLEEEYRLFEPESTQKQEMDIWLKNFPQAWAETGGMGTAHCQAPVLIQLKATATPISIRQYPMPHEAYQGIKPHIRRMLDQGILKPCQSPWNTPLLPVKKPGTEDYRPVQDLREVNKRVEDIHPTVPNPYNLLSTLPPSHPWYTVLDLKDAFFCLRLHSESQLLFAFEWRDPEIGLSGQLTWTRLPQGFKNSPTLFNEALHSDLADFRVRYPALVLLQYVDDLLLAAATRTECLEGTKALLETLGNKGYRASAKKAQICLQEVTYLGYSLKDGQRWLTKARKEAILSIPVPKNSRQVREFLGKAGYCRLFIPGFAELAAPLYPLTRPGTLFQWGTEQQLAFEDIKKALLSSPALGLPDITKPFELFIDENSGFAKGVLVQKLGPWKRPVAYLSKKLDTVASGWPPCLRMVAAIAILVKDAGKLTLGQPLTILTSHPVEALVRQPPNKWLSNARMTHYQAMLLDAERVHFGPTVSLNPATLLPLPSGGNHHDCLQILAETHGTRPDLTDQPLPDADLTWYTDGSSFIRNGEREAGAAVTTESEVIWAAPLPPGTSAQRAELIALTQALKMAEGKKLTVYTDSRYAFATTHVHGEIYRRRGWLTSEGKEIKNKNEILALLEALFLPKRLSIIHCPGHQKGDSPQAKGNRLADDTAKKAATETHSSLTVLPAGKRTADGSEFEKRTADGSEFESPKKKAKVE

SEQ ID NO: 1254 - protein, 2095 aa, synthetic construct
MPAAKRVKLDGGDKKYSIGLDIGTNSVGWAVITDEYKVPSKKFKVLGNTDRHSIKKNLIGALLFDSGETAEATRLKRTARRRYTRRKNRICYLQEIFSNEMAKVDDSFFHRLEESFLVEEDKKHERHPIFGNIVDEVAYHEKYPTIYHLRKKLVDSTDKADLRLIYLALAHMIKFRGHFLIEGDLNPDNSDVDKLFIQLVQTYNQLFEENPINASGVDAKAILSARLSKSRRLENLIAQLPGEKKNGLFGNLIALSLGLTPNFKSNFDLAEDAKLQLSKDTYDDDLDNLLAQIGDQYADLFLAAKNLSDAILLSDILRVNTEITKAPLSASMIKRYDEHHQDLTLLKALVRQQLPEKYKEIFFDQSKNGYAGYIDGGASQEEFYKFIKPILEKMDGTEELLVKLNREDLLRKQRTFDNGSIPHQIHLGELHAILRRQEDFYPFLKDNREKIEKILTFRIPYYVGPLARGNSRFAWMTRKSEETITPWNFEEVVDKGASAQSFIERMTNFDKNLPNEKVLPKHSLLYEYFTVYNELTKVKYVTEGMRKPAFLSGEQKKAIVDLLFKTNRKVTVKQLKEDYFKKIECFDSVEISGVEDRFNASLGTYHDLLKIIKDKDFLDNEENEDILEDIVLTLTLFEDREMIEERLKTYAHLFDDKVMKQLKRRRYTGWGRLSRKLINGIRDKQSGKTILDFLKSDGFANRNFMQLIHDDSLTFKEDIQKAQVSGQGDSLHEHIANLAGSPAIKKGILQTVKVVDELVKVMGRHKPENIVIEMARENQTTQKGQKNSRERMKRIEEGIKELGSQILKEHPVENTQLQNEKLYLYYLQNGRDMYVDQELDINRLSDYDVDHIVPQSFLKDDSIDNKVLTRSDKARGKSDNVPSEEVVKKMKNYWRQLLNAKLITQRKFDNLTKAERGGLSELDKAGFIKRQLVETRQITKHVAQILDSRMNTKYDENDKLIREVKVITLKSKLVSDFRKDFQFYKVREINNYHHAHDAYLNAVVGTALIKKYPKLESEFVYGDYKVYDVRKMIAKSEQEIGKATAKYFFYSNIMNFFKTEITLANGEIRKRPLIETNGETGEIVWDKGRDFATVRKVLSMPQVNIVKKTEVQTGGFSKESILPKRNSDKLIARKKDWDPKKYGGFDSPTVAYSVLVVAKVEKGKSKKLKSVKELLGITIMERSSFEKNPIDFLEAKGYKEVKKDLIIKLPKYSLFELENGRKRMLASAGELQKGNELALPSKYVNFLYLASHYEKLKGSPEDNEQKQLFVEQHKHYLDEIIEQISEFSKRVILADANLDKVLSAYNKHRDKPIREQAENIIHLFTLTNLGAPAAFKYFDTTIDRKRYTSTKEVLDATLIHQSITGLYETRIDLSQLGGDGGEAAAKPAPGGSGGTLQLEEEYRLFEPESTQKQEMDIWLKNFPQAWAETGGMGTAHCQAPVLIQLKATATPISIRQYPMPHEAYQGIKPHIRRMLDQGILKPCQSPWNTPLLPVKKPGTEDYRPVQDLREVNKRVEDIHPTVPNPYNLLSTLPPSHPWYTVLDLKDAFFCLRLHSESQLLFAFEWRDPEIGLSGQLTWTRLPQGFKNSPTLFNEALHSDLADFRVRYPALVLLQYVDDLLLAAATRTECLEGTKALLETLGNKGYRASAKKAQICLQEVTYLGYSLKDGQRWLTKARKEAILSIPVPKNSRQVREFLGKAGYCRLFIPGFAELAAPLYPLTRPGTLFQWGTEQQLAFEDIKKALLSSPALGLPDITKPFELFIDENSGFAKGVLVQKLGPWKRPVAYLSKKLDTVASGWPPCLRMVAAIAILVKDAGKLTLGQPLTILTSHPVEALVRQPPNKWLSNARMTHYQAMLLDAERVHFGPTVSLNPATLLPLPSGGNHHDCLQILAETHGTRPDLTDQPLPDADLTWYTDGSSFIRNGEREAGAAVTTESEVIWAAPLPPGTSAQRAELIALTQALKMAEGKKLTVYTDSRYAFATTHVHGEIYRRRGWLTSEGKEIKNKNEILALLEALFLPKRLSIIHCPGHQKGDSPQAKGNRLADDTAKKAATETHSSLTVLPAGKRTADGSEFEKRTADGSEFESPKKKAKVE

SEQ ID NO: 1255 - protein, 2093 aa, synthetic construct
MPAAKRVKLDGGDKKYSIGLDIGTNSVGWAVITDEYKVPSKKFKVLGNTDRHSIKKNLIGALLFDSGETAEATRLKRTARRRYTRRKNRICYLQEIFSNEMAKVDDSFFHRLEESFLVEEDKKHERHPIFGNIVDEVAYHEKYPTIYHLRKKLVDSTDKADLRLIYLALAHMIKFRGHFLIEGDLNPDNSDVDKLFIQLVQTYNQLFEENPINASGVDAKAILSARLSKSRRLENLIAQLPGEKKNGLFGNLIALSLGLTPNFKSNFDLAEDAKLQLSKDTYDDDLDNLLAQIGDQYADLFLAAKNLSDAILLSDILRVNTEITKAPLSASMIKRYDEHHQDLTLLKALVRQQLPEKYKEIFFDQSKNGYAGYIDGGASQEEFYKFIKPILEKMDGTEELLVKLNREDLLRKQRTFDNGSIPHQIHLGELHAILRRQEDFYPFLKDNREKIEKILTFRIPYYVGPLARGNSRFAWMTRKSEETITPWNFEEVVDKGASAQSFIERMTNFDKNLPNEKVLPKHSLLYEYFTVYNELTKVKYVTEGMRKPAFLSGEQKKAIVDLLFKTNRKVTVKQLKEDYFKKIECFDSVEISGVEDRFNASLGTYHDLLKIIKDKDFLDNEENEDILEDIVLTLTLFEDREMIEERLKTYAHLFDDKVMKQLKRRRYTGWGRLSRKLINGIRDKQSGKTILDFLKSDGFANRNFMQLIHDDSLTFKEDIQKAQVSGQGDSLHEHIANLAGSPAIKKGILQTVKVVDELVKVMGRHKPENIVIEMARENQTTQKGQKNSRERMKRIEEGIKELGSQILKEHPVENTQLQNEKLYLYYLQNGRDMYVDQELDINRLSDYDVDHIVPQSFLKDDSIDNKVLTRSDKARGKSDNVPSEEVVKKMKNYWRQLLNAKLITQRKFDNLTKAERGGLSELDKAGFIKRQLVETRQITKHVAQILDSRMNTKYDENDKLIREVKVITLKSKLVSDFRKDFQFYKVREINNYHHAHDAYLNAVVGTALIKKYPKLESEFVYGDYKVYDVRKMIAKSEQEIGKATAKYFFYSNIMNFFKTEITLANGEIRKRPLIETNGETGEIVWDKGRDFATVRKVLSMPQVNIVKKTEVQTGGFSKESILPKRNSDKLIARKKDWDPKKYGGFDSPTVAYSVLVVAKVEKGKSKKLKSVKELLGITIMERSSFEKNPIDFLEAKGYKEVKKDLIIKLPKYSLFELENGRKRMLASAGELQKGNELALPSKYVNFLYLASHYEKLKGSPEDNEQKQLFVEQHKHYLDEIIEQISEFSKRVILADANLDKVLSAYNKHRDKPIREQAENIIHLFTLTNLGAPAAFKYFDTTIDRKRYTSTKEVLDATLIHQSITGLYETRIDLSQLGGDGGGSSGSSGSSGGTLQLEEEYRLFEPESTQKQEMDIWLKNFPQAWAETGGMGTAHCQAPVLIQLKATATPISIRQYPMPHEAYQGIKPHIRRMLDQGILKPCQSPWNTPLLPVKKPGTEDYRPVQDLREVNKRVEDIHPTVPNPYNLLSTLPPSHPWYTVLDLKDAFFCLRLHSESQLLFAFEWRDPEIGLSGQLTWTRLPQGFKNSPTLFNEALHSDLADFRVRYPALVLLQYVDDLLLAAATRTECLEGTKALLETLGNKGYRASAKKAQICLQEVTYLGYSLKDGQRWLTKARKEAILSIPVPKNSRQVREFLGKAGYCRLFIPGFAELAAPLYPLTRPGTLFQWGTEQQLAFEDIKKALLSSPALGLPDITKPFELFIDENSGFAKGVLVQKLGPWKRPVAYLSKKLDTVASGWPPCLRMVAAIAILVKDAGKLTLGQPLTILTSHPVEALVRQPPNKWLSNARMTHYQAMLLDAERVHFGPTVSLNPATLLPLPSGGNHHDCLQILAETHGTRPDLTDQPLPDADLTWYTDGSSFIRNGEREAGAAVTTESEVIWAAPLPPGTSAQRAELIALTQALKMAEGKKLTVYTDSRYAFATTHVHGEIYRRRGWLTSEGKEIKNKNEILALLEALFLPKRLSIIHCPGHQKGDSPQAKGNRLADDTAKKAATETHSSLTVLPAGKRTADGSEFEKRTADGSEFESPKKKAKVE

SEQ ID NO: 1256 - protein, 2093 aa, synthetic construct
MPAAKRVKLDGGDKKYSIGLDIGTNSVGWAVITDEYKVPSKKFKVLGNTDRHSIKKNLIGALLFDSGETAEATRLKRTARRRYTRRKNRICYLQEIFSNEMAKVDDSFFHRLEESFLVEEDKKHERHPIFGNIVDEVAYHEKYPTIYHLRKKLVDSTDKADLRLIYLALAHMIKFRGHFLIEGDLNPDNSDVDKLFIQLVQTYNQLFEENPINASGVDAKAILSARLSKSRRLENLIAQLPGEKKNGLFGNLIALSLGLTPNFKSNFDLAEDAKLQLSKDTYDDDLDNLLAQIGDQYADLFLAAKNLSDAILLSDILRVNTEITKAPLSASMIKRYDEHHQDLTLLKALVRQQLPEKYKEIFFDQSKNGYAGYIDGGASQEEFYKFIKPILEKMDGTEELLVKLNREDLLRKQRTFDNGSIPHQIHLGELHAILRRQEDFYPFLKDNREKIEKILTFRIPYYVGPLARGNSRFAWMTRKSEETITPWNFEEVVDKGASAQSFIERMTNFDKNLPNEKVLPKHSLLYEYFTVYNELTKVKYVTEGMRKPAFLSGEQKKAIVDLLFKTNRKVTVKQLKEDYFKKIECFDSVEISGVEDRFNASLGTYHDLLKIIKDKDFLDNEENEDILEDIVLTLTLFEDREMIEERLKTYAHLFDDKVMKQLKRRRYTGWGRLSRKLINGIRDKQSGKTILDFLKSDGFANRNFMQLIHDDSLTFKEDIQKAQVSGQGDSLHEHIANLAGSPAIKKGILQTVKVVDELVKVMGRHKPENIVIEMARENQTTQKGQKNSRERMKRIEEGIKELGSQILKEHPVENTQLQNEKLYLYYLQNGRDMYVDQELDINRLSDYDVDHIVPQSFLKDDSIDNKVLTRSDKARGKSDNVPSEEVVKKMKNYWRQLLNAKLITQRKFDNLTKAERGGLSELDKAGFIKRQLVETRQITKHVAQILDSRMNTKYDENDKLIREVKVITLKSKLVSDFRKDFQFYKVREINNYHHAHDAYLNAVVGTALIKKYPKLESEFVYGDYKVYDVRKMIAKSEQEIGKATAKYFFYSNIMNFFKTEITLANGEIRKRPLIETNGETGEIVWDKGRDFATVRKVLSMPQVNIVKKTEVQTGGFSKESILPKRNSDKLIARKKDWDPKKYGGFDSPTVAYSVLVVAKVEKGKSKKLKSVKELLGITIMERSSFEKNPIDFLEAKGYKEVKKDLIIKLPKYSLFELENGRKRMLASAGELQKGNELALPSKYVNFLYLASHYEKLKGSPEDNEQKQLFVEQHKHYLDEIIEQISEFSKRVILADANLDKVLSAYNKHRDKPIREQAENIIHLFTLTNLGAPAAFKYFDTTIDRKRYTSTKEVLDATLIHQSITGLYETRIDLSQLGGDGGPAPGGSGGGGGTLQLEEEYRLFEPESTQKQEMDIWLKNFPQAWAETGGMGTAHCQAPVLIQLKATATPISIRQYPMPHEAYQGIKPHIRRMLDQGILKPCQSPWNTPLLPVKKPGTEDYRPVQDLREVNKRVEDIHPTVPNPYNLLSTLPPSHPWYTVLDLKDAFFCLRLHSESQLLFAFEWRDPEIGLSGQLTWTRLPQGFKNSPTLFNEALHSDLADFRVRYPALVLLQYVDDLLLAAATRTECLEGTKALLETLGNKGYRASAKKAQICLQEVTYLGYSLKDGQRWLTKARKEAILSIPVPKNSRQVREFLGKAGYCRLFIPGFAELAAPLYPLTRPGTLFQWGTEQQLAFEDIKKALLSSPALGLPDITKPFELFIDENSGFAKGVLVQKLGPWKRPVAYLSKKLDTVASGWPPCLRMVAAIAILVKDAGKLTLGQPLTILTSHPVEALVRQPPNKWLSNARMTHYQAMLLDAERVHFGPTVSLNPATLLPLPSGGNHHDCLQILAETHGTRPDLTDQPLPDADLTWYTDGSSFIRNGEREAGAAVTTESEVIWAAPLPPGTSAQRAELIALTQALKMAEGKKLTVYTDSRYAFATTHVHGEIYRRRGWLTSEGKEIKNKNEILALLEALFLPKRLSIIHCPGHQKGDSPQAKGNRLADDTAKKAATETHSSLTVLPAGKRTADGSEFEKRTADGSEFESPKKKAKVE

SEQ ID NO: 1257 - protein, 2093 aa, synthetic construct
MPAAKRVKLDGGDKKYSIGLDIGTNSVGWAVITDEYKVPSKKFKVLGNTDRHSIKKNLIGALLFDSGETAEATRLKRTARRRYTRRKNRICYLQEIFSNEMAKVDDSFFHRLEESFLVEEDKKHERHPIFGNIVDEVAYHEKYPTIYHLRKKLVDSTDKADLRLIYLALAHMIKFRGHFLIEGDLNPDNSDVDKLFIQLVQTYNQLFEENPINASGVDAKAILSARLSKSRRLENLIAQLPGEKKNGLFGNLIALSLGLTPNFKSNFDLAEDAKLQLSKDTYDDDLDNLLAQIGDQYADLFLAAKNLSDAILLSDILRVNTEITKAPLSASMIKRYDEHHQDLTLLKALVRQQLPEKYKEIFFDQSKNGYAGYIDGGASQEEFYKFIKPILEKMDGTEELLVKLNREDLLRKQRTFDNGSIPHQIHLGELHAILRRQEDFYPFLKDNREKIEKILTFRIPYYVGPLARGNSRFAWMTRKSEETITPWNFEEVVDKGASAQSFIERMTNFDKNLPNEKVLPKHSLLYEYFTVYNELTKVKYVTEGMRKPAFLSGEQKKAIVDLLFKTNRKVTVKQLKEDYFKKIECFDSVEISGVEDRFNASLGTYHDLLKIIKDKDFLDNEENEDILEDIVLTLTLFEDREMIEERLKTYAHLFDDKVMKQLKRRRYTGWGRLSRKLINGIRDKQSGKTILDFLKSDGFANRNFMQLIHDDSLTFKEDIQKAQVSGQGDSLHEHIANLAGSPAIKKGILQTVKVVDELVKVMGRHKPENIVIEMARENQTTQKGQKNSRERMKRIEEGIKELGSQILKEHPVENTQLQNEKLYLYYLQNGRDMYVDQELDINRLSDYDVDHIVPQSFLKDDSIDNKVLTRSDKARGKSDNVPSEEVVKKMKNYWRQLLNAKLITQRKFDNLTKAERGGLSELDKAGFIKRQLVETRQITKHVAQILDSRMNTKYDENDKLIREVKVITLKSKLVSDFRKDFQFYKVREINNYHHAHDAYLNAVVGTALIKKYPKLESEFVYGDYKVYDVRKMIAKSEQEIGKATAKYFFYSNIMNFFKTEITLANGEIRKRPLIETNGETGEIVWDKGRDFATVRKVLSMPQVNIVKKTEVQTGGFSKESILPKRNSDKLIARKKDWDPKKYGGFDSPTVAYSVLVVAKVEKGKSKKLKSVKELLGITIMERSSFEKNPIDFLEAKGYKEVKKDLIIKLPKYSLFELENGRKRMLASAGELQKGNELALPSKYVNFLYLASHYEKLKGSPEDNEQKQLFVEQHKHYLDEIIEQISEFSKRVILADANLDKVLSAYNKHRDKPIREQAENIIHLFTLTNLGAPAAFKYFDTTIDRKRYTSTKEVLDATLIHQSITGLYETRIDLSQLGGDGGGGSPAPGGGGGTLQLEEEYRLFEPESTQKQEMDIWLKNFPQAWAETGGMGTAHCQAPVLIQLKATATPISIRQYPMPHEAYQGIKPHIRRMLDQGILKPCQSPWNTPLLPVKKPGTEDYRPVQDLREVNKRVEDIHPTVPNPYNLLSTLPPSHPWYTVLDLKDAFFCLRLHSESQLLFAFEWRDPEIGLSGQLTWTRLPQGFKNSPTLFNEALHSDLADFRVRYPALVLLQYVDDLLLAAATRTECLEGTKALLETLGNKGYRASAKKAQICLQEVTYLGYSLKDGQRWLTKARKEAILSIPVPKNSRQVREFLGKAGYCRLFIPGFAELAAPLYPLTRPGTLFQWGTEQQLAFEDIKKALLSSPALGLPDITKPFELFIDENSGFAKGVLVQKLGPWKRPVAYLSKKLDTVASGWPPCLRMVAAIAILVKDAGKLTLGQPLTILTSHPVEALVRQPPNKWLSNARMTHYQAMLLDAERVHFGPTVSLNPATLLPLPSGGNHHDCLQILAETHGTRPDLTDQPLPDADLTWYTDGSSFIRNGEREAGAAVTTESEVIWAAPLPPGTSAQRAELIALTQALKMAEGKKLTVYTDSRYAFATTHVHGEIYRRRGWLTSEGKEIKNKNEILALLEALFLPKRLSIIHCPGHQKGDSPQAKGNRLADDTAKKAATETHSSLTVLPAGKRTADGSEFEKRTADGSEFESPKKKAKVE

SEQ ID NO: 1258 - protein, 2093 aa, synthetic construct
MPAAKRVKLDGGDKKYSIGLDIGTNSVGWAVITDEYKVPSKKFKVLGNTDRHSIKKNLIGALLFDSGETAEATRLKRTARRRYTRRKNRICYLQEIFSNEMAKVDDSFFHRLEESFLVEEDKKHERHPIFGNIVDEVAYHEKYPTIYHLRKKLVDSTDKADLRLIYLALAHMIKFRGHFLIEGDLNPDNSDVDKLFIQLVQTYNQLFEENPINASGVDAKAILSARLSKSRRLENLIAQLPGEKKNGLFGNLIALSLGLTPNFKSNFDLAEDAKLQLSKDTYDDDLDNLLAQIGDQYADLFLAAKNLSDAILLSDILRVNTEITKAPLSASMIKRYDEHHQDLTLLKALVRQQLPEKYKEIFFDQSKNGYAGYIDGGASQEEFYKFIKPILEKMDGTEELLVKLNREDLLRKQRTFDNGSIPHQIHLGELHAILRRQEDFYPFLKDNREKIEKILTFRIPYYVGPLARGNSRFAWMTRKSEETITPWNFEEVVDKGASAQSFIERMTNFDKNLPNEKVLPKHSLLYEYFTVYNELTKVKYVTEGMRKPAFLSGEQKKAIVDLLFKTNRKVTVKQLKEDYFKKIECFDSVEISGVEDRFNASLGTYHDLLKIIKDKDFLDNEENEDILEDIVLTLTLFEDREMIEERLKTYAHLFDDKVMKQLKRRRYTGWGRLSRKLINGIRDKQSGKTILDFLKSDGFANRNFMQLIHDDSLTFKEDIQKAQVSGQGDSLHEHIANLAGSPAIKKGILQTVKVVDELVKVMGRHKPENIVIEMARENQTTQKGQKNSRERMKRIEEGIKELGSQILKEHPVENTQLQNEKLYLYYLQNGRDMYVDQELDINRLSDYDVDHIVPQSFLKDDSIDNKVLTRSDKARGKSDNVPSEEVVKKMKNYWRQLLNAKLITQRKFDNLTKAERGGLSELDKAGFIKRQLVETRQITKHVAQILDSRMNTKYDENDKLIREVKVITLKSKLVSDFRKDFQFYKVREINNYHHAHDAYLNAVVGTALIKKYPKLESEFVYGDYKVYDVRKMIAKSEQEIGKATAKYFFYSNIMNFFKTEITLANGEIRKRPLIETNGETGEIVWDKGRDFATVRKVLSMPQVNIVKKTEVQTGGFSKESILPKRNSDKLIARKKDWDPKKYGGFDSPTVAYSVLVVAKVEKGKSKKLKSVKELLGITIMERSSFEKNPIDFLEAKGYKEVKKDLIIKLPKYSLFELENGRKRMLASAGELQKGNELALPSKYVNFLYLASHYEKLKGSPEDNEQKQLFVEQHKHYLDEIIEQISEFSKRVILADANLDKVLSAYNKHRDKPIREQAENIIHLFTLTNLGAPAAFKYFDTTIDRKRYTSTKEVLDATLIHQSITGLYETRIDLSQLGGDGGGSSGGGGGSGGTLQLEEEYRLFEPESTQKQEMDIWLKNFPQAWAETGGMGTAHCQAPVLIQLKATATPISIRQYPMPHEAYQGIKPHIRRMLDQGILKPCQSPWNTPLLPVKKPGTEDYRPVQDLREVNKRVEDIHPTVPNPYNLLSTLPPSHPWYTVLDLKDAFFCLRLHSESQLLFAFEWRDPEIGLSGQLTWTRLPQGFKNSPTLFNEALHSDLADFRVRYPALVLLQYVDDLLLAAATRTECLEGTKALLETLGNKGYRASAKKAQICLQEVTYLGYSLKDGQRWLTKARKEAILSIPVPKNSRQVREFLGKAGYCRLFIPGFAELAAPLYPLTRPGTLFQWGTEQQLAFEDIKKALLSSPALGLPDITKPFELFIDENSGFAKGVLVQKLGPWKRPVAYLSKKLDTVASGWPPCLRMVAAIAILVKDAGKLTLGQPLTILTSHPVEALVRQPPNKWLSNARMTHYQAMLLDAERVHFGPTVSLNPATLLPLPSGGNHHDCLQILAETHGTRPDLTDQPLPDADLTWYTDGSSFIRNGEREAGAAVTTESEVIWAAPLPPGTSAQRAELIALTQALKMAEGKKLTVYTDSRYAFATTHVHGEIYRRRGWLTSEGKEIKNKNEILALLEALFLPKRLSIIHCPGHQKGDSPQAKGNRLADDTAKKAATETHSSLTVLPAGKRTADGSEFEKRTADGSEFESPKKKAKVE

SEQ ID NO: 1259 - protein, 2095 aa, synthetic construct
MPAAKRVKLDGGDKKYSIGLDIGTNSVGWAVITDEYKVPSKKFKVLGNTDRHSIKKNLIGALLFDSGETAEATRLKRTARRRYTRRKNRICYLQEIFSNEMAKVDDSFFHRLEESFLVEEDKKHERHPIFGNIVDEVAYHEKYPTIYHLRKKLVDSTDKADLRLIYLALAHMIKFRGHFLIEGDLNPDNSDVDKLFIQLVQTYNQLFEENPINASGVDAKAILSARLSKSRRLENLIAQLPGEKKNGLFGNLIALSLGLTPNFKSNFDLAEDAKLQLSKDTYDDDLDNLLAQIGDQYADLFLAAKNLSDAILLSDILRVNTEITKAPLSASMIKRYDEHHQDLTLLKALVRQQLPEKYKEIFFDQSKNGYAGYIDGGASQEEFYKFIKPILEKMDGTEELLVKLNREDLLRKQRTFDNGSIPHQIHLGELHAILRRQEDFYPFLKDNREKIEKILTFRIPYYVGPLARGNSRFAWMTRKSEETITPWNFEEVVDKGASAQSFIERMTNFDKNLPNEKVLPKHSLLYEYFTVYNELTKVKYVTEGMRKPAFLSGEQKKAIVDLLFKTNRKVTVKQLKEDYFKKIECFDSVEISGVEDRFNASLGTYHDLLKIIKDKDFLDNEENEDILEDIVLTLTLFEDREMIEERLKTYAHLFDDKVMKQLKRRRYTGWGRLSRKLINGIRDKQSGKTILDFLKSDGFANRNFMQLIHDDSLTFKEDIQKAQVSGQGDSLHEHIANLAGSPAIKKGILQTVKVVDELVKVMGRHKPENIVIEMARENQTTQKGQKNSRERMKRIEEGIKELGSQILKEHPVENTQLQNEKLYLYYLQNGRDMYVDQELDINRLSDYDVDHIVPQSFLKDDSIDNKVLTRSDKARGKSDNVPSEEVVKKMKNYWRQLLNAKLITQRKFDNLTKAERGGLSELDKAGFIKRQLVETRQITKHVAQILDSRMNTKYDENDKLIREVKVITLKSKLVSDFRKDFQFYKVREINNYHHAHDAYLNAVVGTALIKKYPKLESEFVYGDYKVYDVRKMIAKSEQEIGKATAKYFFYSNIMNFFKTEITLANGEIRKRPLIETNGETGEIVWDKGRDFATVRKVLSMPQVNIVKKTEVQTGGFSKESILPKRNSDKLIARKKDWDPKKYGGFDSPTVAYSVLVVAKVEKGKSKKLKSVKELLGITIMERSSFEKNPIDFLEAKGYKEVKKDLIIKLPKYSLFELENGRKRMLASAGELQKGNELALPSKYVNFLYLASHYEKLKGSPEDNEQKQLFVEQHKHYLDEIIEQISEFSKRVILADANLDKVLSAYNKHRDKPIREQAENIIHLFTLTNLGAPAAFKYFDTTIDRKRYTSTKEVLDATLIHQSITGLYETRIDLSQLGGDGGGGGEAAAKGGSGGTLQLEEEYRLFEPESTQKQEMDIWLKNFPQAWAETGGMGTAHCQAPVLIQLKATATPISIRQYPMPHEAYQGIKPHIRRMLDQGILKPCQSPWNTPLLPVKKPGTEDYRPVQDLREVNKRVEDIHPTVPNPYNLLSTLPPSHPWYTVLDLKDAFFCLRLHSESQLLFAFEWRDPEIGLSGQLTWTRLPQGFKNSPTLFNEALHSDLADFRVRYPALVLLQYVDDLLLAAATRTECLEGTKALLETLGNKGYRASAKKAQICLQEVTYLGYSLKDGQRWLTKARKEAILSIPVPKNSRQVREFLGKAGYCRLFIPGFAELAAPLYPLTRPGTLFQWGTEQQLAFEDIKKALLSSPALGLPDITKPFELFIDENSGFAKGVLVQKLGPWKRPVAYLSKKLDTVASGWPPCLRMVAAIAILVKDAGKLTLGQPLTILTSHPVEALVRQPPNKWLSNARMTHYQAMLLDAERVHFGPTVSLNPATLLPLPSGGNHHDCLQILAETHGTRPDLTDQPLPDADLTWYTDGSSFIRNGEREAGAAVTTESEVIWAAPLPPGTSAQRAELIALTQALKMAEGKKLTVYTDSRYAFATTHVHGEIYRRRGWLTSEGKEIKNKNEILALLEALFLPKRLSIIHCPGHQKGDSPQAKGNRLADDTAKKAATETHSSLTVLPAGKRTADGSEFEKRTADGSEFESPKKKAKVE

SEQ ID NO: 1260 - protein, 2089 aa, synthetic construct
MPAAKRVKLDGGDKKYSIGLDIGTNSVGWAVITDEYKVPSKKFKVLGNTDRHSIKKNLIGALLFDSGETAEATRLKRTARRRYTRRKNRICYLQEIFSNEMAKVDDSFFHRLEESFLVEEDKKHERHPIFGNIVDEVAYHEKYPTIYHLRKKLVDSTDKADLRLIYLALAHMIKFRGHFLIEGDLNPDNSDVDKLFIQLVQTYNQLFEENPINASGVDAKAILSARLSKSRRLENLIAQLPGEKKNGLFGNLIALSLGLTPNFKSNFDLAEDAKLQLSKDTYDDDLDNLLAQIGDQYADLFLAAKNLSDAILLSDILRVNTEITKAPLSASMIKRYDEHHQDLTLLKALVRQQLPEKYKEIFFDQSKNGYAGYIDGGASQEEFYKFIKPILEKMDGTEELLVKLNREDLLRKQRTFDNGSIPHQIHLGELHAILRRQEDFYPFLKDNREKIEKILTFRIPYYVGPLARGNSRFAWMTRKSEETITPWNFEEVVDKGASAQSFIERMTNFDKNLPNEKVLPKHSLLYEYFTVYNELTKVKYVTEGMRKPAFLSGEQKKAIVDLLFKTNRKVTVKQLKEDYFKKIECFDSVEISGVEDRFNASLGTYHDLLKIIKDKDFLDNEENEDILEDIVLTLTLFEDREMIEERLKTYAHLFDDKVMKQLKRRRYTGWGRLSRKLINGIRDKQSGKTILDFLKSDGFANRNFMQLIHDDSLTFKEDIQKAQVSGQGDSLHEHIANLAGSPAIKKGILQTVKVVDELVKVMGRHKPENIVIEMARENQTTQKGQKNSRERMKRIEEGIKELGSQILKEHPVENTQLQNEKLYLYYLQNGRDMYVDQELDINRLSDYDVDHIVPQSFLKDDSIDNKVLTRSDKARGKSDNVPSEEVVKKMKNYWRQLLNAKLITQRKFDNLTKAERGGLSELDKAGFIKRQLVETRQITKHVAQILDSRMNTKYDENDKLIREVKVITLKSKLVSDFRKDFQFYKVREINNYHHAHDAYLNAVVGTALIKKYPKLESEFVYGDYKVYDVRKMIAKSEQEIGKATAKYFFYSNIMNFFKTEITLANGEIRKRPLIETNGETGEIVWDKGRDFATVRKVLSMPQVNIVKKTEVQTGGFSKESILPKRNSDKLIARKKDWDPKKYGGFDSPTVAYSVLVVAKVEKGKSKKLKSVKELLGITIMERSSFEKNPIDFLEAKGYKEVKKDLIIKLPKYSLFELENGRKRMLASAGELQKGNELALPSKYVNFLYLASHYEKLKGSPEDNEQKQLFVEQHKHYLDEIIEQISEFSKRVILADANLDKVLSAYNKHRDKPIREQAENIIHLFTLTNLGAPAAFKYFDTTIDRKRYTSTKEVLDATLIHQSITGLYETRIDLSQLGGDGGEAAAKGGTLQLEEEYRLFEPESTQKQEMDIWLKNFPQAWAETGGMGTAHCQAPVLIQLKATATPISIRQYPMPHEAYQGIKPHIRRMLDQGILKPCQSPWNTPLLPVKKPGTEDYRPVQDLREVNKRVEDIHPTVPNPYNLLSTLPPSHPWYTVLDLKDAFFCLRLHSESQLLFAFEWRDPEIGLSGQLTWTRLPQGFKNSPTLFNEALHSDLADFRVRYPALVLLQYVDDLLLAAATRTECLEGTKALLETLGNKGYRASAKKAQICLQEVTYLGYSLKDGQRWLTKARKEAILSIPVPKNSRQVREFLGKAGYCRLFIPGFAELAAPLYPLTRPGTLFQWGTEQQLAFEDIKKALLSSPALGLPDITKPFELFIDENSGFAKGVLVQKLGPWKRPVAYLSKKLDTVASGWPPCLRMVAAIAILVKDAGKLTLGQPLTILTSHPVEALVRQPPNKWLSNARMTHYQAMLLDAERVHFGPTVSLNPATLLPLPSGGNHHDCLQILAETHGTRPDLTDQPLPDADLTWYTDGSSFIRNGEREAGAAVTTESEVIWAAPLPPGTSAQRAELIALTQALKMAEGKKLTVYTDSRYAFATTHVHGEIYRRRGWLTSEGKEIKNKNEILALLEALFLPKRLSIIHCPGHQKGDSPQAKGNRLADDTAKKAATETHSSLTVLPAGKRTADGSEFEKRTADGSEFESPKKKAKVE

SEQ ID NO: 1261 - protein, 2095 aa, synthetic construct
MPAAKRVKLDGGDKKYSIGLDIGTNSVGWAVITDEYKVPSKKFKVLGNTDRHSIKKNLIGALLFDSGETAEATRLKRTARRRYTRRKNRICYLQEIFSNEMAKVDDSFFHRLEESFLVEEDKKHERHPIFGNIVDEVAYHEKYPTIYHLRKKLVDSTDKADLRLIYLALAHMIKFRGHFLIEGDLNPDNSDVDKLFIQLVQTYNQLFEENPINASGVDAKAILSARLSKSRRLENLIAQLPGEKKNGLFGNLIALSLGLTPNFKSNFDLAEDAKLQLSKDTYDDDLDNLLAQIGDQYADLFLAAKNLSDAILLSDILRVNTEITKAPLSASMIKRYDEHHQDLTLLKALVRQQLPEKYKEIFFDQSKNGYAGYIDGGASQEEFYKFIKPILEKMDGTEELLVKLNREDLLRKQRTFDNGSIPHQIHLGELHAILRRQEDFYPFLKDNREKIEKILTFRIPYYVGPLARGNSRFAWMTRKSEETITPWNFEEVVDKGASAQSFIERMTNFDKNLPNEKVLPKHSLLYEYFTVYNELTKVKYVTEGMRKPAFLSGEQKKAIVDLLFKTNRKVTVKQLKEDYFKKIECFDSVEISGVEDRFNASLGTYHDLLKIIKDKDFLDNEENEDILEDIVLTLTLFEDREMIEERLKTYAHLFDDKVMKQLKRRRYTGWGRLSRKLINGIRDKQSGKTILDFLKSDGFANRNFMQLIHDDSLTFKEDIQKAQVSGQGDSLHEHIANLAGSPAIKKGILQTVKVVDELVKVMGRHKPENIVIEMARENQTTQKGQKNSRERMKRIEEGIKELGSQILKEHPVENTQLQNEKLYLYYLQNGRDMYVDQELDINRLSDYDVDHIVPQSFLKDDSIDNKVLTRSDKARGKSDNVPSEEVVKKMKNYWRQLLNAKLITQRKFDNLTKAERGGLSELDKAGFIKRQLVETRQITKHVAQILDSRMNTKYDENDKLIREVKVITLKSKLVSDFRKDFQFYKVREINNYHHAHDAYLNAVVGTALIKKYPKLESEFVYGDYKVYDVRKMIAKSEQEIGKATAKYFFYSNIMNFFKTEITLANGEIRKRPLIETNGETGEIVWDKGRDFATVRKVLSMPQVNIVKKTEVQTGGFSKESILPKRNSDKLIARKKDWDPKKYGGFDSPTVAYSVLVVAKVEKGKSKKLKSVKELLGITIMERSSFEKNPIDFLEAKGYKEVKKDLIIKLPKYSLFELENGRKRMLASAGELQKGNELALPSKYVNFLYLASHYEKLKGSPEDNEQKQLFVEQHKHYLDEIIEQISEFSKRVILADANLDKVLSAYNKHRDKPIREQAENIIHLFTLTNLGAPAAFKYFDTTIDRKRYTSTKEVLDATLIHQSITGLYETRIDLSQLGGDGGGGGGSSEAAAKGGTLQLEEEYRLFEPESTQKQEMDIWLKNFPQAWAETGGMGTAHCQAPVLIQLKATATPISIRQYPMPHEAYQGIKPHIRRMLDQGILKPCQSPWNTPLLPVKKPGTEDYRPVQDLREVNKRVEDIHPTVPNPYNLLSTLPPSHPWYTVLDLKDAFFCLRLHSESQLLFAFEWRDPEIGLSGQLTWTRLPQGFKNSPTLFNEALHSDLADFRVRYPALVLLQYVDDLLLAAATRTECLEGTKALLETLGNKGYRASAKKAQICLQEVTYLGYSLKDGQRWLTKARKEAILSIPVPKNSRQVREFLGKAGYCRLFIPGFAELAAPLYPLTRPGTLFQWGTEQQLAFEDIKKALLSSPALGLPDITKPFELFIDENSGFAKGVLVQKLGPWKRPVAYLSKKLDTVASGWPPCLRMVAAIAILVKDAGKLTLGQPLTILTSHPVEALVRQPPNKWLSNARMTHYQAMLLDAERVHFGPTVSLNPATLLPLPSGGNHHDCLQILAETHGTRPDLTDQPLPDADLTWYTDGSSFIRNGEREAGAAVTTESEVIWAAPLPPGTSAQRAELIALTQALKMAEGKKLTVYTDSRYAFATTHVHGEIYRRRGWLTSEGKEIKNKNEILALLEALFLPKRLSIIHCPGHQKGDSPQAKGNRLADDTAKKAATETHSSLTVLPAGKRTADGSEFEKRTADGSEFESPKKKAKVE

SEQ ID NO: 1262 - protein, 2095 aa, synthetic construct
MPAAKRVKLDGGDKKYSIGLDIGTNSVGWAVITDEYKVPSKKFKVLGNTDRHSIKKNLIGALLFDSGETAEATRLKRTARRRYTRRKNRICYLQEIFSNEMAKVDDSFFHRLEESFLVEEDKKHERHPIFGNIVDEVAYHEKYPTIYHLRKKLVDSTDKADLRLIYLALAHMIKFRGHFLIEGDLNPDNSDVDKLFIQLVQTYNQLFEENPINASGVDAKAILSARLSKSRRLENLIAQLPGEKKNGLFGNLIALSLGLTPNFKSNFDLAEDAKLQLSKDTYDDDLDNLLAQIGDQYADLFLAAKNLSDAILLSDILRVNTEITKAPLSASMIKRYDEHHQDLTLLKALVRQQLPEKYKEIFFDQSKNGYAGYIDGGASQEEFYKFIKPILEKMDGTEELLVKLNREDLLRKQRTFDNGSIPHQIHLGELHAILRRQEDFYPFLKDNREKIEKILTFRIPYYVGPLARGNSRFAWMTRKSEETITPWNFEEVVDKGASAQSFIERMTNFDKNLPNEKVLPKHSLLYEYFTVYNELTKVKYVTEGMRKPAFLSGEQKKAIVDLLFKTNRKVTVKQLKEDYFKKIECFDSVEISGVEDRFNASLGTYHDLLKIIKDKDFLDNEENEDILEDIVLTLTLFEDREMIEERLKTYAHLFDDKVMKQLKRRRYTGWGRLSRKLINGIRDKQSGKTILDFLKSDGFANRNFMQLIHDDSLTFKEDIQKAQVSGQGDSLHEHIANLAGSPAIKKGILQTVKVVDELVKVMGRHKPENIVIEMARENQTTQKGQKNSRERMKRIEEGIKELGSQILKEHPVENTQLQNEKLYLYYLQNGRDMYVDQELDINRLSDYDVDHIVPQSFLKDDSIDNKVLTRSDKARGKSDNVPSEEVVKKMKNYWRQLLNAKLITQRKFDNLTKAERGGLSELDKAGFIKRQLVETRQITKHVAQILDSRMNTKYDENDKLIREVKVITLKSKLVSDFRKDFQFYKVREINNYHHAHDAYLNAVVGTALIKKYPKLESEFVYGDYKVYDVRKMIAKSEQEIGKATAKYFFYSNIMNFFKTEITLANGEIRKRPLIETNGETGEIVWDKGRDFATVRKVLSMPQVNIVKKTEVQTGGFSKESILPKRNSDKLIARKKDWDPKKYGGFDSPTVAYSVLVVAKVEKGKSKKLKSVKELLGITIMERSSFEKNPIDFLEAKGYKEVKKDLIIKLPKYSLFELENGRKRMLASAGELQKGNELALPSKYVNFLYLASHYEKLKGSPEDNEQKQLFVEQHKHYLDEIIEQISEFSKRVILADANLDKVLSAYNKHRDKPIREQAENIIHLFTLTNLGAPAAFKYFDTTIDRKRYTSTKEVLDATLIHQSITGLYETRIDLSQLGGDGGGGGEAAAKPAPGGTLQLEEEYRLFEPESTQKQEMDIWLKNFPQAWAETGGMGTAHCQAPVLIQLKATATPISIRQYPMPHEAYQGIKPHIRRMLDQGILKPCQSPWNTPLLPVKKPGTEDYRPVQDLREVNKRVEDIHPTVPNPYNLLSTLPPSHPWYTVLDLKDAFFCLRLHSESQLLFAFEWRDPEIGLSGQLTWTRLPQGFKNSPTLFNEALHSDLADFRVRYPALVLLQYVDDLLLAAATRTECLEGTKALLETLGNKGYRASAKKAQICLQEVTYLGYSLKDGQRWLTKARKEAILSIPVPKNSRQVREFLGKAGYCRLFIPGFAELAAPLYPLTRPGTLFQWGTEQQLAFEDIKKALLSSPALGLPDITKPFELFIDENSGFAKGVLVQKLGPWKRPVAYLSKKLDTVASGWPPCLRMVAAIAILVKDAGKLTLGQPLTILTSHPVEALVRQPPNKWLSNARMTHYQAMLLDAERVHFGPTVSLNPATLLPLPSGGNHHDCLQILAETHGTRPDLTDQPLPDADLTWYTDGSSFIRNGEREAGAAVTTESEVIWAAPLPPGTSAQRAELIALTQALKMAEGKKLTVYTDSRYAFATTHVHGEIYRRRGWLTSEGKEIKNKNEILALLEALFLPKRLSIIHCPGHQKGDSPQAKGNRLADDTAKKAATETHSSLTVLPAGKRTADGSEFEKRTADGSEFESPKKKAKVE

SEQ ID NO: 1263 - protein, 2093 aa, synthetic construct
MPAAKRVKLDGGDKKYSIGLDIGTNSVGWAVITDEYKVPSKKFKVLGNTDRHSIKKNLIGALLFDSGETAEATRLKRTARRRYTRRKNRICYLQEIFSNEMAKVDDSFFHRLEESFLVEEDKKHERHPIFGNIVDEVAYHEKYPTIYHLRKKLVDSTDKADLRLIYLALAHMIKFRGHFLIEGDLNPDNSDVDKLFIQLVQTYNQLFEENPINASGVDAKAILSARLSKSRRLENLIAQLPGEKKNGLFGNLIALSLGLTPNFKSNFDLAEDAKLQLSKDTYDDDLDNLLAQIGDQYADLFLAAKNLSDAILLSDILRVNTEITKAPLSASMIKRYDEHHQDLTLLKALVRQQLPEKYKEIFFDQSKNGYAGYIDGGASQEEFYKFIKPILEKMDGTEELLVKLNREDLLRKQRTFDNGSIPHQIHLGELHAILRRQEDFYPFLKDNREKIEKILTFRIPYYVGPLARGNSRFAWMTRKSEETITPWNFEEVVDKGASAQSFIERMTNFDKNLPNEKVLPKHSLLYEYFTVYNELTKVKYVTEGMRKPAFLSGEQKKAIVDLLFKTNRKVTVKQLKEDYFKKIECFDSVEISGVEDRFNASLGTYHDLLKIIKDKDFLDNEENEDILEDIVLTLTLFEDREMIEERLKTYAHLFDDKVMKQLKRRRYTGWGRLSRKLINGIRDKQSGKTILDFLKSDGFANRNFMQLIHDDSLTFKEDIQKAQVSGQGDSLHEHIANLAGSPAIKKGILQTVKVVDELVKVMGRHKPENIVIEMARENQTTQKGQKNSRERMKRIEEGIKELGSQILKEHPVENTQLQNEKLYLYYLQNGRDMYVDQELDINRLSDYDVDHIVPQSFLKDDSIDNKVLTRSDKARGKSDNVPSEEVVKKMKNYWRQLLNAKLITQRKFDNLTKAERGGLSELDKAGFIKRQLVETRQITKHVAQILDSRMNTKYDENDKLIREVKVITLKSKLVSDFRKDFQFYKVREINNYHHAHDAYLNAVVGTALIKKYPKLESEFVYGDYKVYDVRKMIAKSEQEIGKATAKYFFYSNIMNFFKTEITLANGEIRKRPLIETNGETGEIVWDKGRDFATVRKVLSMPQVNIVKKTEVQTGGFSKESILPKRNSDKLIARKKDWDPKKYGGFDSPTVAYSVLVVAKVEKGKSKKLKSVKELLGITIMERSSFEKNPIDFLEAKGYKEVKKDLIIKLPKYSLFELENGRKRMLASAGELQKGNELALPSKYVNFLYLASHYEKLKGSPEDNEQKQLFVEQHKHYLDEIIEQISEFSKRVILADANLDKVLSAYNKHRDKPIREQAENIIHLFTLTNLGAPAAFKYFDTTIDRKRYTSTKEVLDATLIHQSITGLYETRIDLSQLGGDGGGGSPAPGSSGGTLQLEEEYRLFEPESTQKQEMDIWLKNFPQAWAETGGMGTAHCQAPVLIQLKATATPISIRQYPMPHEAYQGIKPHIRRMLDQGILKPCQSPWNTPLLPVKKPGTEDYRPVQDLREVNKRVEDIHPTVPNPYNLLSTLPPSHPWYTVLDLKDAFFCLRLHSESQLLFAFEWRDPEIGLSGQLTWTRLPQGFKNSPTLFNEALHSDLADFRVRYPALVLLQYVDDLLLAAATRTECLEGTKALLETLGNKGYRASAKKAQICLQEVTYLGYSLKDGQRWLTKARKEAILSIPVPKNSRQVREFLGKAGYCRLFIPGFAELAAPLYPLTRPGTLFQWGTEQQLAFEDIKKALLSSPALGLPDITKPFELFIDENSGFAKGVLVQKLGPWKRPVAYLSKKLDTVASGWPPCLRMVAAIAILVKDAGKLTLGQPLTILTSHPVEALVRQPPNKWLSNARMTHYQAMLLDAERVHFGPTVSLNPATLLPLPSGGNHHDCLQILAETHGTRPDLTDQPLPDADLTWYTDGSSFIRNGEREAGAAVTTESEVIWAAPLPPGTSAQRAELIALTQALKMAEGKKLTVYTDSRYAFATTHVHGEIYRRRGWLTSEGKEIKNKNEILALLEALFLPKRLSIIHCPGHQKGDSPQAKGNRLADDTAKKAATETHSSLTVLPAGKRTADGSEFEKRTADGSEFESPKKKAKVE

SEQ ID NO: 1264 - protein, 2095 aa, synthetic construct
MPAAKRVKLDGGDKKYSIGLDIGTNSVGWAVITDEYKVPSKKFKVLGNTDRHSIKKNLIGALLFDSGETAEATRLKRTARRRYTRRKNRICYLQEIFSNEMAKVDDSFFHRLEESFLVEEDKKHERHPIFGNIVDEVAYHEKYPTIYHLRKKLVDSTDKADLRLIYLALAHMIKFRGHFLIEGDLNPDNSDVDKLFIQLVQTYNQLFEENPINASGVDAKAILSARLSKSRRLENLIAQLPGEKKNGLFGNLIALSLGLTPNFKSNFDLAEDAKLQLSKDTYDDDLDNLLAQIGDQYADLFLAAKNLSDAILLSDILRVNTEITKAPLSASMIKRYDEHHQDLTLLKALVRQQLPEKYKEIFFDQSKNGYAGYIDGGASQEEFYKFIKPILEKMDGTEELLVKLNREDLLRKQRTFDNGSIPHQIHLGELHAILRRQEDFYPFLKDNREKIEKILTFRIPYYVGPLARGNSRFAWMTRKSEETITPWNFEEVVDKGASAQSFIERMTNFDKNLPNEKVLPKHSLLYEYFTVYNELTKVKYVTEGMRKPAFLSGEQKKAIVDLLFKTNRKVTVKQLKEDYFKKIECFDSVEISGVEDRFNASLGTYHDLLKIIKDKDFLDNEENEDILEDIVLTLTLFEDREMIEERLKTYAHLFDDKVMKQLKRRRYTGWGRLSRKLINGIRDKQSGKTILDFLKSDGFANRNFMQLIHDDSLTFKEDIQKAQVSGQGDSLHEHIANLAGSPAIKKGILQTVKVVDELVKVMGRHKPENIVIEMARENQTTQKGQKNSRERMKRIEEGIKELGSQILKEHPVENTQLQNEKLYLYYLQNGRDMYVDQELDINRLSDYDVDHIVPQSFLKDDSIDNKVLTRSDKARGKSDNVPSEEVVKKMKNYWRQLLNAKLITQRKFDNLTKAERGGLSELDKAGFIKRQLVETRQITKHVAQILDSRMNTKYDENDKLIREVKVITLKSKLVSDFRKDFQFYKVREINNYHHAHDAYLNAVVGTALIKKYPKLESEFVYGDYKVYDVRKMIAKSEQEIGKATAKYFFYSNIMNFFKTEITLANGEIRKRPLIETNGETGEIVWDKGRDFATVRKVLSMPQVNIVKKTEVQTGGFSKESILPKRNSDKLIARKKDWDPKKYGGFDSPTVAYSVLVVAKVEKGKSKKLKSVKELLGITIMERSSFEKNPIDFLEAKGYKEVKKDLIIKLPKYSLFELENGRKRMLASAGELQKGNELALPSKYVNFLYLASHYEKLKGSPEDNEQKQLFVEQHKHYLDEIIEQISEFSKRVILADANLDKVLSAYNKHRDKPIREQAENIIHLFTLTNLGAPAAFKYFDTTIDRKRYTSTKEVLDATLIHQSITGLYETRIDLSQLGGDGGPAPEAAAKGGSGGTLQLEEEYRLFEPESTQKQEMDIWLKNFPQAWAETGGMGTAHCQAPVLIQLKATATPISIRQYPMPHEAYQGIKPHIRRMLDQGILKPCQSPWNTPLLPVKKPGTEDYRPVQDLREVNKRVEDIHPTVPNPYNLLSTLPPSHPWYTVLDLKDAFFCLRLHSESQLLFAFEWRDPEIGLSGQLTWTRLPQGFKNSPTLFNEALHSDLADFRVRYPALVLLQYVDDLLLAAATRTECLEGTKALLETLGNKGYRASAKKAQICLQEVTYLGYSLKDGQRWLTKARKEAILSIPVPKNSRQVREFLGKAGYCRLFIPGFAELAAPLYPLTRPGTLFQWGTEQQLAFEDIKKALLSSPALGLPDITKPFELFIDENSGFAKGVLVQKLGPWKRPVAYLSKKLDTVASGWPPCLRMVAAIAILVKDAGKLTLGQPLTILTSHPVEALVRQPPNKWLSNARMTHYQAMLLDAERVHFGPTVSLNPATLLPLPSGGNHHDCLQILAETHGTRPDLTDQPLPDADLTWYTDGSSFIRNGEREAGAAVTTESEVIWAAPLPPGTSAQRAELIALTQALKMAEGKKLTVYTDSRYAFATTHVHGEIYRRRGWLTSEGKEIKNKNEILALLEALFLPKRLSIIHCPGHQKGDSPQAKGNRLADDTAKKAATETHSSLTVLPAGKRTADGSEFEKRTADGSEFESPKKKAKVE

SEQ ID NO: 1265 - protein, 2095 aa, synthetic construct
MPAAKRVKLDGGDKKYSIGLDIGTNSVGWAVITDEYKVPSKKFKVLGNTDRHSIKKNLIGALLFDSGETAEATRLKRTARRRYTRRKNRICYLQEIFSNEMAKVDDSFFHRLEESFLVEEDKKHERHPIFGNIVDEVAYHEKYPTIYHLRKKLVDSTDKADLRLIYLALAHMIKFRGHFLIEGDLNPDNSDVDKLFIQLVQTYNQLFEENPINASGVDAKAILSARLSKSRRLENLIAQLPGEKKNGLFGNLIALSLGLTPNFKSNFDLAEDAKLQLSKDTYDDDLDNLLAQIGDQYADLFLAAKNLSDAILLSDILRVNTEITKAPLSASMIKRYDEHHQDLTLLKALVRQQLPEKYKEIFFDQSKNGYAGYIDGGASQEEFYKFIKPILEKMDGTEELLVKLNREDLLRKQRTFDNGSIPHQIHLGELHAILRRQEDFYPFLKDNREKIEKILTFRIPYYVGPLARGNSRFAWMTRKSEETITPWNFEEVVDKGASAQSFIERMTNFDKNLPNEKVLPKHSLLYEYFTVYNELTKVKYVTEGMRKPAFLSGEQKKAIVDLLFKTNRKVTVKQLKEDYFKKIECFDSVEISGVEDRFNASLGTYHDLLKIIKDKDFLDNEENEDILEDIVLTLTLFEDREMIEERLKTYAHLFDDKVMKQLKRRRYTGWGRLSRKLINGIRDKQSGKTILDFLKSDGFANRNFMQLIHDDSLTFKEDIQKAQVSGQGDSLHEHIANLAGSPAIKKGILQTVKVVDELVKVMGRHKPENIVIEMARENQTTQKGQKNSRERMKRIEEGIKELGSQILKEHPVENTQLQNEKLYLYYLQNGRDMYVDQELDINRLSDYDVDHIVPQSFLKDDSIDNKVLTRSDKARGKSDNVPSEEVVKKMKNYWRQLLNAKLITQRKFDNLTKAERGGLSELDKAGFIKRQLVETRQITKHVAQILDSRMNTKYDENDKLIREVKVITLKSKLVSDFRKDFQFYKVREINNYHHAHDAYLNAVVGTALIKKYPKLESEFVYGDYKVYDVRKMIAKSEQEIGKATAKYFFYSNIMNFFKTEITLANGEIRKRPLIETNGETGEIVWDKGRDFATVRKVLSMPQVNIVKKTEVQTGGFSKESILPKRNSDKLIARKKDWDPKKYGGFDSPTVAYSVLVVAKVEKGKSKKLKSVKELLGITIMERSSFEKNPIDFLEAKGYKEVKKDLIIKLPKYSLFELENGRKRMLASAGELQKGNELALPSKYVNFLYLASHYEKLKGSPEDNEQKQLFVEQHKHYLDEIIEQISEFSKRVILADANLDKVLSAYNKHRDKPIREQAENIIHLFTLTNLGAPAAFKYFDTTIDRKRYTSTKEVLDATLIHQSITGLYETRIDLSQLGGDGGGSSEAAAKGGSGGTLQLEEEYRLFEPESTQKQEMDIWLKNFPQAWAETGGMGTAHCQAPVLIQLKATATPISIRQYPMPHEAYQGIKPHIRRMLDQGILKPCQSPWNTPLLPVKKPGTEDYRPVQDLREVNKRVEDIHPTVPNPYNLLSTLPPSHPWYTVLDLKDAFFCLRLHSESQLLFAFEWRDPEIGLSGQLTWTRLPQGFKNSPTLFNEALHSDLADFRVRYPALVLLQYVDDLLLAAATRTECLEGTKALLETLGNKGYRASAKKAQICLQEVTYLGYSLKDGQRWLTKARKEAILSIPVPKNSRQVREFLGKAGYCRLFIPGFAELAAPLYPLTRPGTLFQWGTEQQLAFEDIKKALLSSPALGLPDITKPFELFIDENSGFAKGVLVQKLGPWKRPVAYLSKKLDTVASGWPPCLRMVAAIAILVKDAGKLTLGQPLTILTSHPVEALVRQPPNKWLSNARMTHYQAMLLDAERVHFGPTVSLNPATLLPLPSGGNHHDCLQILAETHGTRPDLTDQPLPDADLTWYTDGSSFIRNGEREAGAAVTTESEVIWAAPLPPGTSAQRAELIALTQALKMAEGKKLTVYTDSRYAFATTHVHGEIYRRRGWLTSEGKEIKNKNEILALLEALFLPKRLSIIHCPGHQKGDSPQAKGNRLADDTAKKAATETHSSLTVLPAGKRTADGSEFEKRTADGSEFESPKKKAKVE

SEQ ID NO: 1266 - protein, 2095 aa, synthetic construct
MPAAKRVKLDGGDKKYSIGLDIGTNSVGWAVITDEYKVPSKKFKVLGNTDRHSIKKNLIGALLFDSGETAEATRLKRTARRRYTRRKNRICYLQEIFSNEMAKVDDSFFHRLEESFLVEEDKKHERHPIFGNIVDEVAYHEKYPTIYHLRKKLVDSTDKADLRLIYLALAHMIKFRGHFLIEGDLNPDNSDVDKLFIQLVQTYNQLFEENPINASGVDAKAILSARLSKSRRLENLIAQLPGEKKNGLFGNLIALSLGLTPNFKSNFDLAEDAKLQLSKDTYDDDLDNLLAQIGDQYADLFLAAKNLSDAILLSDILRVNTEITKAPLSASMIKRYDEHHQDLTLLKALVRQQLPEKYKEIFFDQSKNGYAGYIDGGASQEEFYKFIKPILEKMDGTEELLVKLNREDLLRKQRTFDNGSIPHQIHLGELHAILRRQEDFYPFLKDNREKIEKILTFRIPYYVGPLARGNSRFAWMTRKSEETITPWNFEEVVDKGASAQSFIERMTNFDKNLPNEKVLPKHSLLYEYFTVYNELTKVKYVTEGMRKPAFLSGEQKKAIVDLLFKTNRKVTVKQLKEDYFKKIECFDSVEISGVEDRFNASLGTYHDLLKIIKDKDFLDNEENEDILEDIVLTLTLFEDREMIEERLKTYAHLFDDKVMKQLKRRRYTGWGRLSRKLINGIRDKQSGKTILDFLKSDGFANRNFMQLIHDDSLTFKEDIQKAQVSGQGDSLHEHIANLAGSPAIKKGILQTVKVVDELVKVMGRHKPENIVIEMARENQTTQKGQKNSRERMKRIEEGIKELGSQILKEHPVENTQLQNEKLYLYYLQNGRDMYVDQELDINRLSDYDVDHIVPQSFLKDDSIDNKVLTRSDKARGKSDNVPSEEVVKKMKNYWRQLLNAKLITQRKFDNLTKAERGGLSELDKAGFIKRQLVETRQITKHVAQILDSRMNTKYDENDKLIREVKVITLKSKLVSDFRKDFQFYKVREINNYHHAHDAYLNAVVGTALIKKYPKLESEFVYGDYKVYDVRKMIAKSEQEIGKATAKYFFYSNIMNFFKTEITLANGEIRKRPLIETNGETGEIVWDKGRDFATVRKVLSMPQVNIVKKTEVQTGGFSKESILPKRNSDKLIARKKDWDPKKYGGFDSPTVAYSVLVVAKVEKGKSKKLKSVKELLGITIMERSSFEKNPIDFLEAKGYKEVKKDLIIKLPKYSLFELENGRKRMLASAGELQKGNELALPSKYVNFLYLASHYEKLKGSPEDNEQKQLFVEQHKHYLDEIIEQISEFSKRVILADANLDKVLSAYNKHRDKPIREQAENIIHLFTLTNLGAPAAFKYFDTTIDRKRYTSTKEVLDATLIHQSITGLYETRIDLSQLGGDGGGGSPAPEAAAKGGTLQLEEEYRLFEPESTQKQEMDIWLKNFPQAWAETGGMGTAHCQAPVLIQLKATATPISIRQYPMPHEAYQGIKPHIRRMLDQGILKPCQSPWNTPLLPVKKPGTEDYRPVQDLREVNKRVEDIHPTVPNPYNLLSTLPPSHPWYTVLDLKDAFFCLRLHSESQLLFAFEWRDPEIGLSGQLTWTRLPQGFKNSPTLFNEALHSDLADFRVRYPALVLLQYVDDLLLAAATRTECLEGTKALLETLGNKGYRASAKKAQICLQEVTYLGYSLKDGQRWLTKARKEAILSIPVPKNSRQVREFLGKAGYCRLFIPGFAELAAPLYPLTRPGTLFQWGTEQQLAFEDIKKALLSSPALGLPDITKPFELFIDENSGFAKGVLVQKLGPWKRPVAYLSKKLDTVASGWPPCLRMVAAIAILVKDAGKLTLGQPLTILTSHPVEALVRQPPNKWLSNARMTHYQAMLLDAERVHFGPTVSLNPATLLPLPSGGNHHDCLQILAETHGTRPDLTDQPLPDADLTWYTDGSSFIRNGEREAGAAVTTESEVIWAAPLPPGTSAQRAELIALTQALKMAEGKKLTVYTDSRYAFATTHVHGEIYRRRGWLTSEGKEIKNKNEILALLEALFLPKRLSIIHCPGHQKGDSPQAKGNRLADDTAKKAATETHSSLTVLPAGKRTADGSEFEKRTADGSEFESPKKKAKVE

SEQ ID NO: 1267 - protein, 2092 aa, synthetic construct
MPAAKRVKLDGGDKKYSIGLDIGTNSVGWAVITDEYKVPSKKFKVLGNTDRHSIKKNLIGALLFDSGETAEATRLKRTARRRYTRRKNRICYLQEIFSNEMAKVDDSFFHRLEESFLVEEDKKHERHPIFGNIVDEVAYHEKYPTIYHLRKKLVDSTDKADLRLIYLALAHMIKFRGHFLIEGDLNPDNSDVDKLFIQLVQTYNQLFEENPINASGVDAKAILSARLSKSRRLENLIAQLPGEKKNGLFGNLIALSLGLTPNFKSNFDLAEDAKLQLSKDTYDDDLDNLLAQIGDQYADLFLAAKNLSDAILLSDILRVNTEITKAPLSASMIKRYDEHHQDLTLLKALVRQQLPEKYKEIFFDQSKNGYAGYIDGGASQEEFYKFIKPILEKMDGTEELLVKLNREDLLRKQRTFDNGSIPHQIHLGELHAILRRQEDFYPFLKDNREKIEKILTFRIPYYVGPLARGNSRFAWMTRKSEETITPWNFEEVVDKGASAQSFIERMTNFDKNLPNEKVLPKHSLLYEYFTVYNELTKVKYVTEGMRKPAFLSGEQKKAIVDLLFKTNRKVTVKQLKEDYFKKIECFDSVEISGVEDRFNASLGTYHDLLKIIKDKDFLDNEENEDILEDIVLTLTLFEDREMIEERLKTYAHLFDDKVMKQLKRRRYTGWGRLSRKLINGIRDKQSGKTILDFLKSDGFANRNFMQLIHDDSLTFKEDIQKAQVSGQGDSLHEHIANLAGSPAIKKGILQTVKVVDELVKVMGRHKPENIVIEMARENQTTQKGQKNSRERMKRIEEGIKELGSQILKEHPVENTQLQNEKLYLYYLQNGRDMYVDQELDINRLSDYDVDHIVPQSFLKDDSIDNKVLTRSDKARGKSDNVPSEEVVKKMKNYWRQLLNAKLITQRKFDNLTKAERGGLSELDKAGFIKRQLVETRQITKHVAQILDSRMNTKYDENDKLIREVKVITLKSKLVSDFRKDFQFYKVREINNYHHAHDAYLNAVVGTALIKKYPKLESEFVYGDYKVYDVRKMIAKSEQEIGKATAKYFFYSNIMNFFKTEITLANGEIRKRPLIETNGETGEIVWDKGRDFATVRKVLSMPQVNIVKKTEVQTGGFSKESILPKRNSDKLIARKKDWDPKKYGGFDSPTVAYSVLVVAKVEKGKSKKLKSVKELLGITIMERSSFEKNPIDFLEAKGYKEVKKDLIIKLPKYSLFELENGRKRMLASAGELQKGNELALPSKYVNFLYLASHYEKLKGSPEDNEQKQLFVEQHKHYLDEIIEQISEFSKRVILADANLDKVLSAYNKHRDKPIREQAENIIHLFTLTNLGAPAAFKYFDTTIDRKRYTSTKEVLDATLIHQSITGLYETRIDLSQLGGDGGEAAAKPAPGGTLQLEEEYRLFEPESTQKQEMDIWLKNFPQAWAETGGMGTAHCQAPVLIQLKATATPISIRQYPMPHEAYQGIKPHIRRMLDQGILKPCQSPWNTPLLPVKKPGTEDYRPVQDLREVNKRVEDIHPTVPNPYNLLSTLPPSHPWYTVLDLKDAFFCLRLHSESQLLFAFEWRDPEIGLSGQLTWTRLPQGFKNSPTLFNEALHSDLADFRVRYPALVLLQYVDDLLLAAATRTECLEGTKALLETLGNKGYRASAKKAQICLQEVTYLGYSLKDGQRWLTKARKEAILSIPVPKNSRQVREFLGKAGYCRLFIPGFAELAAPLYPLTRPGTLFQWGTEQQLAFEDIKKALLSSPALGLPDITKPFELFIDENSGFAKGVLVQKLGPWKRPVAYLSKKLDTVASGWPPCLRMVAAIAILVKDAGKLTLGQPLTILTSHPVEALVRQPPNKWLSNARMTHYQAMLLDAERVHFGPTVSLNPATLLPLPSGGNHHDCLQILAETHGTRPDLTDQPLPDADLTWYTDGSSFIRNGEREAGAAVTTESEVIWAAPLPPGTSAQRAELIALTQALKMAEGKKLTVYTDSRYAFATTHVHGEIYRRRGWLTSEGKEIKNKNEILALLEALFLPKRLSIIHCPGHQKGDSPQAKGNRLADDTAKKAATETHSSLTVLPAGKRTADGSEFEKRTADGSEFESPKKKAKVE

SEQ ID NO: 1268 - protein, 2093 aa, synthetic construct
MPAAKRVKLDGGDKKYSIGLDIGTNSVGWAVITDEYKVPSKKFKVLGNTDRHSIKKNLIGALLFDSGETAEATRLKRTARRRYTRRKNRICYLQEIFSNEMAKVDDSFFHRLEESFLVEEDKKHERHPIFGNIVDEVAYHEKYPTIYHLRKKLVDSTDKADLRLIYLALAHMIKFRGHFLIEGDLNPDNSDVDKLFIQLVQTYNQLFEENPINASGVDAKAILSARLSKSRRLENLIAQLPGEKKNGLFGNLIALSLGLTPNFKSNFDLAEDAKLQLSKDTYDDDLDNLLAQIGDQYADLFLAAKNLSDAILLSDILRVNTEITKAPLSASMIKRYDEHHQDLTLLKALVRQQLPEKYKEIFFDQSKNGYAGYIDGGASQEEFYKFIKPILEKMDGTEELLVKLNREDLLRKQRTFDNGSIPHQIHLGELHAILRRQEDFYPFLKDNREKIEKILTFRIPYYVGPLARGNSRFAWMTRKSEETITPWNFEEVVDKGASAQSFIERMTNFDKNLPNEKVLPKHSLLYEYFTVYNELTKVKYVTEGMRKPAFLSGEQKKAIVDLLFKTNRKVTVKQLKEDYFKKIECFDSVEISGVEDRFNASLGTYHDLLKIIKDKDFLDNEENEDILEDIVLTLTLFEDREMIEERLKTYAHLFDDKVMKQLKRRRYTGWGRLSRKLINGIRDKQSGKTILDFLKSDGFANRNFMQLIHDDSLTFKEDIQKAQVSGQGDSLHEHIANLAGSPAIKKGILQTVKVVDELVKVMGRHKPENIVIEMARENQTTQKGQKNSRERMKRIEEGIKELGSQILKEHPVENTQLQNEKLYLYYLQNGRDMYVDQELDINRLSDYDVDHIVPQSFLKDDSIDNKVLTRSDKARGKSDNVPSEEVVKKMKNYWRQLLNAKLITQRKFDNLTKAERGGLSELDKAGFIKRQLVETRQITKHVAQILDSRMNTKYDENDKLIREVKVITLKSKLVSDFRKDFQFYKVREINNYHHAHDAYLNAVVGTALIKKYPKLESEFVYGDYKVYDVRKMIAKSEQEIGKATAKYFFYSNIMNFFKTEITLANGEIRKRPLIETNGETGEIVWDKGRDFATVRKVLSMPQVNIVKKTEVQTGGFSKESILPKRNSDKLIARKKDWDPKKYGGFDSPTVAYSVLVVAKVEKGKSKKLKSVKELLGITIMERSSFEKNPIDFLEAKGYKEVKKDLIIKLPKYSLFELENGRKRMLASAGELQKGNELALPSKYVNFLYLASHYEKLKGSPEDNEQKQLFVEQHKHYLDEIIEQISEFSKRVILADANLDKVLSAYNKHRDKPIREQAENIIHLFTLTNLGAPAAFKYFDTTIDRKRYTSTKEVLDATLIHQSITGLYETRIDLSQLGGDGGGGGPAPGGSGGTLQLEEEYRLFEPESTQKQEMDIWLKNFPQAWAETGGMGTAHCQAPVLIQLKATATPISIRQYPMPHEAYQGIKPHIRRMLDQGILKPCQSPWNTPLLPVKKPGTEDYRPVQDLREVNKRVEDIHPTVPNPYNLLSTLPPSHPWYTVLDLKDAFFCLRLHSESQLLFAFEWRDPEIGLSGQLTWTRLPQGFKNSPTLFNEALHSDLADFRVRYPALVLLQYVDDLLLAAATRTECLEGTKALLETLGNKGYRASAKKAQICLQEVTYLGYSLKDGQRWLTKARKEAILSIPVPKNSRQVREFLGKAGYCRLFIPGFAELAAPLYPLTRPGTLFQWGTEQQLAFEDIKKALLSSPALGLPDITKPFELFIDENSGFAKGVLVQKLGPWKRPVAYLSKKLDTVASGWPPCLRMVAAIAILVKDAGKLTLGQPLTILTSHPVEALVRQPPNKWLSNARMTHYQAMLLDAERVHFGPTVSLNPATLLPLPSGGNHHDCLQILAETHGTRPDLTDQPLPDADLTWYTDGSSFIRNGEREAGAAVTTESEVIWAAPLPPGTSAQRAELIALTQALKMAEGKKLTVYTDSRYAFATTHVHGEIYRRRGWLTSEGKEIKNKNEILALLEALFLPKRLSIIHCPGHQKGDSPQAKGNRLADDTAKKAATETHSSLTVLPAGKRTADGSEFEKRTADGSEFESPKKKAKVE

SEQ ID NO: 1269 - protein, 2095 aa, synthetic construct
MPAAKRVKLDGGDKKYSIGLDIGTNSVGWAVITDEYKVPSKKFKVLGNTDRHSIKKNLIGALLFDSGETAEATRLKRTARRRYTRRKNRICYLQEIFSNEMAKVDDSFFHRLEESFLVEEDKKHERHPIFGNIVDEVAYHEKYPTIYHLRKKLVDSTDKADLRLIYLALAHMIKFRGHFLIEGDLNPDNSDVDKLFIQLVQTYNQLFEENPINASGVDAKAILSARLSKSRRLENLIAQLPGEKKNGLFGNLIALSLGLTPNFKSNFDLAEDAKLQLSKDTYDDDLDNLLAQIGDQYADLFLAAKNLSDAILLSDILRVNTEITKAPLSASMIKRYDEHHQDLTLLKALVRQQLPEKYKEIFFDQSKNGYAGYIDGGASQEEFYKFIKPILEKMDGTEELLVKLNREDLLRKQRTFDNGSIPHQIHLGELHAILRRQEDFYPFLKDNREKIEKILTFRIPYYVGPLARGNSRFAWMTRKSEETITPWNFEEVVDKGASAQSFIERMTNFDKNLPNEKVLPKHSLLYEYFTVYNELTKVKYVTEGMRKPAFLSGEQKKAIVDLLFKTNRKVTVKQLKEDYFKKIECFDSVEISGVEDRFNASLGTYHDLLKIIKDKDFLDNEENEDILEDIVLTLTLFEDREMIEERLKTYAHLFDDKVMKQLKRRRYTGWGRLSRKLINGIRDKQSGKTILDFLKSDGFANRNFMQLIHDDSLTFKEDIQKAQVSGQGDSLHEHIANLAGSPAIKKGILQTVKVVDELVKVMGRHKPENIVIEMARENQTTQKGQKNSRERMKRIEEGIKELGSQILKEHPVENTQLQNEKLYLYYLQNGRDMYVDQELDINRLSDYDVDHIVPQSFLKDDSIDNKVLTRSDKARGKSDNVPSEEVVKKMKNYWRQLLNAKLITQRKFDNLTKAERGGLSELDKAGFIKRQLVETRQITKHVAQILDSRMNTKYDENDKLIREVKVITLKSKLVSDFRKDFQFYKVREINNYHHAHDAYLNAVVGTALIKKYPKLESEFVYGDYKVYDVRKMIAKSEQEIGKATAKYFFYSNIMNFFKTEITLANGEIRKRPLIETNGETGEIVWDKGRDFATVRKVLSMPQVNIVKKTEVQTGGFSKESILPKRNSDKLIARKKDWDPKKYGGFDSPTVAYSVLVVAKVEKGKSKKLKSVKELLGITIMERSSFEKNPIDFLEAKGYKEVKKDLIIKLPKYSLFELENGRKRMLASAGELQKGNELALPSKYVNFLYLASHYEKLKGSPEDNEQKQLFVEQHKHYLDEIIEQISEFSKRVILADANLDKVLSAYNKHRDKPIREQAENIIHLFTLTNLGAPAAFKYFDTTIDRKRYTSTKEVLDATLIHQSITGLYETRIDLSQLGGDGGGGSGGGEAAAKGGTLQLEEEYRLFEPESTQKQEMDIWLKNFPQAWAETGGMGTAHCQAPVLIQLKATATPISIRQYPMPHEAYQGIKPHIRRMLDQGILKPCQSPWNTPLLPVKKPGTEDYRPVQDLREVNKRVEDIHPTVPNPYNLLSTLPPSHPWYTVLDLKDAFFCLRLHSESQLLFAFEWRDPEIGLSGQLTWTRLPQGFKNSPTLFNEALHSDLADFRVRYPALVLLQYVDDLLLAAATRTECLEGTKALLETLGNKGYRASAKKAQICLQEVTYLGYSLKDGQRWLTKARKEAILSIPVPKNSRQVREFLGKAGYCRLFIPGFAELAAPLYPLTRPGTLFQWGTEQQLAFEDIKKALLSSPALGLPDITKPFELFIDENSGFAKGVLVQKLGPWKRPVAYLSKKLDTVASGWPPCLRMVAAIAILVKDAGKLTLGQPLTILTSHPVEALVRQPPNKWLSNARMTHYQAMLLDAERVHFGPTVSLNPATLLPLPSGGNHHDCLQILAETHGTRPDLTDQPLPDADLTWYTDGSSFIRNGEREAGAAVTTESEVIWAAPLPPGTSAQRAELIALTQALKMAEGKKLTVYTDSRYAFATTHVHGEIYRRRGWLTSEGKEIKNKNEILALLEALFLPKRLSIIHCPGHQKGDSPQAKGNRLADDTAKKAATETHSSLTVLPAGKRTADGSEFEKRTADGSEFESPKKKAKVE

SEQ ID NO: 1270 - protein, 2093 aa, synthetic construct
MPAAKRVKLDGGDKKYSIGLDIGTNSVGWAVITDEYKVPSKKFKVLGNTDRHSIKKNLIGALLFDSGETAEATRLKRTARRRYTRRKNRICYLQEIFSNEMAKVDDSFFHRLEESFLVEEDKKHERHPIFGNIVDEVAYHEKYPTIYHLRKKLVDSTDKADLRLIYLALAHMIKFRGHFLIEGDLNPDNSDVDKLFIQLVQTYNQLFEENPINASGVDAKAILSARLSKSRRLENLIAQLPGEKKNGLFGNLIALSLGLTPNFKSNFDLAEDAKLQLSKDTYDDDLDNLLAQIGDQYADLFLAAKNLSDAILLSDILRVNTEITKAPLSASMIKRYDEHHQDLTLLKALVRQQLPEKYKEIFFDQSKNGYAGYIDGGASQEEFYKFIKPILEKMDGTEELLVKLNREDLLRKQRTFDNGSIPHQIHLGELHAILRRQEDFYPFLKDNREKIEKILTFRIPYYVGPLARGNSRFAWMTRKSEETITPWNFEEVVDKGASAQSFIERMTNFDKNLPNEKVLPKHSLLYEYFTVYNELTKVKYVTEGMRKPAFLSGEQKKAIVDLLFKTNRKVTVKQLKEDYFKKIECFDSVEISGVEDRFNASLGTYHDLLKIIKDKDFLDNEENEDILEDIVLTLTLFEDREMIEERLKTYAHLFDDKVMKQLKRRRYTGWGRLSRKLINGIRDKQSGKTILDFLKSDGFANRNFMQLIHDDSLTFKEDIQKAQVSGQGDSLHEHIANLAGSPAIKKGILQTVKVVDELVKVMGRHKPENIVIEMARENQTTQKGQKNSRERMKRIEEGIKELGSQILKEHPVENTQLQNEKLYLYYLQNGRDMYVDQELDINRLSDYDVDHIVPQSFLKDDSIDNKVLTRSDKARGKSDNVPSEEVVKKMKNYWRQLLNAKLITQRKFDNLTKAERGGLSELDKAGFIKRQLVETRQITKHVAQILDSRMNTKYDENDKLIREVKVITLKSKLVSDFRKDFQFYKVREINNYHHAHDAYLNAVVGTALIKKYPKLESEFVYGDYKVYDVRKMIAKSEQEIGKATAKYFFYSNIMNFFKTEITLANGEIRKRPLIETNGETGEIVWDKGRDFATVRKVLSMPQVNIVKKTEVQTGGFSKESILPKRNSDKLIARKKDWDPKKYGGFDSPTVAYSVLVVAKVEKGKSKKLKSVKELLGITIMERSSFEKNPIDFLEAKGYKEVKKDLIIKLPKYSLFELENGRKRMLASAGELQKGNELALPSKYVNFLYLASHYEKLKGSPEDNEQKQLFVEQHKHYLDEIIEQISEFSKRVILADANLDKVLSAYNKHRDKPIREQAENIIHLFTLTNLGAPAAFKYFDTTIDRKRYTSTKEVLDATLIHQSITGLYETRIDLSQLGGDGGGGSGSSGGGGGTLQLEEEYRLFEPESTQKQEMDIWLKNFPQAWAETGGMGTAHCQAPVLIQLKATATPISIRQYPMPHEAYQGIKPHIRRMLDQGILKPCQSPWNTPLLPVKKPGTEDYRPVQDLREVNKRVEDIHPTVPNPYNLLSTLPPSHPWYTVLDLKDAFFCLRLHSESQLLFAFEWRDPEIGLSGQLTWTRLPQGFKNSPTLFNEALHSDLADFRVRYPALVLLQYVDDLLLAAATRTECLEGTKALLETLGNKGYRASAKKAQICLQEVTYLGYSLKDGQRWLTKARKEAILSIPVPKNSRQVREFLGKAGYCRLFIPGFAELAAPLYPLTRPGTLFQWGTEQQLAFEDIKKALLSSPALGLPDITKPFELFIDENSGFAKGVLVQKLGPWKRPVAYLSKKLDTVASGWPPCLRMVAAIAILVKDAGKLTLGQPLTILTSHPVEALVRQPPNKWLSNARMTHYQAMLLDAERVHFGPTVSLNPATLLPLPSGGNHHDCLQILAETHGTRPDLTDQPLPDADLTWYTDGSSFIRNGEREAGAAVTTESEVIWAAPLPPGTSAQRAELIALTQALKMAEGKKLTVYTDSRYAFATTHVHGEIYRRRGWLTSEGKEIKNKNEILALLEALFLPKRLSIIHCPGHQKGDSPQAKGNRLADDTAKKAATETHSSLTVLPAGKRTADGSEFEKRTADGSEFESPKKKAKVE

SEQ ID NO: 1271 - protein, 2092 aa, synthetic construct
MPAAKRVKLDGGDKKYSIGLDIGTNSVGWAVITDEYKVPSKKFKVLGNTDRHSIKKNLIGALLFDSGETAEATRLKRTARRRYTRRKNRICYLQEIFSNEMAKVDDSFFHRLEESFLVEEDKKHERHPIFGNIVDEVAYHEKYPTIYHLRKKLVDSTDKADLRLIYLALAHMIKFRGHFLIEGDLNPDNSDVDKLFIQLVQTYNQLFEENPINASGVDAKAILSARLSKSRRLENLIAQLPGEKKNGLFGNLIALSLGLTPNFKSNFDLAEDAKLQLSKDTYDDDLDNLLAQIGDQYADLFLAAKNLSDAILLSDILRVNTEITKAPLSASMIKRYDEHHQDLTLLKALVRQQLPEKYKEIFFDQSKNGYAGYIDGGASQEEFYKFIKPILEKMDGTEELLVKLNREDLLRKQRTFDNGSIPHQIHLGELHAILRRQEDFYPFLKDNREKIEKILTFRIPYYVGPLARGNSRFAWMTRKSEETITPWNFEEVVDKGASAQSFIERMTNFDKNLPNEKVLPKHSLLYEYFTVYNELTKVKYVTEGMRKPAFLSGEQKKAIVDLLFKTNRKVTVKQLKEDYFKKIECFDSVEISGVEDRFNASLGTYHDLLKIIKDKDFLDNEENEDILEDIVLTLTLFEDREMIEERLKTYAHLFDDKVMKQLKRRRYTGWGRLSRKLINGIRDKQSGKTILDFLKSDGFANRNFMQLIHDDSLTFKEDIQKAQVSGQGDSLHEHIANLAGSPAIKKGILQTVKVVDELVKVMGRHKPENIVIEMARENQTTQKGQKNSRERMKRIEEGIKELGSQILKEHPVENTQLQNEKLYLYYLQNGRDMYVDQELDINRLSDYDVDHIVPQSFLKDDSIDNKVLTRSDKARGKSDNVPSEEVVKKMKNYWRQLLNAKLITQRKFDNLTKAERGGLSELDKAGFIKRQLVETRQITKHVAQILDSRMNTKYDENDKLIREVKVITLKSKLVSDFRKDFQFYKVREINNYHHAHDAYLNAVVGTALIKKYPKLESEFVYGDYKVYDVRKMIAKSEQEIGKATAKYFFYSNIMNFFKTEITLANGEIRKRPLIETNGETGEIVWDKGRDFATVRKVLSMPQVNIVKKTEVQTGGFSKESILPKRNSDKLIARKKDWDPKKYGGFDSPTVAYSVLVVAKVEKGKSKKLKSVKELLGITIMERSSFEKNPIDFLEAKGYKEVKKDLIIKLPKYSLFELENGRKRMLASAGELQKGNELALPSKYVNFLYLASHYEKLKGSPEDNEQKQLFVEQHKHYLDEIIEQISEFSKRVILADANLDKVLSAYNKHRDKPIREQAENIIHLFTLTNLGAPAAFKYFDTTIDRKRYTSTKEVLDATLIHQSITGLYETRIDLSQLGGDGGEAAAKGGGGGTLQLEEEYRLFEPESTQKQEMDIWLKNFPQAWAETGGMGTAHCQAPVLIQLKATATPISIRQYPMPHEAYQGIKPHIRRMLDQGILKPCQSPWNTPLLPVKKPGTEDYRPVQDLREVNKRVEDIHPTVPNPYNLLSTLPPSHPWYTVLDLKDAFFCLRLHSESQLLFAFEWRDPEIGLSGQLTWTRLPQGFKNSPTLFNEALHSDLADFRVRYPALVLLQYVDDLLLAAATRTECLEGTKALLETLGNKGYRASAKKAQICLQEVTYLGYSLKDGQRWLTKARKEAILSIPVPKNSRQVREFLGKAGYCRLFIPGFAELAAPLYPLTRPGTLFQWGTEQQLAFEDIKKALLSSPALGLPDITKPFELFIDENSGFAKGVLVQKLGPWKRPVAYLSKKLDTVASGWPPCLRMVAAIAILVKDAGKLTLGQPLTILTSHPVEALVRQPPNKWLSNARMTHYQAMLLDAERVHFGPTVSLNPATLLPLPSGGNHHDCLQILAETHGTRPDLTDQPLPDADLTWYTDGSSFIRNGEREAGAAVTTESEVIWAAPLPPGTSAQRAELIALTQALKMAEGKKLTVYTDSRYAFATTHVHGEIYRRRGWLTSEGKEIKNKNEILALLEALFLPKRLSIIHCPGHQKGDSPQAKGNRLADDTAKKAATETHSSLTVLPAGKRTADGSEFEKRTADGSEFESPKKKAKVE

SEQ ID NO: 1272 - protein, 2090 aa, synthetic construct
MPAAKRVKLDGGDKKYSIGLDIGTNSVGWAVITDEYKVPSKKFKVLGNTDRHSIKKNLIGALLFDSGETAEATRLKRTARRRYTRRKNRICYLQEIFSNEMAKVDDSFFHRLEESFLVEEDKKHERHPIFGNIVDEVAYHEKYPTIYHLRKKLVDSTDKADLRLIYLALAHMIKFRGHFLIEGDLNPDNSDVDKLFIQLVQTYNQLFEENPINASGVDAKAILSARLSKSRRLENLIAQLPGEKKNGLFGNLIALSLGLTPNFKSNFDLAEDAKLQLSKDTYDDDLDNLLAQIGDQYADLFLAAKNLSDAILLSDILRVNTEITKAPLSASMIKRYDEHHQDLTLLKALVRQQLPEKYKEIFFDQSKNGYAGYIDGGASQEEFYKFIKPILEKMDGTEELLVKLNREDLLRKQRTFDNGSIPHQIHLGELHAILRRQEDFYPFLKDNREKIEKILTFRIPYYVGPLARGNSRFAWMTRKSEETITPWNFEEVVDKGASAQSFIERMTNFDKNLPNEKVLPKHSLLYEYFTVYNELTKVKYVTEGMRKPAFLSGEQKKAIVDLLFKTNRKVTVKQLKEDYFKKIECFDSVEISGVEDRFNASLGTYHDLLKIIKDKDFLDNEENEDILEDIVLTLTLFEDREMIEERLKTYAHLFDDKVMKQLKRRRYTGWGRLSRKLINGIRDKQSGKTILDFLKSDGFANRNFMQLIHDDSLTFKEDIQKAQVSGQGDSLHEHIANLAGSPAIKKGILQTVKVVDELVKVMGRHKPENIVIEMARENQTTQKGQKNSRERMKRIEEGIKELGSQILKEHPVENTQLQNEKLYLYYLQNGRDMYVDQELDINRLSDYDVDHIVPQSFLKDDSIDNKVLTRSDKARGKSDNVPSEEVVKKMKNYWRQLLNAKLITQRKFDNLTKAERGGLSELDKAGFIKRQLVETRQITKHVAQILDSRMNTKYDENDKLIREVKVITLKSKLVSDFRKDFQFYKVREINNYHHAHDAYLNAVVGTALIKKYPKLESEFVYGDYKVYDVRKMIAKSEQEIGKATAKYFFYSNIMNFFKTEITLANGEIRKRPLIETNGETGEIVWDKGRDFATVRKVLSMPQVNIVKKTEVQTGGFSKESILPKRNSDKLIARKKDWDPKKYGGFDSPTVAYSVLVVAKVEKGKSKKLKSVKELLGITIMERSSFEKNPIDFLEAKGYKEVKKDLIIKLPKYSLFELENGRKRMLASAGELQKGNELALPSKYVNFLYLASHYEKLKGSPEDNEQKQLFVEQHKHYLDEIIEQISEFSKRVILADANLDKVLSAYNKHRDKPIREQAENIIHLFTLTNLGAPAAFKYFDTTIDRKRYTSTKEVLDATLIHQSITGLYETRIDLSQLGGDGGGGGGSSGGTLQLEEEYRLFEPESTQKQEMDIWLKNFPQAWAETGGMGTAHCQAPVLIQLKATATPISIRQYPMPHEAYQGIKPHIRRMLDQGILKPCQSPWNTPLLPVKKPGTEDYRPVQDLREVNKRVEDIHPTVPNPYNLLSTLPPSHPWYTVLDLKDAFFCLRLHSESQLLFAFEWRDPEIGLSGQLTWTRLPQGFKNSPTLFNEALHSDLADFRVRYPALVLLQYVDDLLLAAATRTECLEGTKALLETLGNKGYRASAKKAQICLQEVTYLGYSLKDGQRWLTKARKEAILSIPVPKNSRQVREFLGKAGYCRLFIPGFAELAAPLYPLTRPGTLFQWGTEQQLAFEDIKKALLSSPALGLPDITKPFELFIDENSGFAKGVLVQKLGPWKRPVAYLSKKLDTVASGWPPCLRMVAAIAILVKDAGKLTLGQPLTILTSHPVEALVRQPPNKWLSNARMTHYQAMLLDAERVHFGPTVSLNPATLLPLPSGGNHHDCLQILAETHGTRPDLTDQPLPDADLTWYTDGSSFIRNGEREAGAAVTTESEVIWAAPLPPGTSAQRAELIALTQALKMAEGKKLTVYTDSRYAFATTHVHGEIYRRRGWLTSEGKEIKNKNEILALLEALFLPKRLSIIHCPGHQKGDSPQAKGNRLADDTAKKAATETHSSLTVLPAGKRTADGSEFEKRTADGSEFESPKKKAKVE

SEQ ID NO: 1273 - protein, 2089 aa, synthetic construct
MPAAKRVKLDGGDKKYSIGLDIGTNSVGWAVITDEYKVPSKKFKVLGNTDRHSIKKNLIGALLFDSGETAEATRLKRTARRRYTRRKNRICYLQEIFSNEMAKVDDSFFHRLEESFLVEEDKKHERHPIFGNIVDEVAYHEKYPTIYHLRKKLVDSTDKADLRLIYLALAHMIKFRGHFLIEGDLNPDNSDVDKLFIQLVQTYNQLFEENPINASGVDAKAILSARLSKSRRLENLIAQLPGEKKNGLFGNLIALSLGLTPNFKSNFDLAEDAKLQLSKDTYDDDLDNLLAQIGDQYADLFLAAKNLSDAILLSDILRVNTEITKAPLSASMIKRYDEHHQDLTLLKALVRQQLPEKYKEIFFDQSKNGYAGYIDGGASQEEFYKFIKPILEKMDGTEELLVKLNREDLLRKQRTFDNGSIPHQIHLGELHAILRRQEDFYPFLKDNREKIEKILTFRIPYYVGPLARGNSRFAWMTRKSEETITPWNFEEVVDKGASAQSFIERMTNFDKNLPNEKVLPKHSLLYEYFTVYNELTKVKYVTEGMRKPAFLSGEQKKAIVDLLFKTNRKVTVKQLKEDYFKKIECFDSVEISGVEDRFNASLGTYHDLLKIIKDKDFLDNEENEDILEDIVLTLTLFEDREMIEERLKTYAHLFDDKVMKQLKRRRYTGWGRLSRKLINGIRDKQSGKTILDFLKSDGFANRNFMQLIHDDSLTFKEDIQKAQVSGQGDSLHEHIANLAGSPAIKKGILQTVKVVDELVKVMGRHKPENIVIEMARENQTTQKGQKNSRERMKRIEEGIKELGSQILKEHPVENTQLQNEKLYLYYLQNGRDMYVDQELDINRLSDYDVDHIVPQSFLKDDSIDNKVLTRSDKARGKSDNVPSEEVVKKMKNYWRQLLNAKLITQRKFDNLTKAERGGLSELDKAGFIKRQLVETRQITKHVAQILDSRMNTKYDENDKLIREVKVITLKSKLVSDFRKDFQFYKVREINNYHHAHDAYLNAVVGTALIKKYPKLESEFVYGDYKVYDVRKMIAKSEQEIGKATAKYFFYSNIMNFFKTEITLANGEIRKRPLIETNGETGEIVWDKGRDFATVRKVLSMPQVNIVKKTEVQTGGFSKESILPKRNSDKLIARKKDWDPKKYGGFDSPTVAYSVLVVAKVEKGKSKKLKSVKELLGITIMERSSFEKNPIDFLEAKGYKEVKKDLIIKLPKYSLFELENGRKRMLASAGELQKGNELALPSKYVNFLYLASHYEKLKGSPEDNEQKQLFVEQHKHYLDEIIEQISEFSKRVILADANLDKVLSAYNKHRDKPIREQAENIIHLFTLTNLGAPAAFKYFDTTIDRKRYTSTKEVLDATLIHQSITGLYETRIDLSQLGGDGGGGGGSGGTLQLEEEYRLFEPESTQKQEMDIWLKNFPQAWAETGGMGTAHCQAPVLIQLKATATPISIRQYPMPHEAYQGIKPHIRRMLDQGILKPCQSPWNTPLLPVKKPGTEDYRPVQDLREVNKRVEDIHPTVPNPYNLLSTLPPSHPWYTVLDLKDAFFCLRLHSESQLLFAFEWRDPEIGLSGQLTWTRLPQGFKNSPTLFNEALHSDLADFRVRYPALVLLQYVDDLLLAAATRTECLEGTKALLETLGNKGYRASAKKAQICLQEVTYLGYSLKDGQRWLTKARKEAILSIPVPKNSRQVREFLGKAGYCRLFIPGFAELAAPLYPLTRPGTLFQWGTEQQLAFEDIKKALLSSPALGLPDITKPFELFIDENSGFAKGVLVQKLGPWKRPVAYLSKKLDTVASGWPPCLRMVAAIAILVKDAGKLTLGQPLTILTSHPVEALVRQPPNKWLSNARMTHYQAMLLDAERVHFGPTVSLNPATLLPLPSGGNHHDCLQILAETHGTRPDLTDQPLPDADLTWYTDGSSFIRNGEREAGAAVTTESEVIWAAPLPPGTSAQRAELIALTQALKMAEGKKLTVYTDSRYAFATTHVHGEIYRRRGWLTSEGKEIKNKNEILALLEALFLPKRLSIIHCPGHQKGDSPQAKGNRLADDTAKKAATETHSSLTVLPAGKRTADGSEFEKRTADGSEFESPKKKAKVE

SEQ ID NO: 1274 - protein, 2099 aa, synthetic construct
MPAAKRVKLDGGDKKYSIGLDIGTNSVGWAVITDEYKVPSKKFKVLGNTDRHSIKKNLIGALLFDSGETAEATRLKRTARRRYTRRKNRICYLQEIFSNEMAKVDDSFFHRLEESFLVEEDKKHERHPIFGNIVDEVAYHEKYPTIYHLRKKLVDSTDKADLRLIYLALAHMIKFRGHFLIEGDLNPDNSDVDKLFIQLVQTYNQLFEENPINASGVDAKAILSARLSKSRRLENLIAQLPGEKKNGLFGNLIALSLGLTPNFKSNFDLAEDAKLQLSKDTYDDDLDNLLAQIGDQYADLFLAAKNLSDAILLSDILRVNTEITKAPLSASMIKRYDEHHQDLTLLKALVRQQLPEKYKEIFFDQSKNGYAGYIDGGASQEEFYKFIKPILEKMDGTEELLVKLNREDLLRKQRTFDNGSIPHQIHLGELHAILRRQEDFYPFLKDNREKIEKILTFRIPYYVGPLARGNSRFAWMTRKSEETITPWNFEEVVDKGASAQSFIERMTNFDKNLPNEKVLPKHSLLYEYFTVYNELTKVKYVTEGMRKPAFLSGEQKKAIVDLLFKTNRKVTVKQLKEDYFKKIECFDSVEISGVEDRFNASLGTYHDLLKIIKDKDFLDNEENEDILEDIVLTLTLFEDREMIEERLKTYAHLFDDKVMKQLKRRRYTGWGRLSRKLINGIRDKQSGKTILDFLKSDGFANRNFMQLIHDDSLTFKEDIQKAQVSGQGDSLHEHIANLAGSPAIKKGILQTVKVVDELVKVMGRHKPENIVIEMARENQTTQKGQKNSRERMKRIEEGIKELGSQILKEHPVENTQLQNEKLYLYYLQNGRDMYVDQELDINRLSDYDVDHIVPQSFLKDDSIDNKVLTRSDKARGKSDNVPSEEVVKKMKNYWRQLLNAKLITQRKFDNLTKAERGGLSELDKAGFIKRQLVETRQITKHVAQILDSRMNTKYDENDKLIREVKVITLKSKLVSDFRKDFQFYKVREINNYHHAHDAYLNAVVGTALIKKYPKLESEFVYGDYKVYDVRKMIAKSEQEIGKATAKYFFYSNIMNFFKTEITLANGEIRKRPLIETNGETGEIVWDKGRDFATVRKVLSMPQVNIVKKTEVQTGGFSKESILPKRNSDKLIARKKDWDPKKYGGFDSPTVAYSVLVVAKVEKGKSKKLKSVKELLGITIMERSSFEKNPIDFLEAKGYKEVKKDLIIKLPKYSLFELENGRKRMLASAGELQKGNELALPSKYVNFLYLASHYEKLKGSPEDNEQKQLFVEQHKHYLDEIIEQISEFSKRVILADANLDKVLSAYNKHRDKPIREQAENIIHLFTLTNLGAPAAFKYFDTTIDRKRYTSTKEVLDATLIHQSITGLYETRIDLSQLGGDGGGSSGSSGSSGSSGSSGGTLQLEEEYRLFEPESTQKQEMDIWLKNFPQAWAETGGMGTAHCQAPVLIQLKATATPISIRQYPMPHEAYQGIKPHIRRMLDQGILKPCQSPWNTPLLPVKKPGTEDYRPVQDLREVNKRVEDIHPTVPNPYNLLSTLPPSHPWYTVLDLKDAFFCLRLHSESQLLFAFEWRDPEIGLSGQLTWTRLPQGFKNSPTLFNEALHSDLADFRVRYPALVLLQYVDDLLLAAATRTECLEGTKALLETLGNKGYRASAKKAQICLQEVTYLGYSLKDGQRWLTKARKEAILSIPVPKNSRQVREFLGKAGYCRLFIPGFAELAAPLYPLTRPGTLFQWGTEQQLAFEDIKKALLSSPALGLPDITKPFELFIDENSGFAKGVLVQKLGPWKRPVAYLSKKLDTVASGWPPCLRMVAAIAILVKDAGKLTLGQPLTILTSHPVEALVRQPPNKWLSNARMTHYQAMLLDAERVHFGPTVSLNPATLLPLPSGGNHHDCLQILAETHGTRPDLTDQPLPDADLTWYTDGSSFIRNGEREAGAAVTTESEVIWAAPLPPGTSAQRAELIALTQALKMAEGKKLTVYTDSRYAFATTHVHGEIYRRRGWLTSEGKEIKNKNEILALLEALFLPKRLSIIHCPGHQKGDSPQAKGNRLADDTAKKAATETHSSLTVLPAGKRTADGSEFEKRTADGSEFESPKKKAKVE

SEQ ID NO: 1275 - protein, 2093 aa, synthetic construct
MPAAKRVKLDGGDKKYSIGLDIGTNSVGWAVITDEYKVPSKKFKVLGNTDRHSIKKNLIGALLFDSGETAEATRLKRTARRRYTRRKNRICYLQEIFSNEMAKVDDSFFHRLEESFLVEEDKKHERHPIFGNIVDEVAYHEKYPTIYHLRKKLVDSTDKADLRLIYLALAHMIKFRGHFLIEGDLNPDNSDVDKLFIQLVQTYNQLFEENPINASGVDAKAILSARLSKSRRLENLIAQLPGEKKNGLFGNLIALSLGLTPNFKSNFDLAEDAKLQLSKDTYDDDLDNLLAQIGDQYADLFLAAKNLSDAILLSDILRVNTEITKAPLSASMIKRYDEHHQDLTLLKALVRQQLPEKYKEIFFDQSKNGYAGYIDGGASQEEFYKFIKPILEKMDGTEELLVKLNREDLLRKQRTFDNGSIPHQIHLGELHAILRRQEDFYPFLKDNREKIEKILTFRIPYYVGPLARGNSRFAWMTRKSEETITPWNFEEVVDKGASAQSFIERMTNFDKNLPNEKVLPKHSLLYEYFTVYNELTKVKYVTEGMRKPAFLSGEQKKAIVDLLFKTNRKVTVKQLKEDYFKKIECFDSVEISGVEDRFNASLGTYHDLLKIIKDKDFLDNEENEDILEDIVLTLTLFEDREMIEERLKTYAHLFDDKVMKQLKRRRYTGWGRLSRKLINGIRDKQSGKTILDFLKSDGFANRNFMQLIHDDSLTFKEDIQKAQVSGQGDSLHEHIANLAGSPAIKKGILQTVKVVDELVKVMGRHKPENIVIEMARENQTTQKGQKNSRERMKRIEEGIKELGSQILKEHPVENTQLQNEKLYLYYLQNGRDMYVDQELDINRLSDYDVDHIVPQSFLKDDSIDNKVLTRSDKARGKSDNVPSEEVVKKMKNYWRQLLNAKLITQRKFDNLTKAERGGLSELDKAGFIKRQLVETRQITKHVAQILDSRMNTKYDENDKLIREVKVITLKSKLVSDFRKDFQFYKVREINNYHHAHDAYLNAVVGTALIKKYPKLESEFVYGDYKVYDVRKMIAKSEQEIGKATAKYFFYSNIMNFFKTEITLANGEIRKRPLIETNGETGEIVWDKGRDFATVRKVLSMPQVNIVKKTEVQTGGFSKESILPKRNSDKLIARKKDWDPKKYGGFDSPTVAYSVLVVAKVEKGKSKKLKSVKELLGITIMERSSFEKNPIDFLEAKGYKEVKKDLIIKLPKYSLFELENGRKRMLASAGELQKGNELALPSKYVNFLYLASHYEKLKGSPEDNEQKQLFVEQHKHYLDEIIEQISEFSKRVILADANLDKVLSAYNKHRDKPIREQAENIIHLFTLTNLGAPAAFKYFDTTIDRKRYTSTKEVLDATLIHQSITGLYETRIDLSQLGGDGGGGSGGGGSSGGTLQLEEEYRLFEPESTQKQEMDIWLKNFPQAWAETGGMGTAHCQAPVLIQLKATATPISIRQYPMPHEAYQGIKPHIRRMLDQGILKPCQSPWNTPLLPVKKPGTEDYRPVQDLREVNKRVEDIHPTVPNPYNLLSTLPPSHPWYTVLDLKDAFFCLRLHSESQLLFAFEWRDPEIGLSGQLTWTRLPQGFKNSPTLFNEALHSDLADFRVRYPALVLLQYVDDLLLAAATRTECLEGTKALLETLGNKGYRASAKKAQICLQEVTYLGYSLKDGQRWLTKARKEAILSIPVPKNSRQVREFLGKAGYCRLFIPGFAELAAPLYPLTRPGTLFQWGTEQQLAFEDIKKALLSSPALGLPDITKPFELFIDENSGFAKGVLVQKLGPWKRPVAYLSKKLDTVASGWPPCLRMVAAIAILVKDAGKLTLGQPLTILTSHPVEALVRQPPNKWLSNARMTHYQAMLLDAERVHFGPTVSLNPATLLPLPSGGNHHDCLQILAETHGTRPDLTDQPLPDADLTWYTDGSSFIRNGEREAGAAVTTESEVIWAAPLPPGTSAQRAELIALTQALKMAEGKKLTVYTDSRYAFATTHVHGEIYRRRGWLTSEGKEIKNKNEILALLEALFLPKRLSIIHCPGHQKGDSPQAKGNRLADDTAKKAATETHSSLTVLPAGKRTADGSEFEKRTADGSEFESPKKKAKVE

SEQ ID NO: 1276 - protein, 2093 aa, synthetic construct
MPAAKRVKLDGGDKKYSIGLDIGTNSVGWAVITDEYKVPSKKFKVLGNTDRHSIKKNLIGALLFDSGETAEATRLKRTARRRYTRRKNRICYLQEIFSNEMAKVDDSFFHRLEESFLVEEDKKHERHPIFGNIVDEVAYHEKYPTIYHLRKKLVDSTDKADLRLIYLALAHMIKFRGHFLIEGDLNPDNSDVDKLFIQLVQTYNQLFEENPINASGVDAKAILSARLSKSRRLENLIAQLPGEKKNGLFGNLIALSLGLTPNFKSNFDLAEDAKLQLSKDTYDDDLDNLLAQIGDQYADLFLAAKNLSDAILLSDILRVNTEITKAPLSASMIKRYDEHHQDLTLLKALVRQQLPEKYKEIFFDQSKNGYAGYIDGGASQEEFYKFIKPILEKMDGTEELLVKLNREDLLRKQRTFDNGSIPHQIHLGELHAILRRQEDFYPFLKDNREKIEKILTFRIPYYVGPLARGNSRFAWMTRKSEETITPWNFEEVVDKGASAQSFIERMTNFDKNLPNEKVLPKHSLLYEYFTVYNELTKVKYVTEGMRKPAFLSGEQKKAIVDLLFKTNRKVTVKQLKEDYFKKIECFDSVEISGVEDRFNASLGTYHDLLKIIKDKDFLDNEENEDILEDIVLTLTLFEDREMIEERLKTYAHLFDDKVMKQLKRRRYTGWGRLSRKLINGIRDKQSGKTILDFLKSDGFANRNFMQLIHDDSLTFKEDIQKAQVSGQGDSLHEHIANLAGSPAIKKGILQTVKVVDELVKVMGRHKPENIVIEMARENQTTQKGQKNSRERMKRIEEGIKELGSQILKEHPVENTQLQNEKLYLYYLQNGRDMYVDQELDINRLSDYDVDHIVPQSFLKDDSIDNKVLTRSDKARGKSDNVPSEEVVKKMKNYWRQLLNAKLITQRKFDNLTKAERGGLSELDKAGFIKRQLVETRQITKHVAQILDSRMNTKYDENDKLIREVKVITLKSKLVSDFRKDFQFYKVREINNYHHAHDAYLNAVVGTALIKKYPKLESEFVYGDYKVYDVRKMIAKSEQEIGKATAKYFFYSNIMNFFKTEITLANGEIRKRPLIETNGETGEIVWDKGRDFATVRKVLSMPQVNIVKKTEVQTGGFSKESILPKRNSDKLIARKKDWDPKKYGGFDSPTVAYSVLVVAKVEKGKSKKLKSVKELLGITIMERSSFEKNPIDFLEAKGYKEVKKDLIIKLPKYSLFELENGRKRMLASAGELQKGNELALPSKYVNFLYLASHYEKLKGSPEDNEQKQLFVEQHKHYLDEIIEQISEFSKRVILADANLDKVLSAYNKHRDKPIREQAENIIHLFTLTNLGAPAAFKYFDTTIDRKRYTSTKEVLDATLIHQSITGLYETRIDLSQLGGDGGPAPGSSGGSGGTLQLEEEYRLFEPESTQKQEMDIWLKNFPQAWAETGGMGTAHCQAPVLIQLKATATPISIRQYPMPHEAYQGIKPHIRRMLDQGILKPCQSPWNTPLLPVKKPGTEDYRPVQDLREVNKRVEDIHPTVPNPYNLLSTLPPSHPWYTVLDLKDAFFCLRLHSESQLLFAFEWRDPEIGLSGQLTWTRLPQGFKNSPTLFNEALHSDLADFRVRYPALVLLQYVDDLLLAAATRTECLEGTKALLETLGNKGYRASAKKAQICLQEVTYLGYSLKDGQRWLTKARKEAILSIPVPKNSRQVREFLGKAGYCRLFIPGFAELAAPLYPLTRPGTLFQWGTEQQLAFEDIKKALLSSPALGLPDITKPFELFIDENSGFAKGVLVQKLGPWKRPVAYLSKKLDTVASGWPPCLRMVAAIAILVKDAGKLTLGQPLTILTSHPVEALVRQPPNKWLSNARMTHYQAMLLDAERVHFGPTVSLNPATLLPLPSGGNHHDCLQILAETHGTRPDLTDQPLPDADLTWYTDGSSFIRNGEREAGAAVTTESEVIWAAPLPPGTSAQRAELIALTQALKMAEGKKLTVYTDSRYAFATTHVHGEIYRRRGWLTSEGKEIKNKNEILALLEALFLPKRLSIIHCPGHQKGDSPQAKGNRLADDTAKKAATETHSSLTVLPAGKRTADGSEFEKRTADGSEFESPKKKAKVE

SEQ ID NO: 1277 - protein, 2093 aa, synthetic construct
MPAAKRVKLDGGDKKYSIGLDIGTNSVGWAVITDEYKVPSKKFKVLGNTDRHSIKKNLIGALLFDSGETAEATRLKRTARRRYTRRKNRICYLQEIFSNEMAKVDDSFFHRLEESFLVEEDKKHERHPIFGNIVDEVAYHEKYPTIYHLRKKLVDSTDKADLRLIYLALAHMIKFRGHFLIEGDLNPDNSDVDKLFIQLVQTYNQLFEENPINASGVDAKAILSARLSKSRRLENLIAQLPGEKKNGLFGNLIALSLGLTPNFKSNFDLAEDAKLQLSKDTYDDDLDNLLAQIGDQYADLFLAAKNLSDAILLSDILRVNTEITKAPLSASMIKRYDEHHQDLTLLKALVRQQLPEKYKEIFFDQSKNGYAGYIDGGASQEEFYKFIKPILEKMDGTEELLVKLNREDLLRKQRTFDNGSIPHQIHLGELHAILRRQEDFYPFLKDNREKIEKILTFRIPYYVGPLARGNSRFAWMTRKSEETITPWNFEEVVDKGASAQSFIERMTNFDKNLPNEKVLPKHSLLYEYFTVYNELTKVKYVTEGMRKPAFLSGEQKKAIVDLLFKTNRKVTVKQLKEDYFKKIECFDSVEISGVEDRFNASLGTYHDLLKIIKDKDFLDNEENEDILEDIVLTLTLFEDREMIEERLKTYAHLFDDKVMKQLKRRRYTGWGRLSRKLINGIRDKQSGKTILDFLKSDGFANRNFMQLIHDDSLTFKEDIQKAQVSGQGDSLHEHIANLAGSPAIKKGILQTVKVVDELVKVMGRHKPENIVIEMARENQTTQKGQKNSRERMKRIEEGIKELGSQILKEHPVENTQLQNEKLYLYYLQNGRDMYVDQELDINRLSDYDVDHIVPQSFLKDDSIDNKVLTRSDKARGKSDNVPSEEVVKKMKNYWRQLLNAKLITQRKFDNLTKAERGGLSELDKAGFIKRQLVETRQITKHVAQILDSRMNTKYDENDKLIREVKVITLKSKLVSDFRKDFQFYKVREINNYHHAHDAYLNAVVGTALIKKYPKLESEFVYGDYKVYDVRKMIAKSEQEIGKATAKYFFYSNIMNFFKTEITLANGEIRKRPLIETNGETGEIVWDKGRDFATVRKVLSMPQVNIVKKTEVQTGGFSKESILPKRNSDKLIARKKDWDPKKYGGFDSPTVAYSVLVVAKVEKGKSKKLKSVKELLGITIMERSSFEKNPIDFLEAKGYKEVKKDLIIKLPKYSLFELENGRKRMLASAGELQKGNELALPSKYVNFLYLASHYEKLKGSPEDNEQKQLFVEQHKHYLDEIIEQISEFSKRVILADANLDKVLSAYNKHRDKPIREQAENIIHLFTLTNLGAPAAFKYFDTTIDRKRYTSTKEVLDATLIHQSITGLYETRIDLSQLGGDGGPAPGGGGSSGGTLQLEEEYRLFEPESTQKQEMDIWLKNFPQAWAETGGMGTAHCQAPVLIQLKATATPISIRQYPMPHEAYQGIKPHIRRMLDQGILKPCQSPWNTPLLPVKKPGTEDYRPVQDLREVNKRVEDIHPTVPNPYNLLSTLPPSHPWYTVLDLKDAFFCLRLHSESQLLFAFEWRDPEIGLSGQLTWTRLPQGFKNSPTLFNEALHSDLADFRVRYPALVLLQYVDDLLLAAATRTECLEGTKALLETLGNKGYRASAKKAQICLQEVTYLGYSLKDGQRWLTKARKEAILSIPVPKNSRQVREFLGKAGYCRLFIPGFAELAAPLYPLTRPGTLFQWGTEQQLAFEDIKKALLSSPALGLPDITKPFELFIDENSGFAKGVLVQKLGPWKRPVAYLSKKLDTVASGWPPCLRMVAAIAILVKDAGKLTLGQPLTILTSHPVEALVRQPPNKWLSNARMTHYQAMLLDAERVHFGPTVSLNPATLLPLPSGGNHHDCLQILAETHGTRPDLTDQPLPDADLTWYTDGSSFIRNGEREAGAAVTTESEVIWAAPLPPGTSAQRAELIALTQALKMAEGKKLTVYTDSRYAFATTHVHGEIYRRRGWLTSEGKEIKNKNEILALLEALFLPKRLSIIHCPGHQKGDSPQAKGNRLADDTAKKAATETHSSLTVLPAGKRTADGSEFEKRTADGSEFESPKKKAKVE

SEQ ID NO: 1278 - protein, 2095 aa, synthetic construct
MPAAKRVKLDGGDKKYSIGLDIGTNSVGWAVITDEYKVPSKKFKVLGNTDRHSIKKNLIGALLFDSGETAEATRLKRTARRRYTRRKNRICYLQEIFSNEMAKVDDSFFHRLEESFLVEEDKKHERHPIFGNIVDEVAYHEKYPTIYHLRKKLVDSTDKADLRLIYLALAHMIKFRGHFLIEGDLNPDNSDVDKLFIQLVQTYNQLFEENPINASGVDAKAILSARLSKSRRLENLIAQLPGEKKNGLFGNLIALSLGLTPNFKSNFDLAEDAKLQLSKDTYDDDLDNLLAQIGDQYADLFLAAKNLSDAILLSDILRVNTEITKAPLSASMIKRYDEHHQDLTLLKALVRQQLPEKYKEIFFDQSKNGYAGYIDGGASQEEFYKFIKPILEKMDGTEELLVKLNREDLLRKQRTFDNGSIPHQIHLGELHAILRRQEDFYPFLKDNREKIEKILTFRIPYYVGPLARGNSRFAWMTRKSEETITPWNFEEVVDKGASAQSFIERMTNFDKNLPNEKVLPKHSLLYEYFTVYNELTKVKYVTEGMRKPAFLSGEQKKAIVDLLFKTNRKVTVKQLKEDYFKKIECFDSVEISGVEDRFNASLGTYHDLLKIIKDKDFLDNEENEDILEDIVLTLTLFEDREMIEERLKTYAHLFDDKVMKQLKRRRYTGWGRLSRKLINGIRDKQSGKTILDFLKSDGFANRNFMQLIHDDSLTFKEDIQKAQVSGQGDSLHEHIANLAGSPAIKKGILQTVKVVDELVKVMGRHKPENIVIEMARENQTTQKGQKNSRERMKRIEEGIKELGSQILKEHPVENTQLQNEKLYLYYLQNGRDMYVDQELDINRLSDYDVDHIVPQSFLKDDSIDNKVLTRSDKARGKSDNVPSEEVVKKMKNYWRQLLNAKLITQRKFDNLTKAERGGLSELDKAGFIKRQLVETRQITKHVAQILDSRMNTKYDENDKLIREVKVITLKSKLVSDFRKDFQFYKVREINNYHHAHDAYLNAVVGTALIKKYPKLESEFVYGDYKVYDVRKMIAKSEQEIGKATAKYFFYSNIMNFFKTEITLANGEIRKRPLIETNGETGEIVWDKGRDFATVRKVLSMPQVNIVKKTEVQTGGFSKESILPKRNSDKLIARKKDWDPKKYGGFDSPTVAYSVLVVAKVEKGKSKKLKSVKELLGITIMERSSFEKNPIDFLEAKGYKEVKKDLIIKLPKYSLFELENGRKRMLASAGELQKGNELALPSKYVNFLYLASHYEKLKGSPEDNEQKQLFVEQHKHYLDEIIEQISEFSKRVILADANLDKVLSAYNKHRDKPIREQAENIIHLFTLTNLGAPAAFKYFDTTIDRKRYTSTKEVLDATLIHQSITGLYETRIDLSQLGGDGGGGSEAAAKGSSGGTLQLEEEYRLFEPESTQKQEMDIWLKNFPQAWAETGGMGTAHCQAPVLIQLKATATPISIRQYPMPHEAYQGIKPHIRRMLDQGILKPCQSPWNTPLLPVKKPGTEDYRPVQDLREVNKRVEDIHPTVPNPYNLLSTLPPSHPWYTVLDLKDAFFCLRLHSESQLLFAFEWRDPEIGLSGQLTWTRLPQGFKNSPTLFNEALHSDLADFRVRYPALVLLQYVDDLLLAAATRTECLEGTKALLETLGNKGYRASAKKAQICLQEVTYLGYSLKDGQRWLTKARKEAILSIPVPKNSRQVREFLGKAGYCRLFIPGFAELAAPLYPLTRPGTLFQWGTEQQLAFEDIKKALLSSPALGLPDITKPFELFIDENSGFAKGVLVQKLGPWKRPVAYLSKKLDTVASGWPPCLRMVAAIAILVKDAGKLTLGQPLTILTSHPVEALVRQPPNKWLSNARMTHYQAMLLDAERVHFGPTVSLNPATLLPLPSGGNHHDCLQILAETHGTRPDLTDQPLPDADLTWYTDGSSFIRNGEREAGAAVTTESEVIWAAPLPPGTSAQRAELIALTQALKMAEGKKLTVYTDSRYAFATTHVHGEIYRRRGWLTSEGKEIKNKNEILALLEALFLPKRLSIIHCPGHQKGDSPQAKGNRLADDTAKKAATETHSSLTVLPAGKRTADGSEFEKRTADGSEFESPKKKAKVE

SEQ ID NO: 1279 - protein, 2095 aa, synthetic construct
MPAAKRVKLDGGDKKYSIGLDIGTNSVGWAVITDEYKVPSKKFKVLGNTDRHSIKKNLIGALLFDSGETAEATRLKRTARRRYTRRKNRICYLQEIFSNEMAKVDDSFFHRLEESFLVEEDKKHERHPIFGNIVDEVAYHEKYPTIYHLRKKLVDSTDKADLRLIYLALAHMIKFRGHFLIEGDLNPDNSDVDKLFIQLVQTYNQLFEENPINASGVDAKAILSARLSKSRRLENLIAQLPGEKKNGLFGNLIALSLGLTPNFKSNFDLAEDAKLQLSKDTYDDDLDNLLAQIGDQYADLFLAAKNLSDAILLSDILRVNTEITKAPLSASMIKRYDEHHQDLTLLKALVRQQLPEKYKEIFFDQSKNGYAGYIDGGASQEEFYKFIKPILEKMDGTEELLVKLNREDLLRKQRTFDNGSIPHQIHLGELHAILRRQEDFYPFLKDNREKIEKILTFRIPYYVGPLARGNSRFAWMTRKSEETITPWNFEEVVDKGASAQSFIERMTNFDKNLPNEKVLPKHSLLYEYFTVYNELTKVKYVTEGMRKPAFLSGEQKKAIVDLLFKTNRKVTVKQLKEDYFKKIECFDSVEISGVEDRFNASLGTYHDLLKIIKDKDFLDNEENEDILEDIVLTLTLFEDREMIEERLKTYAHLFDDKVMKQLKRRRYTGWGRLSRKLINGIRDKQSGKTILDFLKSDGFANRNFMQLIHDDSLTFKEDIQKAQVSGQGDSLHEHIANLAGSPAIKKGILQTVKVVDELVKVMGRHKPENIVIEMARENQTTQKGQKNSRERMKRIEEGIKELGSQILKEHPVENTQLQNEKLYLYYLQNGRDMYVDQELDINRLSDYDVDHIVPQSFLKDDSIDNKVLTRSDKARGKSDNVPSEEVVKKMKNYWRQLLNAKLITQRKFDNLTKAERGGLSELDKAGFIKRQLVETRQITKHVAQILDSRMNTKYDENDKLIREVKVITLKSKLVSDFRKDFQFYKVREINNYHHAHDAYLNAVVGTALIKKYPKLESEFVYGDYKVYDVRKMIAKSEQEIGKATAKYFFYSNIMNFFKTEITLANGEIRKRPLIETNGETGEIVWDKGRDFATVRKVLSMPQVNIVKKTEVQTGGFSKESILPKRNSDKLIARKKDWDPKKYGGFDSPTVAYSVLVVAKVEKGKSKKLKSVKELLGITIMERSSFEKNPIDFLEAKGYKEVKKDLIIKLPKYSLFELENGRKRMLASAGELQKGNELALPSKYVNFLYLASHYEKLKGSPEDNEQKQLFVEQHKHYLDEIIEQISEFSKRVILADANLDKVLSAYNKHRDKPIREQAENIIHLFTLTNLGAPAAFKYFDTTIDRKRYTSTKEVLDATLIHQSITGLYETRIDLSQLGGDGGEAAAKGGSGGGGGTLQLEEEYRLFEPESTQKQEMDIWLKNFPQAWAETGGMGTAHCQAPVLIQLKATATPISIRQYPMPHEAYQGIKPHIRRMLDQGILKPCQSPWNTPLLPVKKPGTEDYRPVQDLREVNKRVEDIHPTVPNPYNLLSTLPPSHPWYTVLDLKDAFFCLRLHSESQLLFAFEWRDPEIGLSGQLTWTRLPQGFKNSPTLFNEALHSDLADFRVRYPALVLLQYVDDLLLAAATRTECLEGTKALLETLGNKGYRASAKKAQICLQEVTYLGYSLKDGQRWLTKARKEAILSIPVPKNSRQVREFLGKAGYCRLFIPGFAELAAPLYPLTRPGTLFQWGTEQQLAFEDIKKALLSSPALGLPDITKPFELFIDENSGFAKGVLVQKLGPWKRPVAYLSKKLDTVASGWPPCLRMVAAIAILVKDAGKLTLGQPLTILTSHPVEALVRQPPNKWLSNARMTHYQAMLLDAERVHFGPTVSLNPATLLPLPSGGNHHDCLQILAETHGTRPDLTDQPLPDADLTWYTDGSSFIRNGEREAGAAVTTESEVIWAAPLPPGTSAQRAELIALTQALKMAEGKKLTVYTDSRYAFATTHVHGEIYRRRGWLTSEGKEIKNKNEILALLEALFLPKRLSIIHCPGHQKGDSPQAKGNRLADDTAKKAATETHSSLTVLPAGKRTADGSEFEKRTADGSEFESPKKKAKVE

SEQ ID NO: 1280 - protein, 2092 aa, synthetic construct
MPAAKRVKLDGGDKKYSIGLDIGTNSVGWAVITDEYKVPSKKFKVLGNTDRHSIKKNLIGALLFDSGETAEATRLKRTARRRYTRRKNRICYLQEIFSNEMAKVDDSFFHRLEESFLVEEDKKHERHPIFGNIVDEVAYHEKYPTIYHLRKKLVDSTDKADLRLIYLALAHMIKFRGHFLIEGDLNPDNSDVDKLFIQLVQTYNQLFEENPINASGVDAKAILSARLSKSRRLENLIAQLPGEKKNGLFGNLIALSLGLTPNFKSNFDLAEDAKLQLSKDTYDDDLDNLLAQIGDQYADLFLAAKNLSDAILLSDILRVNTEITKAPLSASMIKRYDEHHQDLTLLKALVRQQLPEKYKEIFFDQSKNGYAGYIDGGASQEEFYKFIKPILEKMDGTEELLVKLNREDLLRKQRTFDNGSIPHQIHLGELHAILRRQEDFYPFLKDNREKIEKILTFRIPYYVGPLARGNSRFAWMTRKSEETITPWNFEEVVDKGASAQSFIERMTNFDKNLPNEKVLPKHSLLYEYFTVYNELTKVKYVTEGMRKPAFLSGEQKKAIVDLLFKTNRKVTVKQLKEDYFKKIECFDSVEISGVEDRFNASLGTYHDLLKIIKDKDFLDNEENEDILEDIVLTLTLFEDREMIEERLKTYAHLFDDKVMKQLKRRRYTGWGRLSRKLINGIRDKQSGKTILDFLKSDGFANRNFMQLIHDDSLTFKEDIQKAQVSGQGDSLHEHIANLAGSPAIKKGILQTVKVVDELVKVMGRHKPENIVIEMARENQTTQKGQKNSRERMKRIEEGIKELGSQILKEHPVENTQLQNEKLYLYYLQNGRDMYVDQELDINRLSDYDVDHIVPQSFLKDDSIDNKVLTRSDKARGKSDNVPSEEVVKKMKNYWRQLLNAKLITQRKFDNLTKAERGGLSELDKAGFIKRQLVETRQITKHVAQILDSRMNTKYDENDKLIREVKVITLKSKLVSDFRKDFQFYKVREINNYHHAHDAYLNAVVGTALIKKYPKLESEFVYGDYKVYDVRKMIAKSEQEIGKATAKYFFYSNIMNFFKTEITLANGEIRKRPLIETNGETGEIVWDKGRDFATVRKVLSMPQVNIVKKTEVQTGGFSKESILPKRNSDKLIARKKDWDPKKYGGFDSPTVAYSVLVVAKVEKGKSKKLKSVKELLGITIMERSSFEKNPIDFLEAKGYKEVKKDLIIKLPKYSLFELENGRKRMLASAGELQKGNELALPSKYVNFLYLASHYEKLKGSPEDNEQKQLFVEQHKHYLDEIIEQISEFSKRVILADANLDKVLSAYNKHRDKPIREQAENIIHLFTLTNLGAPAAFKYFDTTIDRKRYTSTKEVLDATLIHQSITGLYETRIDLSQLGGDGGGGGEAAAKGGTLQLEEEYRLFEPESTQKQEMDIWLKNFPQAWAETGGMGTAHCQAPVLIQLKATATPISIRQYPMPHEAYQGIKPHIRRMLDQGILKPCQSPWNTPLLPVKKPGTEDYRPVQDLREVNKRVEDIHPTVPNPYNLLSTLPPSHPWYTVLDLKDAFFCLRLHSESQLLFAFEWRDPEIGLSGQLTWTRLPQGFKNSPTLFNEALHSDLADFRVRYPALVLLQYVDDLLLAAATRTECLEGTKALLETLGNKGYRASAKKAQICLQEVTYLGYSLKDGQRWLTKARKEAILSIPVPKNSRQVREFLGKAGYCRLFIPGFAELAAPLYPLTRPGTLFQWGTEQQLAFEDIKKALLSSPALGLPDITKPFELFIDENSGFAKGVLVQKLGPWKRPVAYLSKKLDTVASGWPPCLRMVAAIAILVKDAGKLTLGQPLTILTSHPVEALVRQPPNKWLSNARMTHYQAMLLDAERVHFGPTVSLNPATLLPLPSGGNHHDCLQILAETHGTRPDLTDQPLPDADLTWYTDGSSFIRNGEREAGAAVTTESEVIWAAPLPPGTSAQRAELIALTQALKMAEGKKLTVYTDSRYAFATTHVHGEIYRRRGWLTSEGKEIKNKNEILALLEALFLPKRLSIIHCPGHQKGDSPQAKGNRLADDTAKKAATETHSSLTVLPAGKRTADGSEFEKRTADGSEFESPKKKAKVE

SEQ ID NO: 1281 - protein, 2090 aa, synthetic construct
MPAAKRVKLDGGDKKYSIGLDIGTNSVGWAVITDEYKVPSKKFKVLGNTDRHSIKKNLIGALLFDSGETAEATRLKRTARRRYTRRKNRICYLQEIFSNEMAKVDDSFFHRLEESFLVEEDKKHERHPIFGNIVDEVAYHEKYPTIYHLRKKLVDSTDKADLRLIYLALAHMIKFRGHFLIEGDLNPDNSDVDKLFIQLVQTYNQLFEENPINASGVDAKAILSARLSKSRRLENLIAQLPGEKKNGLFGNLIALSLGLTPNFKSNFDLAEDAKLQLSKDTYDDDLDNLLAQIGDQYADLFLAAKNLSDAILLSDILRVNTEITKAPLSASMIKRYDEHHQDLTLLKALVRQQLPEKYKEIFFDQSKNGYAGYIDGGASQEEFYKFIKPILEKMDGTEELLVKLNREDLLRKQRTFDNGSIPHQIHLGELHAILRRQEDFYPFLKDNREKIEKILTFRIPYYVGPLARGNSRFAWMTRKSEETITPWNFEEVVDKGASAQSFIERMTNFDKNLPNEKVLPKHSLLYEYFTVYNELTKVKYVTEGMRKPAFLSGEQKKAIVDLLFKTNRKVTVKQLKEDYFKKIECFDSVEISGVEDRFNASLGTYHDLLKIIKDKDFLDNEENEDILEDIVLTLTLFEDREMIEERLKTYAHLFDDKVMKQLKRRRYTGWGRLSRKLINGIRDKQSGKTILDFLKSDGFANRNFMQLIHDDSLTFKEDIQKAQVSGQGDSLHEHIANLAGSPAIKKGILQTVKVVDELVKVMGRHKPENIVIEMARENQTTQKGQKNSRERMKRIEEGIKELGSQILKEHPVENTQLQNEKLYLYYLQNGRDMYVDQELDINRLSDYDVDHIVPQSFLKDDSIDNKVLTRSDKARGKSDNVPSEEVVKKMKNYWRQLLNAKLITQRKFDNLTKAERGGLSELDKAGFIKRQLVETRQITKHVAQILDSRMNTKYDENDKLIREVKVITLKSKLVSDFRKDFQFYKVREINNYHHAHDAYLNAVVGTALIKKYPKLESEFVYGDYKVYDVRKMIAKSEQEIGKATAKYFFYSNIMNFFKTEITLANGEIRKRPLIETNGETGEIVWDKGRDFATVRKVLSMPQVNIVKKTEVQTGGFSKESILPKRNSDKLIARKKDWDPKKYGGFDSPTVAYSVLVVAKVEKGKSKKLKSVKELLGITIMERSSFEKNPIDFLEAKGYKEVKKDLIIKLPKYSLFELENGRKRMLASAGELQKGNELALPSKYVNFLYLASHYEKLKGSPEDNEQKQLFVEQHKHYLDEIIEQISEFSKRVILADANLDKVLSAYNKHRDKPIREQAENIIHLFTLTNLGAPAAFKYFDTTIDRKRYTSTKEVLDATLIHQSITGLYETRIDLSQLGGDGGGGGGGSGGTLQLEEEYRLFEPESTQKQEMDIWLKNFPQAWAETGGMGTAHCQAPVLIQLKATATPISIRQYPMPHEAYQGIKPHIRRMLDQGILKPCQSPWNTPLLPVKKPGTEDYRPVQDLREVNKRVEDIHPTVPNPYNLLSTLPPSHPWYTVLDLKDAFFCLRLHSESQLLFAFEWRDPEIGLSGQLTWTRLPQGFKNSPTLFNEALHSDLADFRVRYPALVLLQYVDDLLLAAATRTECLEGTKALLETLGNKGYRASAKKAQICLQEVTYLGYSLKDGQRWLTKARKEAILSIPVPKNSRQVREFLGKAGYCRLFIPGFAELAAPLYPLTRPGTLFQWGTEQQLAFEDIKKALLSSPALGLPDITKPFELFIDENSGFAKGVLVQKLGPWKRPVAYLSKKLDTVASGWPPCLRMVAAIAILVKDAGKLTLGQPLTILTSHPVEALVRQPPNKWLSNARMTHYQAMLLDAERVHFGPTVSLNPATLLPLPSGGNHHDCLQILAETHGTRPDLTDQPLPDADLTWYTDGSSFIRNGEREAGAAVTTESEVIWAAPLPPGTSAQRAELIALTQALKMAEGKKLTVYTDSRYAFATTHVHGEIYRRRGWLTSEGKEIKNKNEILALLEALFLPKRLSIIHCPGHQKGDSPQAKGNRLADDTAKKAATETHSSLTVLPAGKRTADGSEFEKRTADGSEFESPKKKAKVE

SEQ ID NO: 1282 - protein, 2211 aa, synthetic construct
MPAAKRVKLDGGDKKYSIGLDIGTNSVGWAVITDEYKVPSKKFKVLGNTDRHSIKKNLIGALLFDSGETAEATRLKRTARRRYTRRKNRICYLQEIFSNEMAKVDDSFFHRLEESFLVEEDKKHERHPIFGNIVDEVAYHEKYPTIYHLRKKLVDSTDKADLRLIYLALAHMIKFRGHFLIEGDLNPDNSDVDKLFIQLVQTYNQLFEENPINASGVDAKAILSARLSKSRRLENLIAQLPGEKKNGLFGNLIALSLGLTPNFKSNFDLAEDAKLQLSKDTYDDDLDNLLAQIGDQYADLFLAAKNLSDAILLSDILRVNTEITKAPLSASMIKRYDEHHQDLTLLKALVRQQLPEKYKEIFFDQSKNGYAGYIDGGASQEEFYKFIKPILEKMDGTEELLVKLNREDLLRKQRTFDNGSIPHQIHLGELHAILRRQEDFYPFLKDNREKIEKILTFRIPYYVGPLARGNSRFAWMTRKSEETITPWNFEEVVDKGASAQSFIERMTNFDKNLPNEKVLPKHSLLYEYFTVYNELTKVKYVTEGMRKPAFLSGEQKKAIVDLLFKTNRKVTVKQLKEDYFKKIECFDSVEISGVEDRFNASLGTYHDLLKIIKDKDFLDNEENEDILEDIVLTLTLFEDREMIEERLKTYAHLFDDKVMKQLKRRRYTGWGRLSRKLINGIRDKQSGKTILDFLKSDGFANRNFMQLIHDDSLTFKEDIQKAQVSGQGDSLHEHIANLAGSPAIKKGILQTVKVVDELVKVMGRHKPENIVIEMARENQTTQKGQKNSRERMKRIEEGIKELGSQILKEHPVENTQLQNEKLYLYYLQNGRDMYVDQELDINRLSDYDVDHIVPQSFLKDDSIDNKVLTRSDKARGKSDNVPSEEVVKKMKNYWRQLLNAKLITQRKFDNLTKAERGGLSELDKAGFIKRQLVETRQITKHVAQILDSRMNTKYDENDKLIREVKVITLKSKLVSDFRKDFQFYKVREINNYHHAHDAYLNAVVGTALIKKYPKLESEFVYGDYKVYDVRKMIAKSEQEIGKATAKYFFYSNIMNFFKTEITLANGEIRKRPLIETNGETGEIVWDKGRDFATVRKVLSMPQVNIVKKTEVQTGGFSKESILPKRNSDKLIARKKDWDPKKYGGFDSPTVAYSVLVVAKVEKGKSKKLKSVKELLGITIMERSSFEKNPIDFLEAKGYKEVKKDLIIKLPKYSLFELENGRKRMLASAGELQKGNELALPSKYVNFLYLASHYEKLKGSPEDNEQKQLFVEQHKHYLDEIIEQISEFSKRVILADANLDKVLSAYNKHRDKPIREQAENIIHLFTLTNLGAPAAFKYFDTTIDRKRYTSTKEVLDATLIHQSITGLYETRIDLSQLGGDGGAEAAAKEAAAKEAAAKEAAAKALEAEAAAKEAAAKEAAAKEAAAKAGGMNPLQLLQPLPAEIKGTKLLAHWNSGATITCIPESFLEDEQPIKKTLIKTIHGEKQQNVYYVTFKVKGRKVEAEVIASPYEYILLSPTDVPWLTQQPLQLTILVPLQEYQEKILSKTALPEDQKQQLKTLFVKYDNLWQHWENQVGHRKIRPHNIATGDYPPRPQKQYPINPKAKPSIQIVIDDLLKQGVLTPQNSTMNTPVYPVPKPDGRWRMVLDYREVNKTIPLTAAQNQHSAGILATIVRQKYKTTLDLANGFWAHPITPESYWLTAFTWQGKQYCWTRLPQGFLNSPALFTADVVDLLKEIPNVQVYVDDIYLSHDDPKEHVQQLEKVFQILLQAGYVVSLKKSEIGQKTVEFLGFNITKEGRGLTDTFKTKLLNITPPKDLKQLQSILGLLNFARNFIPNFAELVQPLYNLIASAKGKYIEWSEENTKQLNMVIEALNTASNLEERLPEQRLVIKVNTSPSAGYVRYYNETGKKPIMYLNYVFSKAELKFSMLEKLLTTMHKALIKAMDLAMGQEILVYSPIVSMTKIQKTPLPERKALPIRWITWMTYLEDPRIQFHYDKTLPELKHIPDVYTSSQSPVKHPSQYEGVFYTDGSAIKSPDPTKSNNAGMGIVHATYKPEYQVLNQWSIPLGNHTAQMAEIAAVEFACKKALKIPGPVLVITDSFYVAESANKELPYWKSNGFVNNKKKPLKHISKWKSIAECLSMKPDITIQHEKGISLQIPVFILKGNALADKLATQGSYVVNAGKRTADGSEFEKRTADGSEFESPKKKAKVE

SEQ ID NO: 1283 - protein, 2190 aa, synthetic construct
MPAAKRVKLDGGDKKYSIGLDIGTNSVGWAVITDEYKVPSKKFKVLGNTDRHSIKKNLIGALLFDSGETAEATRLKRTARRRYTRRKNRICYLQEIFSNEMAKVDDSFFHRLEESFLVEEDKKHERHPIFGNIVDEVAYHEKYPTIYHLRKKLVDSTDKADLRLIYLALAHMIKFRGHFLIEGDLNPDNSDVDKLFIQLVQTYNQLFEENPINASGVDAKAILSARLSKSRRLENLIAQLPGEKKNGLFGNLIALSLGLTPNFKSNFDLAEDAKLQLSKDTYDDDLDNLLAQIGDQYADLFLAAKNLSDAILLSDILRVNTEITKAPLSASMIKRYDEHHQDLTLLKALVRQQLPEKYKEIFFDQSKNGYAGYIDGGASQEEFYKFIKPILEKMDGTEELLVKLNREDLLRKQRTFDNGSIPHQIHLGELHAILRRQEDFYPFLKDNREKIEKILTFRIPYYVGPLARGNSRFAWMTRKSEETITPWNFEEVVDKGASAQSFIERMTNFDKNLPNEKVLPKHSLLYEYFTVYNELTKVKYVTEGMRKPAFLSGEQKKAIVDLLFKTNRKVTVKQLKEDYFKKIECFDSVEISGVEDRFNASLGTYHDLLKIIKDKDFLDNEENEDILEDIVLTLTLFEDREMIEERLKTYAHLFDDKVMKQLKRRRYTGWGRLSRKLINGIRDKQSGKTILDFLKSDGFANRNFMQLIHDDSLTFKEDIQKAQVSGQGDSLHEHIANLAGSPAIKKGILQTVKVVDELVKVMGRHKPENIVIEMARENQTTQKGQKNSRERMKRIEEGIKELGSQILKEHPVENTQLQNEKLYLYYLQNGRDMYVDQELDINRLSDYDVDHIVPQSFLKDDSIDNKVLTRSDKARGKSDNVPSEEVVKKMKNYWRQLLNAKLITQRKFDNLTKAERGGLSELDKAGFIKRQLVETRQITKHVAQILDSRMNTKYDENDKLIREVKVITLKSKLVSDFRKDFQFYKVREINNYHHAHDAYLNAVVGTALIKKYPKLESEFVYGDYKVYDVRKMIAKSEQEIGKATAKYFFYSNIMNFFKTEITLANGEIRKRPLIETNGETGEIVWDKGRDFATVRKVLSMPQVNIVKKTEVQTGGFSKESILPKRNSDKLIARKKDWDPKKYGGFDSPTVAYSVLVVAKVEKGKSKKLKSVKELLGITIMERSSFEKNPIDFLEAKGYKEVKKDLIIKLPKYSLFELENGRKRMLASAGELQKGNELALPSKYVNFLYLASHYEKLKGSPEDNEQKQLFVEQHKHYLDEIIEQISEFSKRVILADANLDKVLSAYNKHRDKPIREQAENIIHLFTLTNLGAPAAFKYFDTTIDRKRYTSTKEVLDATLIHQSITGLYETRIDLSQLGGDGGEAAAKEAAAKEAAAKEAAAKEAAAKGGMNPLQLLQPLPAEIKGTKLLAHWNSGATITCIPESFLEDEQPIKKTLIKTIHGEKQQNVYYVTFKVKGRKVEAEVIASPYEYILLSPTDVPWLTQQPLQLTILVPLQEYQEKILSKTALPEDQKQQLKTLFVKYDNLWQHWENQVGHRKIRPHNIATGDYPPRPQKQYPINPKAKPSIQIVIDDLLKQGVLTPQNSTMNTPVYPVPKPDGRWRMVLDYREVNKTIPLTAAQNQHSAGILATIVRQKYKTTLDLANGFWAHPITPESYWLTAFTWQGKQYCWTRLPQGFLNSPALFTADVVDLLKEIPNVQVYVDDIYLSHDDPKEHVQQLEKVFQILLQAGYVVSLKKSEIGQKTVEFLGFNITKEGRGLTDTFKTKLLNITPPKDLKQLQSILGLLNFARNFIPNFAELVQPLYNLIASAKGKYIEWSEENTKQLNMVIEALNTASNLEERLPEQRLVIKVNTSPSAGYVRYYNETGKKPIMYLNYVFSKAELKFSMLEKLLTTMHKALIKAMDLAMGQEILVYSPIVSMTKIQKTPLPERKALPIRWITWMTYLEDPRIQFHYDKTLPELKHIPDVYTSSQSPVKHPSQYEGVFYTDGSAIKSPDPTKSNNAGMGIVHATYKPEYQVLNQWSIPLGNHTAQMAEIAAVEFACKKALKIPGPVLVITDSFYVAESANKELPYWKSNGFVNNKKKPLKHISKWKSIAECLSMKPDITIQHEKGISLQIPVFILKGNALADKLATQGSYVVNAGKRTADGSEFEKRTADGSEFESPKKKAKVE

SEQ ID NO: 1284 - protein, 2183 aa, synthetic construct
MPAAKRVKLDGGDKKYSIGLDIGTNSVGWAVITDEYKVPSKKFKVLGNTDRHSIKKNLIGALLFDSGETAEATRLKRTARRRYTRRKNRICYLQEIFSNEMAKVDDSFFHRLEESFLVEEDKKHERHPIFGNIVDEVAYHEKYPTIYHLRKKLVDSTDKADLRLIYLALAHMIKFRGHFLIEGDLNPDNSDVDKLFIQLVQTYNQLFEENPINASGVDAKAILSARLSKSRRLENLIAQLPGEKKNGLFGNLIALSLGLTPNFKSNFDLAEDAKLQLSKDTYDDDLDNLLAQIGDQYADLFLAAKNLSDAILLSDILRVNTEITKAPLSASMIKRYDEHHQDLTLLKALVRQQLPEKYKEIFFDQSKNGYAGYIDGGASQEEFYKFIKPILEKMDGTEELLVKLNREDLLRKQRTFDNGSIPHQIHLGELHAILRRQEDFYPFLKDNREKIEKILTFRIPYYVGPLARGNSRFAWMTRKSEETITPWNFEEVVDKGASAQSFIERMTNFDKNLPNEKVLPKHSLLYEYFTVYNELTKVKYVTEGMRKPAFLSGEQKKAIVDLLFKTNRKVTVKQLKEDYFKKIECFDSVEISGVEDRFNASLGTYHDLLKIIKDKDFLDNEENEDILEDIVLTLTLFEDREMIEERLKTYAHLFDDKVMKQLKRRRYTGWGRLSRKLINGIRDKQSGKTILDFLKSDGFANRNFMQLIHDDSLTFKEDIQKAQVSGQGDSLHEHIANLAGSPAIKKGILQTVKVVDELVKVMGRHKPENIVIEMARENQTTQKGQKNSRERMKRIEEGIKELGSQILKEHPVENTQLQNEKLYLYYLQNGRDMYVDQELDINRLSDYDVDHIVPQSFLKDDSIDNKVLTRSDKARGKSDNVPSEEVVKKMKNYWRQLLNAKLITQRKFDNLTKAERGGLSELDKAGFIKRQLVETRQITKHVAQILDSRMNTKYDENDKLIREVKVITLKSKLVSDFRKDFQFYKVREINNYHHAHDAYLNAVVGTALIKKYPKLESEFVYGDYKVYDVRKMIAKSEQEIGKATAKYFFYSNIMNFFKTEITLANGEIRKRPLIETNGETGEIVWDKGRDFATVRKVLSMPQVNIVKKTEVQTGGFSKESILPKRNSDKLIARKKDWDPKKYGGFDSPTVAYSVLVVAKVEKGKSKKLKSVKELLGITIMERSSFEKNPIDFLEAKGYKEVKKDLIIKLPKYSLFELENGRKRMLASAGELQKGNELALPSKYVNFLYLASHYEKLKGSPEDNEQKQLFVEQHKHYLDEIIEQISEFSKRVILADANLDKVLSAYNKHRDKPIREQAENIIHLFTLTNLGAPAAFKYFDTTIDRKRYTSTKEVLDATLIHQSITGLYETRIDLSQLGGDGGGSSGSSGSSGSSGSSGSSGGMNPLQLLQPLPAEIKGTKLLAHWNSGATITCIPESFLEDEQPIKKTLIKTIHGEKQQNVYYVTFKVKGRKVEAEVIASPYEYILLSPTDVPWLTQQPLQLTILVPLQEYQEKILSKTALPEDQKQQLKTLFVKYDNLWQHWENQVGHRKIRPHNIATGDYPPRPQKQYPINPKAKPSIQIVIDDLLKQGVLTPQNSTMNTPVYPVPKPDGRWRMVLDYREVNKTIPLTAAQNQHSAGILATIVRQKYKTTLDLANGFWAHPITPESYWLTAFTWQGKQYCWTRLPQGFLNSPALFTADVVDLLKEIPNVQVYVDDIYLSHDDPKEHVQQLEKVFQILLQAGYVVSLKKSEIGQKTVEFLGFNITKEGRGLTDTFKTKLLNITPPKDLKQLQSILGLLNFARNFIPNFAELVQPLYNLIASAKGKYIEWSEENTKQLNMVIEALNTASNLEERLPEQRLVIKVNTSPSAGYVRYYNETGKKPIMYLNYVFSKAELKFSMLEKLLTTMHKALIKAMDLAMGQEILVYSPIVSMTKIQKTPLPERKALPIRWITWMTYLEDPRIQFHYDKTLPELKHIPDVYTSSQSPVKHPSQYEGVFYTDGSAIKSPDPTKSNNAGMGIVHATYKPEYQVLNQWSIPLGNHTAQMAEIAAVEFACKKALKIPGPVLVITDSFYVAESANKELPYWKSNGFVNNKKKPLKHISKWKSIAECLSMKPDITIQHEKGISLQIPVFILKGNALADKLATQGSYVVNAGKRTADGSEFEKRTADGSEFESPKKKAKVE

SEQ ID NO: 1285 - protein, 2176 aa, synthetic construct
MPAAKRVKLDGGDKKYSIGLDIGTNSVGWAVITDEYKVPSKKFKVLGNTDRHSIKKNLIGALLFDSGETAEATRLKRTARRRYTRRKNRICYLQEIFSNEMAKVDDSFFHRLEESFLVEEDKKHERHPIFGNIVDEVAYHEKYPTIYHLRKKLVDSTDKADLRLIYLALAHMIKFRGHFLIEGDLNPDNSDVDKLFIQLVQTYNQLFEENPINASGVDAKAILSARLSKSRRLENLIAQLPGEKKNGLFGNLIALSLGLTPNFKSNFDLAEDAKLQLSKDTYDDDLDNLLAQIGDQYADLFLAAKNLSDAILLSDILRVNTEITKAPLSASMIKRYDEHHQDLTLLKALVRQQLPEKYKEIFFDQSKNGYAGYIDGGASQEEFYKFIKPILEKMDGTEELLVKLNREDLLRKQRTFDNGSIPHQIHLGELHAILRRQEDFYPFLKDNREKIEKILTFRIPYYVGPLARGNSRFAWMTRKSEETITPWNFEEVVDKGASAQSFIERMTNFDKNLPNEKVLPKHSLLYEYFTVYNELTKVKYVTEGMRKPAFLSGEQKKAIVDLLFKTNRKVTVKQLKEDYFKKIECFDSVEISGVEDRFNASLGTYHDLLKIIKDKDFLDNEENEDILEDIVLTLTLFEDREMIEERLKTYAHLFDDKVMKQLKRRRYTGWGRLSRKLINGIRDKQSGKTILDFLKSDGFANRNFMQLIHDDSLTFKEDIQKAQVSGQGDSLHEHIANLAGSPAIKKGILQTVKVVDELVKVMGRHKPENIVIEMARENQTTQKGQKNSRERMKRIEEGIKELGSQILKEHPVENTQLQNEKLYLYYLQNGRDMYVDQELDINRLSDYDVDHIVPQSFLKDDSIDNKVLTRSDKARGKSDNVPSEEVVKKMKNYWRQLLNAKLITQRKFDNLTKAERGGLSELDKAGFIKRQLVETRQITKHVAQILDSRMNTKYDENDKLIREVKVITLKSKLVSDFRKDFQFYKVREINNYHHAHDAYLNAVVGTALIKKYPKLESEFVYGDYKVYDVRKMIAKSEQEIGKATAKYFFYSNIMNFFKTEITLANGEIRKRPLIETNGETGEIVWDKGRDFATVRKVLSMPQVNIVKKTEVQTGGFSKESILPKRNSDKLIARKKDWDPKKYGGFDSPTVAYSVLVVAKVEKGKSKKLKSVKELLGITIMERSSFEKNPIDFLEAKGYKEVKKDLIIKLPKYSLFELENGRKRMLASAGELQKGNELALPSKYVNFLYLASHYEKLKGSPEDNEQKQLFVEQHKHYLDEIIEQISEFSKRVILADANLDKVLSAYNKHRDKPIREQAENIIHLFTLTNLGAPAAFKYFDTTIDRKRYTSTKEVLDATLIHQSITGLYETRIDLSQLGGDGGPAPAPAPAPAPGGMNPLQLLQPLPAEIKGTKLLAHWNSGATITCIPESFLEDEQPIKKTLIKTIHGEKQQNVYYVTFKVKGRKVEAEVIASPYEYILLSPTDVPWLTQQPLQLTILVPLQEYQEKILSKTALPEDQKQQLKTLFVKYDNLWQHWENQVGHRKIRPHNIATGDYPPRPQKQYPINPKAKPSIQIVIDDLLKQGVLTPQNSTMNTPVYPVPKPDGRWRMVLDYREVNKTIPLTAAQNQHSAGILATIVRQKYKTTLDLANGFWAHPITPESYWLTAFTWQGKQYCWTRLPQGFLNSPALFTADVVDLLKEIPNVQVYVDDIYLSHDDPKEHVQQLEKVFQILLQAGYVVSLKKSEIGQKTVEFLGFNITKEGRGLTDTFKTKLLNITPPKDLKQLQSILGLLNFARNFIPNFAELVQPLYNLIASAKGKYIEWSEENTKQLNMVIEALNTASNLEERLPEQRLVIKVNTSPSAGYVRYYNETGKKPIMYLNYVFSKAELKFSMLEKLLTTMHKALIKAMDLAMGQEILVYSPIVSMTKIQKTPLPERKALPIRWITWMTYLEDPRIQFHYDKTLPELKHIPDVYTSSQSPVKHPSQYEGVFYTDGSAIKSPDPTKSNNAGMGIVHATYKPEYQVLNQWSIPLGNHTAQMAEIAAVEFACKKALKIPGPVLVITDSFYVAESANKELPYWKSNGFVNNKKKPLKHISKWKSIAECLSMKPDITIQHEKGISLQIPVFILKGNALADKLATQGSYVVNAGKRTADGSEFEKRTADGSEFESPKKKAKVE

SEQ ID NO: 1286 - protein, 2176 aa, synthetic construct
MPAAKRVKLDGGDKKYSIGLDIGTNSVGWAVITDEYKVPSKKFKVLGNTDRHSIKKNLIGALLFDSGETAEATRLKRTARRRYTRRKNRICYLQEIFSNEMAKVDDSFFHRLEESFLVEEDKKHERHPIFGNIVDEVAYHEKYPTIYHLRKKLVDSTDKADLRLIYLALAHMIKFRGHFLIEGDLNPDNSDVDKLFIQLVQTYNQLFEENPINASGVDAKAILSARLSKSRRLENLIAQLPGEKKNGLFGNLIALSLGLTPNFKSNFDLAEDAKLQLSKDTYDDDLDNLLAQIGDQYADLFLAAKNLSDAILLSDILRVNTEITKAPLSASMIKRYDEHHQDLTLLKALVRQQLPEKYKEIFFDQSKNGYAGYIDGGASQEEFYKFIKPILEKMDGTEELLVKLNREDLLRKQRTFDNGSIPHQIHLGELHAILRRQEDFYPFLKDNREKIEKILTFRIPYYVGPLARGNSRFAWMTRKSEETITPWNFEEVVDKGASAQSFIERMTNFDKNLPNEKVLPKHSLLYEYFTVYNELTKVKYVTEGMRKPAFLSGEQKKAIVDLLFKTNRKVTVKQLKEDYFKKIECFDSVEISGVEDRFNASLGTYHDLLKIIKDKDFLDNEENEDILEDIVLTLTLFEDREMIEERLKTYAHLFDDKVMKQLKRRRYTGWGRLSRKLINGIRDKQSGKTILDFLKSDGFANRNFMQLIHDDSLTFKEDIQKAQVSGQGDSLHEHIANLAGSPAIKKGILQTVKVVDELVKVMGRHKPENIVIEMARENQTTQKGQKNSRERMKRIEEGIKELGSQILKEHPVENTQLQNEKLYLYYLQNGRDMYVDQELDINRLSDYDVDHIVPQSFLKDDSIDNKVLTRSDKARGKSDNVPSEEVVKKMKNYWRQLLNAKLITQRKFDNLTKAERGGLSELDKAGFIKRQLVETRQITKHVAQILDSRMNTKYDENDKLIREVKVITLKSKLVSDFRKDFQFYKVREINNYHHAHDAYLNAVVGTALIKKYPKLESEFVYGDYKVYDVRKMIAKSEQEIGKATAKYFFYSNIMNFFKTEITLANGEIRKRPLIETNGETGEIVWDKGRDFATVRKVLSMPQVNIVKKTEVQTGGFSKESILPKRNSDKLIARKKDWDPKKYGGFDSPTVAYSVLVVAKVEKGKSKKLKSVKELLGITIMERSSFEKNPIDFLEAKGYKEVKKDLIIKLPKYSLFELENGRKRMLASAGELQKGNELALPSKYVNFLYLASHYEKLKGSPEDNEQKQLFVEQHKHYLDEIIEQISEFSKRVILADANLDKVLSAYNKHRDKPIREQAENIIHLFTLTNLGAPAAFKYFDTTIDRKRYTSTKEVLDATLIHQSITGLYETRIDLSQLGGDGGGGSPAPEAAAKGGMNPLQLLQPLPAEIKGTKLLAHWNSGATITCIPESFLEDEQPIKKTLIKTIHGEKQQNVYYVTFKVKGRKVEAEVIASPYEYILLSPTDVPWLTQQPLQLTILVPLQEYQEKILSKTALPEDQKQQLKTLFVKYDNLWQHWENQVGHRKIRPHNIATGDYPPRPQKQYPINPKAKPSIQIVIDDLLKQGVLTPQNSTMNTPVYPVPKPDGRWRMVLDYREVNKTIPLTAAQNQHSAGILATIVRQKYKTTLDLANGFWAHPITPESYWLTAFTWQGKQYCWTRLPQGFLNSPALFTADVVDLLKEIPNVQVYVDDIYLSHDDPKEHVQQLEKVFQILLQAGYVVSLKKSEIGQKTVEFLGFNITKEGRGLTDTFKTKLLNITPPKDLKQLQSILGLLNFARNFIPNFAELVQPLYNLIASAKGKYIEWSEENTKQLNMVIEALNTASNLEERLPEQRLVIKVNTSPSAGYVRYYNETGKKPIMYLNYVFSKAELKFSMLEKLLTTMHKALIKAMDLAMGQEILVYSPIVSMTKIQKTPLPERKALPIRWITWMTYLEDPRIQFHYDKTLPELKHIPDVYTSSQSPVKHPSQYEGVFYTDGSAIKSPDPTKSNNAGMGIVHATYKPEYQVLNQWSIPLGNHTAQMAEIAAVEFACKKALKIPGPVLVITDSFYVAESANKELPYWKSNGFVNNKKKPLKHISKWKSIAECLSMKPDITIQHEKGISLQIPVFILKGNALADKLATQGSYVVNAGKRTADGSEFEKRTADGSEFESPKKKAKVE

SEQ ID NO: 1287 - protein, 2176 aa, synthetic construct
MPAAKRVKLDGGDKKYSIGLDIGTNSVGWAVITDEYKVPSKKFKVLGNTDRHSIKKNLIGALLFDSGETAEATRLKRTARRRYTRRKNRICYLQEIFSNEMAKVDDSFFHRLEESFLVEEDKKHERHPIFGNIVDEVAYHEKYPTIYHLRKKLVDSTDKADLRLIYLALAHMIKFRGHFLIEGDLNPDNSDVDKLFIQLVQTYNQLFEENPINASGVDAKAILSARLSKSRRLENLIAQLPGEKKNGLFGNLIALSLGLTPNFKSNFDLAEDAKLQLSKDTYDDDLDNLLAQIGDQYADLFLAAKNLSDAILLSDILRVNTEITKAPLSASMIKRYDEHHQDLTLLKALVRQQLPEKYKEIFFDQSKNGYAGYIDGGASQEEFYKFIKPILEKMDGTEELLVKLNREDLLRKQRTFDNGSIPHQIHLGELHAILRRQEDFYPFLKDNREKIEKILTFRIPYYVGPLARGNSRFAWMTRKSEETITPWNFEEVVDKGASAQSFIERMTNFDKNLPNEKVLPKHSLLYEYFTVYNELTKVKYVTEGMRKPAFLSGEQKKAIVDLLFKTNRKVTVKQLKEDYFKKIECFDSVEISGVEDRFNASLGTYHDLLKIIKDKDFLDNEENEDILEDIVLTLTLFEDREMIEERLKTYAHLFDDKVMKQLKRRRYTGWGRLSRKLINGIRDKQSGKTILDFLKSDGFANRNFMQLIHDDSLTFKEDIQKAQVSGQGDSLHEHIANLAGSPAIKKGILQTVKVVDELVKVMGRHKPENIVIEMARENQTTQKGQKNSRERMKRIEEGIKELGSQILKEHPVENTQLQNEKLYLYYLQNGRDMYVDQELDINRLSDYDVDHIVPQSFLKDDSIDNKVLTRSDKARGKSDNVPSEEVVKKMKNYWRQLLNAKLITQRKFDNLTKAERGGLSELDKAGFIKRQLVETRQITKHVAQILDSRMNTKYDENDKLIREVKVITLKSKLVSDFRKDFQFYKVREINNYHHAHDAYLNAVVGTALIKKYPKLESEFVYGDYKVYDVRKMIAKSEQEIGKATAKYFFYSNIMNFFKTEITLANGEIRKRPLIETNGETGEIVWDKGRDFATVRKVLSMPQVNIVKKTEVQTGGFSKESILPKRNSDKLIARKKDWDPKKYGGFDSPTVAYSVLVVAKVEKGKSKKLKSVKELLGITIMERSSFEKNPIDFLEAKGYKEVKKDLIIKLPKYSLFELENGRKRMLASAGELQKGNELALPSKYVNFLYLASHYEKLKGSPEDNEQKQLFVEQHKHYLDEIIEQISEFSKRVILADANLDKVLSAYNKHRDKPIREQAENIIHLFTLTNLGAPAAFKYFDTTIDRKRYTSTKEVLDATLIHQSITGLYETRIDLSQLGGDGGEAAAKGGSPAPGGMNPLQLLQPLPAEIKGTKLLAHWNSGATITCIPESFLEDEQPIKKTLIKTIHGEKQQNVYYVTFKVKGRKVEAEVIASPYEYILLSPTDVPWLTQQPLQLTILVPLQEYQEKILSKTALPEDQKQQLKTLFVKYDNLWQHWENQVGHRKIRPHNIATGDYPPRPQKQYPINPKAKPSIQIVIDDLLKQGVLTPQNSTMNTPVYPVPKPDGRWRMVLDYREVNKTIPLTAAQNQHSAGILATIVRQKYKTTLDLANGFWAHPITPESYWLTAFTWQGKQYCWTRLPQGFLNSPALFTADVVDLLKEIPNVQVYVDDIYLSHDDPKEHVQQLEKVFQILLQAGYVVSLKKSEIGQKTVEFLGFNITKEGRGLTDTFKTKLLNITPPKDLKQLQSILGLLNFARNFIPNFAELVQPLYNLIASAKGKYIEWSEENTKQLNMVIEALNTASNLEERLPEQRLVIKVNTSPSAGYVRYYNETGKKPIMYLNYVFSKAELKFSMLEKLLTTMHKALIKAMDLAMGQEILVYSPIVSMTKIQKTPLPERKALPIRWITWMTYLEDPRIQFHYDKTLPELKHIPDVYTSSQSPVKHPSQYEGVFYTDGSAIKSPDPTKSNNAGMGIVHATYKPEYQVLNQWSIPLGNHTAQMAEIAAVEFACKKALKIPGPVLVITDSFYVAESANKELPYWKSNGFVNNKKKPLKHISKWKSIAECLSMKPDITIQHEKGISLQIPVFILKGNALADKLATQGSYVVNAGKRTADGSEFEKRTADGSEFESPKKKAKVE

SEQ ID NO: 1288 - protein, 2180 aa, synthetic construct
MPAAKRVKLDGGDKKYSIGLDIGTNSVGWAVITDEYKVPSKKFKVLGNTDRHSIKKNLIGALLFDSGETAEATRLKRTARRRYTRRKNRICYLQEIFSNEMAKVDDSFFHRLEESFLVEEDKKHERHPIFGNIVDEVAYHEKYPTIYHLRKKLVDSTDKADLRLIYLALAHMIKFRGHFLIEGDLNPDNSDVDKLFIQLVQTYNQLFEENPINASGVDAKAILSARLSKSRRLENLIAQLPGEKKNGLFGNLIALSLGLTPNFKSNFDLAEDAKLQLSKDTYDDDLDNLLAQIGDQYADLFLAAKNLSDAILLSDILRVNTEITKAPLSASMIKRYDEHHQDLTLLKALVRQQLPEKYKEIFFDQSKNGYAGYIDGGASQEEFYKFIKPILEKMDGTEELLVKLNREDLLRKQRTFDNGSIPHQIHLGELHAILRRQEDFYPFLKDNREKIEKILTFRIPYYVGPLARGNSRFAWMTRKSEETITPWNFEEVVDKGASAQSFIERMTNFDKNLPNEKVLPKHSLLYEYFTVYNELTKVKYVTEGMRKPAFLSGEQKKAIVDLLFKTNRKVTVKQLKEDYFKKIECFDSVEISGVEDRFNASLGTYHDLLKIIKDKDFLDNEENEDILEDIVLTLTLFEDREMIEERLKTYAHLFDDKVMKQLKRRRYTGWGRLSRKLINGIRDKQSGKTILDFLKSDGFANRNFMQLIHDDSLTFKEDIQKAQVSGQGDSLHEHIANLAGSPAIKKGILQTVKVVDELVKVMGRHKPENIVIEMARENQTTQKGQKNSRERMKRIEEGIKELGSQILKEHPVENTQLQNEKLYLYYLQNGRDMYVDQELDINRLSDYDVDHIVPQSFLKDDSIDNKVLTRSDKARGKSDNVPSEEVVKKMKNYWRQLLNAKLITQRKFDNLTKAERGGLSELDKAGFIKRQLVETRQITKHVAQILDSRMNTKYDENDKLIREVKVITLKSKLVSDFRKDFQFYKVREINNYHHAHDAYLNAVVGTALIKKYPKLESEFVYGDYKVYDVRKMIAKSEQEIGKATAKYFFYSNIMNFFKTEITLANGEIRKRPLIETNGETGEIVWDKGRDFATVRKVLSMPQVNIVKKTEVQTGGFSKESILPKRNSDKLIARKKDWDPKKYGGFDSPTVAYSVLVVAKVEKGKSKKLKSVKELLGITIMERSSFEKNPIDFLEAKGYKEVKKDLIIKLPKYSLFELENGRKRMLASAGELQKGNELALPSKYVNFLYLASHYEKLKGSPEDNEQKQLFVEQHKHYLDEIIEQISEFSKRVILADANLDKVLSAYNKHRDKPIREQAENIIHLFTLTNLGAPAAFKYFDTTIDRKRYTSTKEVLDATLIHQSITGLYETRIDLSQLGGDGGEAAAKEAAAKEAAAKGGMNPLQLLQPLPAEIKGTKLLAHWNSGATITCIPESFLEDEQPIKKTLIKTIHGEKQQNVYYVTFKVKGRKVEAEVIASPYEYILLSPTDVPWLTQQPLQLTILVPLQEYQEKILSKTALPEDQKQQLKTLFVKYDNLWQHWENQVGHRKIRPHNIATGDYPPRPQKQYPINPKAKPSIQIVIDDLLKQGVLTPQNSTMNTPVYPVPKPDGRWRMVLDYREVNKTIPLTAAQNQHSAGILATIVRQKYKTTLDLANGFWAHPITPESYWLTAFTWQGKQYCWTRLPQGFLNSPALFTADVVDLLKEIPNVQVYVDDIYLSHDDPKEHVQQLEKVFQILLQAGYVVSLKKSEIGQKTVEFLGFNITKEGRGLTDTFKTKLLNITPPKDLKQLQSILGLLNFARNFIPNFAELVQPLYNLIASAKGKYIEWSEENTKQLNMVIEALNTASNLEERLPEQRLVIKVNTSPSAGYVRYYNETGKKPIMYLNYVFSKAELKFSMLEKLLTTMHKALIKAMDLAMGQEILVYSPIVSMTKIQKTPLPERKALPIRWITWMTYLEDPRIQFHYDKTLPELKHIPDVYTSSQSPVKHPSQYEGVFYTDGSAIKSPDPTKSNNAGMGIVHATYKPEYQVLNQWSIPLGNHTAQMAEIAAVEFACKKALKIPGPVLVITDSFYVAESANKELPYWKSNGFVNNKKKPLKHISKWKSIAECLSMKPDITIQHEKGISLQIPVFILKGNALADKLATQGSYVVNAGKRTADGSEFEKRTADGSEFESPKKKAKVE

SEQ ID NO: 1289 - protein, 2177 aa, synthetic construct
MPAAKRVKLDGGDKKYSIGLDIGTNSVGWAVITDEYKVPSKKFKVLGNTDRHSIKKNLIGALLFDSGETAEATRLKRTARRRYTRRKNRICYLQEIFSNEMAKVDDSFFHRLEESFLVEEDKKHERHPIFGNIVDEVAYHEKYPTIYHLRKKLVDSTDKADLRLIYLALAHMIKFRGHFLIEGDLNPDNSDVDKLFIQLVQTYNQLFEENPINASGVDAKAILSARLSKSRRLENLIAQLPGEKKNGLFGNLIALSLGLTPNFKSNFDLAEDAKLQLSKDTYDDDLDNLLAQIGDQYADLFLAAKNLSDAILLSDILRVNTEITKAPLSASMIKRYDEHHQDLTLLKALVRQQLPEKYKEIFFDQSKNGYAGYIDGGASQEEFYKFIKPILEKMDGTEELLVKLNREDLLRKQRTFDNGSIPHQIHLGELHAILRRQEDFYPFLKDNREKIEKILTFRIPYYVGPLARGNSRFAWMTRKSEETITPWNFEEVVDKGASAQSFIERMTNFDKNLPNEKVLPKHSLLYEYFTVYNELTKVKYVTEGMRKPAFLSGEQKKAIVDLLFKTNRKVTVKQLKEDYFKKIECFDSVEISGVEDRFNASLGTYHDLLKIIKDKDFLDNEENEDILEDIVLTLTLFEDREMIEERLKTYAHLFDDKVMKQLKRRRYTGWGRLSRKLINGIRDKQSGKTILDFLKSDGFANRNFMQLIHDDSLTFKEDIQKAQVSGQGDSLHEHIANLAGSPAIKKGILQTVKVVDELVKVMGRHKPENIVIEMARENQTTQKGQKNSRERMKRIEEGIKELGSQILKEHPVENTQLQNEKLYLYYLQNGRDMYVDQELDINRLSDYDVDHIVPQSFLKDDSIDNKVLTRSDKARGKSDNVPSEEVVKKMKNYWRQLLNAKLITQRKFDNLTKAERGGLSELDKAGFIKRQLVETRQITKHVAQILDSRMNTKYDENDKLIREVKVITLKSKLVSDFRKDFQFYKVREINNYHHAHDAYLNAVVGTALIKKYPKLESEFVYGDYKVYDVRKMIAKSEQEIGKATAKYFFYSNIMNFFKTEITLANGEIRKRPLIETNGETGEIVWDKGRDFATVRKVLSMPQVNIVKKTEVQTGGFSKESILPKRNSDKLIARKKDWDPKKYGGFDSPTVAYSVLVVAKVEKGKSKKLKSVKELLGITIMERSSFEKNPIDFLEAKGYKEVKKDLIIKLPKYSLFELENGRKRMLASAGELQKGNELALPSKYVNFLYLASHYEKLKGSPEDNEQKQLFVEQHKHYLDEIIEQISEFSKRVILADANLDKVLSAYNKHRDKPIREQAENIIHLFTLTNLGAPAAFKYFDTTIDRKRYTSTKEVLDATLIHQSITGLYETRIDLSQLGGDGGGGSGGSGGSGGSGGMNPLQLLQPLPAEIKGTKLLAHWNSGATITCIPESFLEDEQPIKKTLIKTIHGEKQQNVYYVTFKVKGRKVEAEVIASPYEYILLSPTDVPWLTQQPLQLTILVPLQEYQEKILSKTALPEDQKQQLKTLFVKYDNLWQHWENQVGHRKIRPHNIATGDYPPRPQKQYPINPKAKPSIQIVIDDLLKQGVLTPQNSTMNTPVYPVPKPDGRWRMVLDYREVNKTIPLTAAQNQHSAGILATIVRQKYKTTLDLANGFWAHPITPESYWLTAFTWQGKQYCWTRLPQGFLNSPALFTADVVDLLKEIPNVQVYVDDIYLSHDDPKEHVQQLEKVFQILLQAGYVVSLKKSEIGQKTVEFLGFNITKEGRGLTDTFKTKLLNITPPKDLKQLQSILGLLNFARNFIPNFAELVQPLYNLIASAKGKYIEWSEENTKQLNMVIEALNTASNLEERLPEQRLVIKVNTSPSAGYVRYYNETGKKPIMYLNYVFSKAELKFSMLEKLLTTMHKALIKAMDLAMGQEILVYSPIVSMTKIQKTPLPERKALPIRWITWMTYLEDPRIQFHYDKTLPELKHIPDVYTSSQSPVKHPSQYEGVFYTDGSAIKSPDPTKSNNAGMGIVHATYKPEYQVLNQWSIPLGNHTAQMAEIAAVEFACKKALKIPGPVLVITDSFYVAESANKELPYWKSNGFVNNKKKPLKHISKWKSIAECLSMKPDITIQHEKGISLQIPVFILKGNALADKLATQGSYVVNAGKRTADGSEFEKRTADGSEFESPKKKAKVE

SEQ ID NO: 1290 - protein, 2174 aa, synthetic construct
MPAAKRVKLDGGDKKYSIGLDIGTNSVGWAVITDEYKVPSKKFKVLGNTDRHSIKKNLIGALLFDSGETAEATRLKRTARRRYTRRKNRICYLQEIFSNEMAKVDDSFFHRLEESFLVEEDKKHERHPIFGNIVDEVAYHEKYPTIYHLRKKLVDSTDKADLRLIYLALAHMIKFRGHFLIEGDLNPDNSDVDKLFIQLVQTYNQLFEENPINASGVDAKAILSARLSKSRRLENLIAQLPGEKKNGLFGNLIALSLGLTPNFKSNFDLAEDAKLQLSKDTYDDDLDNLLAQIGDQYADLFLAAKNLSDAILLSDILRVNTEITKAPLSASMIKRYDEHHQDLTLLKALVRQQLPEKYKEIFFDQSKNGYAGYIDGGASQEEFYKFIKPILEKMDGTEELLVKLNREDLLRKQRTFDNGSIPHQIHLGELHAILRRQEDFYPFLKDNREKIEKILTFRIPYYVGPLARGNSRFAWMTRKSEETITPWNFEEVVDKGASAQSFIERMTNFDKNLPNEKVLPKHSLLYEYFTVYNELTKVKYVTEGMRKPAFLSGEQKKAIVDLLFKTNRKVTVKQLKEDYFKKIECFDSVEISGVEDRFNASLGTYHDLLKIIKDKDFLDNEENEDILEDIVLTLTLFEDREMIEERLKTYAHLFDDKVMKQLKRRRYTGWGRLSRKLINGIRDKQSGKTILDFLKSDGFANRNFMQLIHDDSLTFKEDIQKAQVSGQGDSLHEHIANLAGSPAIKKGILQTVKVVDELVKVMGRHKPENIVIEMARENQTTQKGQKNSRERMKRIEEGIKELGSQILKEHPVENTQLQNEKLYLYYLQNGRDMYVDQELDINRLSDYDVDHIVPQSFLKDDSIDNKVLTRSDKARGKSDNVPSEEVVKKMKNYWRQLLNAKLITQRKFDNLTKAERGGLSELDKAGFIKRQLVETRQITKHVAQILDSRMNTKYDENDKLIREVKVITLKSKLVSDFRKDFQFYKVREINNYHHAHDAYLNAVVGTALIKKYPKLESEFVYGDYKVYDVRKMIAKSEQEIGKATAKYFFYSNIMNFFKTEITLANGEIRKRPLIETNGETGEIVWDKGRDFATVRKVLSMPQVNIVKKTEVQTGGFSKESILPKRNSDKLIARKKDWDPKKYGGFDSPTVAYSVLVVAKVEKGKSKKLKSVKELLGITIMERSSFEKNPIDFLEAKGYKEVKKDLIIKLPKYSLFELENGRKRMLASAGELQKGNELALPSKYVNFLYLASHYEKLKGSPEDNEQKQLFVEQHKHYLDEIIEQISEFSKRVILADANLDKVLSAYNKHRDKPIREQAENIIHLFTLTNLGAPAAFKYFDTTIDRKRYTSTKEVLDATLIHQSITGLYETRIDLSQLGGDGGGGSGGGPAPGGMNPLQLLQPLPAEIKGTKLLAHWNSGATITCIPESFLEDEQPIKKTLIKTIHGEKQQNVYYVTFKVKGRKVEAEVIASPYEYILLSPTDVPWLTQQPLQLTILVPLQEYQEKILSKTALPEDQKQQLKTLFVKYDNLWQHWENQVGHRKIRPHNIATGDYPPRPQKQYPINPKAKPSIQIVIDDLLKQGVLTPQNSTMNTPVYPVPKPDGRWRMVLDYREVNKTIPLTAAQNQHSAGILATIVRQKYKTTLDLANGFWAHPITPESYWLTAFTWQGKQYCWTRLPQGFLNSPALFTADVVDLLKEIPNVQVYVDDIYLSHDDPKEHVQQLEKVFQILLQAGYVVSLKKSEIGQKTVEFLGFNITKEGRGLTDTFKTKLLNITPPKDLKQLQSILGLLNFARNFIPNFAELVQPLYNLIASAKGKYIEWSEENTKQLNMVIEALNTASNLEERLPEQRLVIKVNTSPSAGYVRYYNETGKKPIMYLNYVFSKAELKFSMLEKLLTTMHKALIKAMDLAMGQEILVYSPIVSMTKIQKTPLPERKALPIRWITWMTYLEDPRIQFHYDKTLPELKHIPDVYTSSQSPVKHPSQYEGVFYTDGSAIKSPDPTKSNNAGMGIVHATYKPEYQVLNQWSIPLGNHTAQMAEIAAVEFACKKALKIPGPVLVITDSFYVAESANKELPYWKSNGFVNNKKKPLKHISKWKSIAECLSMKPDITIQHEKGISLQIPVFILKGNALADKLATQGSYVVNAGKRTADGSEFEKRTADGSEFESPKKKAKVE

SEQ ID NO: 1291 - protein, 2176 aa, synthetic construct
MPAAKRVKLDGGDKKYSIGLDIGTNSVGWAVITDEYKVPSKKFKVLGNTDRHSIKKNLIGALLFDSGETAEATRLKRTARRRYTRRKNRICYLQEIFSNEMAKVDDSFFHRLEESFLVEEDKKHERHPIFGNIVDEVAYHEKYPTIYHLRKKLVDSTDKADLRLIYLALAHMIKFRGHFLIEGDLNPDNSDVDKLFIQLVQTYNQLFEENPINASGVDAKAILSARLSKSRRLENLIAQLPGEKKNGLFGNLIALSLGLTPNFKSNFDLAEDAKLQLSKDTYDDDLDNLLAQIGDQYADLFLAAKNLSDAILLSDILRVNTEITKAPLSASMIKRYDEHHQDLTLLKALVRQQLPEKYKEIFFDQSKNGYAGYIDGGASQEEFYKFIKPILEKMDGTEELLVKLNREDLLRKQRTFDNGSIPHQIHLGELHAILRRQEDFYPFLKDNREKIEKILTFRIPYYVGPLARGNSRFAWMTRKSEETITPWNFEEVVDKGASAQSFIERMTNFDKNLPNEKVLPKHSLLYEYFTVYNELTKVKYVTEGMRKPAFLSGEQKKAIVDLLFKTNRKVTVKQLKEDYFKKIECFDSVEISGVEDRFNASLGTYHDLLKIIKDKDFLDNEENEDILEDIVLTLTLFEDREMIEERLKTYAHLFDDKVMKQLKRRRYTGWGRLSRKLINGIRDKQSGKTILDFLKSDGFANRNFMQLIHDDSLTFKEDIQKAQVSGQGDSLHEHIANLAGSPAIKKGILQTVKVVDELVKVMGRHKPENIVIEMARENQTTQKGQKNSRERMKRIEEGIKELGSQILKEHPVENTQLQNEKLYLYYLQNGRDMYVDQELDINRLSDYDVDHIVPQSFLKDDSIDNKVLTRSDKARGKSDNVPSEEVVKKMKNYWRQLLNAKLITQRKFDNLTKAERGGLSELDKAGFIKRQLVETRQITKHVAQILDSRMNTKYDENDKLIREVKVITLKSKLVSDFRKDFQFYKVREINNYHHAHDAYLNAVVGTALIKKYPKLESEFVYGDYKVYDVRKMIAKSEQEIGKATAKYFFYSNIMNFFKTEITLANGEIRKRPLIETNGETGEIVWDKGRDFATVRKVLSMPQVNIVKKTEVQTGGFSKESILPKRNSDKLIARKKDWDPKKYGGFDSPTVAYSVLVVAKVEKGKSKKLKSVKELLGITIMERSSFEKNPIDFLEAKGYKEVKKDLIIKLPKYSLFELENGRKRMLASAGELQKGNELALPSKYVNFLYLASHYEKLKGSPEDNEQKQLFVEQHKHYLDEIIEQISEFSKRVILADANLDKVLSAYNKHRDKPIREQAENIIHLFTLTNLGAPAAFKYFDTTIDRKRYTSTKEVLDATLIHQSITGLYETRIDLSQLGGDGGPAPGGSEAAAKGGMNPLQLLQPLPAEIKGTKLLAHWNSGATITCIPESFLEDEQPIKKTLIKTIHGEKQQNVYYVTFKVKGRKVEAEVIASPYEYILLSPTDVPWLTQQPLQLTILVPLQEYQEKILSKTALPEDQKQQLKTLFVKYDNLWQHWENQVGHRKIRPHNIATGDYPPRPQKQYPINPKAKPSIQIVIDDLLKQGVLTPQNSTMNTPVYPVPKPDGRWRMVLDYREVNKTIPLTAAQNQHSAGILATIVRQKYKTTLDLANGFWAHPITPESYWLTAFTWQGKQYCWTRLPQGFLNSPALFTADVVDLLKEIPNVQVYVDDIYLSHDDPKEHVQQLEKVFQILLQAGYVVSLKKSEIGQKTVEFLGFNITKEGRGLTDTFKTKLLNITPPKDLKQLQSILGLLNFARNFIPNFAELVQPLYNLIASAKGKYIEWSEENTKQLNMVIEALNTASNLEERLPEQRLVIKVNTSPSAGYVRYYNETGKKPIMYLNYVFSKAELKFSMLEKLLTTMHKALIKAMDLAMGQEILVYSPIVSMTKIQKTPLPERKALPIRWITWMTYLEDPRIQFHYDKTLPELKHIPDVYTSSQSPVKHPSQYEGVFYTDGSAIKSPDPTKSNNAGMGIVHATYKPEYQVLNQWSIPLGNHTAQMAEIAAVEFACKKALKIPGPVLVITDSFYVAESANKELPYWKSNGFVNNKKKPLKHISKWKSIAECLSMKPDITIQHEKGISLQIPVFILKGNALADKLATQGSYVVNAGKRTADGSEFEKRTADGSEFESPKKKAKVE

SEQ ID NO: 1292 - protein, 2173 aa, synthetic construct
MPAAKRVKLDGGDKKYSIGLDIGTNSVGWAVITDEYKVPSKKFKVLGNTDRHSIKKNLIGALLFDSGETAEATRLKRTARRRYTRRKNRICYLQEIFSNEMAKVDDSFFHRLEESFLVEEDKKHERHPIFGNIVDEVAYHEKYPTIYHLRKKLVDSTDKADLRLIYLALAHMIKFRGHFLIEGDLNPDNSDVDKLFIQLVQTYNQLFEENPINASGVDAKAILSARLSKSRRLENLIAQLPGEKKNGLFGNLIALSLGLTPNFKSNFDLAEDAKLQLSKDTYDDDLDNLLAQIGDQYADLFLAAKNLSDAILLSDILRVNTEITKAPLSASMIKRYDEHHQDLTLLKALVRQQLPEKYKEIFFDQSKNGYAGYIDGGASQEEFYKFIKPILEKMDGTEELLVKLNREDLLRKQRTFDNGSIPHQIHLGELHAILRRQEDFYPFLKDNREKIEKILTFRIPYYVGPLARGNSRFAWMTRKSEETITPWNFEEVVDKGASAQSFIERMTNFDKNLPNEKVLPKHSLLYEYFTVYNELTKVKYVTEGMRKPAFLSGEQKKAIVDLLFKTNRKVTVKQLKEDYFKKIECFDSVEISGVEDRFNASLGTYHDLLKIIKDKDFLDNEENEDILEDIVLTLTLFEDREMIEERLKTYAHLFDDKVMKQLKRRRYTGWGRLSRKLINGIRDKQSGKTILDFLKSDGFANRNFMQLIHDDSLTFKEDIQKAQVSGQGDSLHEHIANLAGSPAIKKGILQTVKVVDELVKVMGRHKPENIVIEMARENQTTQKGQKNSRERMKRIEEGIKELGSQILKEHPVENTQLQNEKLYLYYLQNGRDMYVDQELDINRLSDYDVDHIVPQSFLKDDSIDNKVLTRSDKARGKSDNVPSEEVVKKMKNYWRQLLNAKLITQRKFDNLTKAERGGLSELDKAGFIKRQLVETRQITKHVAQILDSRMNTKYDENDKLIREVKVITLKSKLVSDFRKDFQFYKVREINNYHHAHDAYLNAVVGTALIKKYPKLESEFVYGDYKVYDVRKMIAKSEQEIGKATAKYFFYSNIMNFFKTEITLANGEIRKRPLIETNGETGEIVWDKGRDFATVRKVLSMPQVNIVKKTEVQTGGFSKESILPKRNSDKLIARKKDWDPKKYGGFDSPTVAYSVLVVAKVEKGKSKKLKSVKELLGITIMERSSFEKNPIDFLEAKGYKEVKKDLIIKLPKYSLFELENGRKRMLASAGELQKGNELALPSKYVNFLYLASHYEKLKGSPEDNEQKQLFVEQHKHYLDEIIEQISEFSKRVILADANLDKVLSAYNKHRDKPIREQAENIIHLFTLTNLGAPAAFKYFDTTIDRKRYTSTKEVLDATLIHQSITGLYETRIDLSQLGGDGGGSSEAAAKGGMNPLQLLQPLPAEIKGTKLLAHWNSGATITCIPESFLEDEQPIKKTLIKTIHGEKQQNVYYVTFKVKGRKVEAEVIASPYEYILLSPTDVPWLTQQPLQLTILVPLQEYQEKILSKTALPEDQKQQLKTLFVKYDNLWQHWENQVGHRKIRPHNIATGDYPPRPQKQYPINPKAKPSIQIVIDDLLKQGVLTPQNSTMNTPVYPVPKPDGRWRMVLDYREVNKTIPLTAAQNQHSAGILATIVRQKYKTTLDLANGFWAHPITPESYWLTAFTWQGKQYCWTRLPQGFLNSPALFTADVVDLLKEIPNVQVYVDDIYLSHDDPKEHVQQLEKVFQILLQAGYVVSLKKSEIGQKTVEFLGFNITKEGRGLTDTFKTKLLNITPPKDLKQLQSILGLLNFARNFIPNFAELVQPLYNLIASAKGKYIEWSEENTKQLNMVIEALNTASNLEERLPEQRLVIKVNTSPSAGYVRYYNETGKKPIMYLNYVFSKAELKFSMLEKLLTTMHKALIKAMDLAMGQEILVYSPIVSMTKIQKTPLPERKALPIRWITWMTYLEDPRIQFHYDKTLPELKHIPDVYTSSQSPVKHPSQYEGVFYTDGSAIKSPDPTKSNNAGMGIVHATYKPEYQVLNQWSIPLGNHTAQMAEIAAVEFACKKALKIPGPVLVITDSFYVAESANKELPYWKSNGFVNNKKKPLKHISKWKSIAECLSMKPDITIQHEKGISLQIPVFILKGNALADKLATQGSYVVNAGKRTADGSEFEKRTADGSEFESPKKKAKVE

SEQ ID NO: 1293 - protein, 2176 aa, synthetic construct
MPAAKRVKLDGGDKKYSIGLDIGTNSVGWAVITDEYKVPSKKFKVLGNTDRHSIKKNLIGALLFDSGETAEATRLKRTARRRYTRRKNRICYLQEIFSNEMAKVDDSFFHRLEESFLVEEDKKHERHPIFGNIVDEVAYHEKYPTIYHLRKKLVDSTDKADLRLIYLALAHMIKFRGHFLIEGDLNPDNSDVDKLFIQLVQTYNQLFEENPINASGVDAKAILSARLSKSRRLENLIAQLPGEKKNGLFGNLIALSLGLTPNFKSNFDLAEDAKLQLSKDTYDDDLDNLLAQIGDQYADLFLAAKNLSDAILLSDILRVNTEITKAPLSASMIKRYDEHHQDLTLLKALVRQQLPEKYKEIFFDQSKNGYAGYIDGGASQEEFYKFIKPILEKMDGTEELLVKLNREDLLRKQRTFDNGSIPHQIHLGELHAILRRQEDFYPFLKDNREKIEKILTFRIPYYVGPLARGNSRFAWMTRKSEETITPWNFEEVVDKGASAQSFIERMTNFDKNLPNEKVLPKHSLLYEYFTVYNELTKVKYVTEGMRKPAFLSGEQKKAIVDLLFKTNRKVTVKQLKEDYFKKIECFDSVEISGVEDRFNASLGTYHDLLKIIKDKDFLDNEENEDILEDIVLTLTLFEDREMIEERLKTYAHLFDDKVMKQLKRRRYTGWGRLSRKLINGIRDKQSGKTILDFLKSDGFANRNFMQLIHDDSLTFKEDIQKAQVSGQGDSLHEHIANLAGSPAIKKGILQTVKVVDELVKVMGRHKPENIVIEMARENQTTQKGQKNSRERMKRIEEGIKELGSQILKEHPVENTQLQNEKLYLYYLQNGRDMYVDQELDINRLSDYDVDHIVPQSFLKDDSIDNKVLTRSDKARGKSDNVPSEEVVKKMKNYWRQLLNAKLITQRKFDNLTKAERGGLSELDKAGFIKRQLVETRQITKHVAQILDSRMNTKYDENDKLIREVKVITLKSKLVSDFRKDFQFYKVREINNYHHAHDAYLNAVVGTALIKKYPKLESEFVYGDYKVYDVRKMIAKSEQEIGKATAKYFFYSNIMNFFKTEITLANGEIRKRPLIETNGETGEIVWDKGRDFATVRKVLSMPQVNIVKKTEVQTGGFSKESILPKRNSDKLIARKKDWDPKKYGGFDSPTVAYSVLVVAKVEKGKSKKLKSVKELLGITIMERSSFEKNPIDFLEAKGYKEVKKDLIIKLPKYSLFELENGRKRMLASAGELQKGNELALPSKYVNFLYLASHYEKLKGSPEDNEQKQLFVEQHKHYLDEIIEQISEFSKRVILADANLDKVLSAYNKHRDKPIREQAENIIHLFTLTNLGAPAAFKYFDTTIDRKRYTSTKEVLDATLIHQSITGLYETRIDLSQLGGDGGGGSGSSEAAAKGGMNPLQLLQPLPAEIKGTKLLAHWNSGATITCIPESFLEDEQPIKKTLIKTIHGEKQQNVYYVTFKVKGRKVEAEVIASPYEYILLSPTDVPWLTQQPLQLTILVPLQEYQEKILSKTALPEDQKQQLKTLFVKYDNLWQHWENQVGHRKIRPHNIATGDYPPRPQKQYPINPKAKPSIQIVIDDLLKQGVLTPQNSTMNTPVYPVPKPDGRWRMVLDYREVNKTIPLTAAQNQHSAGILATIVRQKYKTTLDLANGFWAHPITPESYWLTAFTWQGKQYCWTRLPQGFLNSPALFTADVVDLLKEIPNVQVYVDDIYLSHDDPKEHVQQLEKVFQILLQAGYVVSLKKSEIGQKTVEFLGFNITKEGRGLTDTFKTKLLNITPPKDLKQLQSILGLLNFARNFIPNFAELVQPLYNLIASAKGKYIEWSEENTKQLNMVIEALNTASNLEERLPEQRLVIKVNTSPSAGYVRYYNETGKKPIMYLNYVFSKAELKFSMLEKLLTTMHKALIKAMDLAMGQEILVYSPIVSMTKIQKTPLPERKALPIRWITWMTYLEDPRIQFHYDKTLPELKHIPDVYTSSQSPVKHPSQYEGVFYTDGSAIKSPDPTKSNNAGMGIVHATYKPEYQVLNQWSIPLGNHTAQMAEIAAVEFACKKALKIPGPVLVITDSFYVAESANKELPYWKSNGFVNNKKKPLKHISKWKSIAECLSMKPDITIQHEKGISLQIPVFILKGNALADKLATQGSYVVNAGKRTADGSEFEKRTADGSEFESPKKKAKVE

SEQ ID NO: 1294 - protein, 2171 aa, synthetic construct
MPAAKRVKLDGGDKKYSIGLDIGTNSVGWAVITDEYKVPSKKFKVLGNTDRHSIKKNLIGALLFDSGETAEATRLKRTARRRYTRRKNRICYLQEIFSNEMAKVDDSFFHRLEESFLVEEDKKHERHPIFGNIVDEVAYHEKYPTIYHLRKKLVDSTDKADLRLIYLALAHMIKFRGHFLIEGDLNPDNSDVDKLFIQLVQTYNQLFEENPINASGVDAKAILSARLSKSRRLENLIAQLPGEKKNGLFGNLIALSLGLTPNFKSNFDLAEDAKLQLSKDTYDDDLDNLLAQIGDQYADLFLAAKNLSDAILLSDILRVNTEITKAPLSASMIKRYDEHHQDLTLLKALVRQQLPEKYKEIFFDQSKNGYAGYIDGGASQEEFYKFIKPILEKMDGTEELLVKLNREDLLRKQRTFDNGSIPHQIHLGELHAILRRQEDFYPFLKDNREKIEKILTFRIPYYVGPLARGNSRFAWMTRKSEETITPWNFEEVVDKGASAQSFIERMTNFDKNLPNEKVLPKHSLLYEYFTVYNELTKVKYVTEGMRKPAFLSGEQKKAIVDLLFKTNRKVTVKQLKEDYFKKIECFDSVEISGVEDRFNASLGTYHDLLKIIKDKDFLDNEENEDILEDIVLTLTLFEDREMIEERLKTYAHLFDDKVMKQLKRRRYTGWGRLSRKLINGIRDKQSGKTILDFLKSDGFANRNFMQLIHDDSLTFKEDIQKAQVSGQGDSLHEHIANLAGSPAIKKGILQTVKVVDELVKVMGRHKPENIVIEMARENQTTQKGQKNSRERMKRIEEGIKELGSQILKEHPVENTQLQNEKLYLYYLQNGRDMYVDQELDINRLSDYDVDHIVPQSFLKDDSIDNKVLTRSDKARGKSDNVPSEEVVKKMKNYWRQLLNAKLITQRKFDNLTKAERGGLSELDKAGFIKRQLVETRQITKHVAQILDSRMNTKYDENDKLIREVKVITLKSKLVSDFRKDFQFYKVREINNYHHAHDAYLNAVVGTALIKKYPKLESEFVYGDYKVYDVRKMIAKSEQEIGKATAKYFFYSNIMNFFKTEITLANGEIRKRPLIETNGETGEIVWDKGRDFATVRKVLSMPQVNIVKKTEVQTGGFSKESILPKRNSDKLIARKKDWDPKKYGGFDSPTVAYSVLVVAKVEKGKSKKLKSVKELLGITIMERSSFEKNPIDFLEAKGYKEVKKDLIIKLPKYSLFELENGRKRMLASAGELQKGNELALPSKYVNFLYLASHYEKLKGSPEDNEQKQLFVEQHKHYLDEIIEQISEFSKRVILADANLDKVLSAYNKHRDKPIREQAENIIHLFTLTNLGAPAAFKYFDTTIDRKRYTSTKEVLDATLIHQSITGLYETRIDLSQLGGDGGGGSGGSGGMNPLQLLQPLPAEIKGTKLLAHWNSGATITCIPESFLEDEQPIKKTLIKTIHGEKQQNVYYVTFKVKGRKVEAEVIASPYEYILLSPTDVPWLTQQPLQLTILVPLQEYQEKILSKTALPEDQKQQLKTLFVKYDNLWQHWENQVGHRKIRPHNIATGDYPPRPQKQYPINPKAKPSIQIVIDDLLKQGVLTPQNSTMNTPVYPVPKPDGRWRMVLDYREVNKTIPLTAAQNQHSAGILATIVRQKYKTTLDLANGFWAHPITPESYWLTAFTWQGKQYCWTRLPQGFLNSPALFTADVVDLLKEIPNVQVYVDDIYLSHDDPKEHVQQLEKVFQILLQAGYVVSLKKSEIGQKTVEFLGFNITKEGRGLTDTFKTKLLNITPPKDLKQLQSILGLLNFARNFIPNFAELVQPLYNLIASAKGKYIEWSEENTKQLNMVIEALNTASNLEERLPEQRLVIKVNTSPSAGYVRYYNETGKKPIMYLNYVFSKAELKFSMLEKLLTTMHKALIKAMDLAMGQEILVYSPIVSMTKIQKTPLPERKALPIRWITWMTYLEDPRIQFHYDKTLPELKHIPDVYTSSQSPVKHPSQYEGVFYTDGSAIKSPDPTKSNNAGMGIVHATYKPEYQVLNQWSIPLGNHTAQMAEIAAVEFACKKALKIPGPVLVITDSFYVAESANKELPYWKSNGFVNNKKKPLKHISKWKSIAECLSMKPDITIQHEKGISLQIPVFILKGNALADKLATQGSYVVNAGKRTADGSEFEKRTADGSEFESPKKKAKVE

SEQ ID NO: 1295 - protein, 2084 aa, synthetic construct
MPAAKRVKLDGGDKKYSIGLDIGTNSVGWAVITDEYKVPSKKFKVLGNTDRHSIKKNLIGALLFDSGETAEATRLKRTARRRYTRRKNRICYLQEIFSNEMAKVDDSFFHRLEESFLVEEDKKHERHPIFGNIVDEVAYHEKYPTIYHLRKKLVDSTDKADLRLIYLALAHMIKFRGHFLIEGDLNPDNSDVDKLFIQLVQTYNQLFEENPINASGVDAKAILSARLSKSRRLENLIAQLPGEKKNGLFGNLIALSLGLTPNFKSNFDLAEDAKLQLSKDTYDDDLDNLLAQIGDQYADLFLAAKNLSDAILLSDILRVNTEITKAPLSASMIKRYDEHHQDLTLLKALVRQQLPEKYKEIFFDQSKNGYAGYIDGGASQEEFYKFIKPILEKMDGTEELLVKLNREDLLRKQRTFDNGSIPHQIHLGELHAILRRQEDFYPFLKDNREKIEKILTFRIPYYVGPLARGNSRFAWMTRKSEETITPWNFEEVVDKGASAQSFIERMTNFDKNLPNEKVLPKHSLLYEYFTVYNELTKVKYVTEGMRKPAFLSGEQKKAIVDLLFKTNRKVTVKQLKEDYFKKIECFDSVEISGVEDRFNASLGTYHDLLKIIKDKDFLDNEENEDILEDIVLTLTLFEDREMIEERLKTYAHLFDDKVMKQLKRRRYTGWGRLSRKLINGIRDKQSGKTILDFLKSDGFANRNFMQLIHDDSLTFKEDIQKAQVSGQGDSLHEHIANLAGSPAIKKGILQTVKVVDELVKVMGRHKPENIVIEMARENQTTQKGQKNSRERMKRIEEGIKELGSQILKEHPVENTQLQNEKLYLYYLQNGRDMYVDQELDINRLSDYDVDHIVPQSFLKDDSIDNKVLTRSDKARGKSDNVPSEEVVKKMKNYWRQLLNAKLITQRKFDNLTKAERGGLSELDKAGFIKRQLVETRQITKHVAQILDSRMNTKYDENDKLIREVKVITLKSKLVSDFRKDFQFYKVREINNYHHAHDAYLNAVVGTALIKKYPKLESEFVYGDYKVYDVRKMIAKSEQEIGKATAKYFFYSNIMNFFKTEITLANGEIRKRPLIETNGETGEIVWDKGRDFATVRKVLSMPQVNIVKKTEVQTGGFSKESILPKRNSDKLIARKKDWDPKKYGGFDSPTVAYSVLVVAKVEKGKSKKLKSVKELLGITIMERSSFEKNPIDFLEAKGYKEVKKDLIIKLPKYSLFELENGRKRMLASAGELQKGNELALPSKYVNFLYLASHYEKLKGSPEDNEQKQLFVEQHKHYLDEIIEQISEFSKRVILADANLDKVLSAYNKHRDKPIREQAENIIHLFTLTNLGAPAAFKYFDTTIDRKRYTSTKEVLDATLIHQSITGLYETRIDLSQLGGDGGEAAAKPAPGGVPWLTQQPLQLTILVPLQEYQEKILSKTALPEDQKQQLKTLFVKYDNLWQHWENQVGHRKIRPHNIATGDYPPRPQKQYPINPKAKPSIQIVIDDLLKQGVLTPQNSTMNTPVYPVPKPDGRWRMVLDYREVNKTIPLTAAQNQHSAGILATIVRQKYKTTLDLANGFWAHPITPESYWLTAFTWQGKQYCWTRLPQGFLNSPALFTADVVDLLKEIPNVQVYVDDIYLSHDDPKEHVQQLEKVFQILLQAGYVVSLKKSEIGQKTVEFLGFNITKEGRGLTDTFKTKLLNITPPKDLKQLQSILGLLNFARNFIPNFAELVQPLYNLIASAKGKYIEWSEENTKQLNMVIEALNTASNLEERLPEQRLVIKVNTSPSAGYVRYYNETGKKPIMYLNYVFSKAELKFSMLEKLLTTMHKALIKAMDLAMGQEILVYSPIVSMTKIQKTPLPERKALPIRWITWMTYLEDPRIQFHYDKTLPELKHIPDVYTSSQSPVKHPSQYEGVFYTDGSAIKSPDPTKSNNAGMGIVHATYKPEYQVLNQWSIPLGNHTAQMAEIAAVEFACKKALKIPGPVLVITDSFYVAESANKELPYWKSNGFVNNKKKPLKHISKWKSIAECLSMKPDITIQHEKGISLQIPVFILKGNALADKLATQGSYVVNAGKRTADGSEFEKRTADGSEFESPKKKAKVE

SEQ ID NO: 1296 - protein, 2087 aa, synthetic construct
MPAAKRVKLDGGDKKYSIGLDIGTNSVGWAVITDEYKVPSKKFKVLGNTDRHSIKKNLIGALLFDSGETAEATRLKRTARRRYTRRKNRICYLQEIFSNEMAKVDDSFFHRLEESFLVEEDKKHERHPIFGNIVDEVAYHEKYPTIYHLRKKLVDSTDKADLRLIYLALAHMIKFRGHFLIEGDLNPDNSDVDKLFIQLVQTYNQLFEENPINASGVDAKAILSARLSKSRRLENLIAQLPGEKKNGLFGNLIALSLGLTPNFKSNFDLAEDAKLQLSKDTYDDDLDNLLAQIGDQYADLFLAAKNLSDAILLSDILRVNTEITKAPLSASMIKRYDEHHQDLTLLKALVRQQLPEKYKEIFFDQSKNGYAGYIDGGASQEEFYKFIKPILEKMDGTEELLVKLNREDLLRKQRTFDNGSIPHQIHLGELHAILRRQEDFYPFLKDNREKIEKILTFRIPYYVGPLARGNSRFAWMTRKSEETITPWNFEEVVDKGASAQSFIERMTNFDKNLPNEKVLPKHSLLYEYFTVYNELTKVKYVTEGMRKPAFLSGEQKKAIVDLLFKTNRKVTVKQLKEDYFKKIECFDSVEISGVEDRFNASLGTYHDLLKIIKDKDFLDNEENEDILEDIVLTLTLFEDREMIEERLKTYAHLFDDKVMKQLKRRRYTGWGRLSRKLINGIRDKQSGKTILDFLKSDGFANRNFMQLIHDDSLTFKEDIQKAQVSGQGDSLHEHIANLAGSPAIKKGILQTVKVVDELVKVMGRHKPENIVIEMARENQTTQKGQKNSRERMKRIEEGIKELGSQILKEHPVENTQLQNEKLYLYYLQNGRDMYVDQELDINRLSDYDVDHIVPQSFLKDDSIDNKVLTRSDKARGKSDNVPSEEVVKKMKNYWRQLLNAKLITQRKFDNLTKAERGGLSELDKAGFIKRQLVETRQITKHVAQILDSRMNTKYDENDKLIREVKVITLKSKLVSDFRKDFQFYKVREINNYHHAHDAYLNAVVGTALIKKYPKLESEFVYGDYKVYDVRKMIAKSEQEIGKATAKYFFYSNIMNFFKTEITLANGEIRKRPLIETNGETGEIVWDKGRDFATVRKVLSMPQVNIVKKTEVQTGGFSKESILPKRNSDKLIARKKDWDPKKYGGFDSPTVAYSVLVVAKVEKGKSKKLKSVKELLGITIMERSSFEKNPIDFLEAKGYKEVKKDLIIKLPKYSLFELENGRKRMLASAGELQKGNELALPSKYVNFLYLASHYEKLKGSPEDNEQKQLFVEQHKHYLDEIIEQISEFSKRVILADANLDKVLSAYNKHRDKPIREQAENIIHLFTLTNLGAPAAFKYFDTTIDRKRYTSTKEVLDATLIHQSITGLYETRIDLSQLGGDGGEAAAKGSSGGSGGVPWLTQQPLQLTILVPLQEYQEKILSKTALPEDQKQQLKTLFVKYDNLWQHWENQVGHRKIRPHNIATGDYPPRPQKQYPINPKAKPSIQIVIDDLLKQGVLTPQNSTMNTPVYPVPKPDGRWRMVLDYREVNKTIPLTAAQNQHSAGILATIVRQKYKTTLDLANGFWAHPITPESYWLTAFTWQGKQYCWTRLPQGFLNSPALFTADVVDLLKEIPNVQVYVDDIYLSHDDPKEHVQQLEKVFQILLQAGYVVSLKKSEIGQKTVEFLGFNITKEGRGLTDTFKTKLLNITPPKDLKQLQSILGLLNFARNFIPNFAELVQPLYNLIASAKGKYIEWSEENTKQLNMVIEALNTASNLEERLPEQRLVIKVNTSPSAGYVRYYNETGKKPIMYLNYVFSKAELKFSMLEKLLTTMHKALIKAMDLAMGQEILVYSPIVSMTKIQKTPLPERKALPIRWITWMTYLEDPRIQFHYDKTLPELKHIPDVYTSSQSPVKHPSQYEGVFYTDGSAIKSPDPTKSNNAGMGIVHATYKPEYQVLNQWSIPLGNHTAQMAEIAAVEFACKKALKIPGPVLVITDSFYVAESANKELPYWKSNGFVNNKKKPLKHISKWKSIAECLSMKPDITIQHEKGISLQIPVFILKGNALADKLATQGSYVVNAGKRTADGSEFEKRTADGSEFESPKKKAKVE

SEQ ID NO: 1297 - protein, 2094 aa, synthetic construct
MPAAKRVKLDGGDKKYSIGLDIGTNSVGWAVITDEYKVPSKKFKVLGNTDRHSIKKNLIGALLFDSGETAEATRLKRTARRRYTRRKNRICYLQEIFSNEMAKVDDSFFHRLEESFLVEEDKKHERHPIFGNIVDEVAYHEKYPTIYHLRKKLVDSTDKADLRLIYLALAHMIKFRGHFLIEGDLNPDNSDVDKLFIQLVQTYNQLFEENPINASGVDAKAILSARLSKSRRLENLIAQLPGEKKNGLFGNLIALSLGLTPNFKSNFDLAEDAKLQLSKDTYDDDLDNLLAQIGDQYADLFLAAKNLSDAILLSDILRVNTEITKAPLSASMIKRYDEHHQDLTLLKALVRQQLPEKYKEIFFDQSKNGYAGYIDGGASQEEFYKFIKPILEKMDGTEELLVKLNREDLLRKQRTFDNGSIPHQIHLGELHAILRRQEDFYPFLKDNREKIEKILTFRIPYYVGPLARGNSRFAWMTRKSEETITPWNFEEVVDKGASAQSFIERMTNFDKNLPNEKVLPKHSLLYEYFTVYNELTKVKYVTEGMRKPAFLSGEQKKAIVDLLFKTNRKVTVKQLKEDYFKKIECFDSVEISGVEDRFNASLGTYHDLLKIIKDKDFLDNEENEDILEDIVLTLTLFEDREMIEERLKTYAHLFDDKVMKQLKRRRYTGWGRLSRKLINGIRDKQSGKTILDFLKSDGFANRNFMQLIHDDSLTFKEDIQKAQVSGQGDSLHEHIANLAGSPAIKKGILQTVKVVDELVKVMGRHKPENIVIEMARENQTTQKGQKNSRERMKRIEEGIKELGSQILKEHPVENTQLQNEKLYLYYLQNGRDMYVDQELDINRLSDYDVDHIVPQSFLKDDSIDNKVLTRSDKARGKSDNVPSEEVVKKMKNYWRQLLNAKLITQRKFDNLTKAERGGLSELDKAGFIKRQLVETRQITKHVAQILDSRMNTKYDENDKLIREVKVITLKSKLVSDFRKDFQFYKVREINNYHHAHDAYLNAVVGTALIKKYPKLESEFVYGDYKVYDVRKMIAKSEQEIGKATAKYFFYSNIMNFFKTEITLANGEIRKRPLIETNGETGEIVWDKGRDFATVRKVLSMPQVNIVKKTEVQTGGFSKESILPKRNSDKLIARKKDWDPKKYGGFDSPTVAYSVLVVAKVEKGKSKKLKSVKELLGITIMERSSFEKNPIDFLEAKGYKEVKKDLIIKLPKYSLFELENGRKRMLASAGELQKGNELALPSKYVNFLYLASHYEKLKGSPEDNEQKQLFVEQHKHYLDEIIEQISEFSKRVILADANLDKVLSAYNKHRDKPIREQAENIIHLFTLTNLGAPAAFKYFDTTIDRKRYTSTKEVLDATLIHQSITGLYETRIDLSQLGGDGGGSSGSSGSSGSSGSSGSSGGVPWLTQQPLQLTILVPLQEYQEKILSKTALPEDQKQQLKTLFVKYDNLWQHWENQVGHRKIRPHNIATGDYPPRPQKQYPINPKAKPSIQIVIDDLLKQGVLTPQNSTMNTPVYPVPKPDGRWRMVLDYREVNKTIPLTAAQNQHSAGILATIVRQKYKTTLDLANGFWAHPITPESYWLTAFTWQGKQYCWTRLPQGFLNSPALFTADVVDLLKEIPNVQVYVDDIYLSHDDPKEHVQQLEKVFQILLQAGYVVSLKKSEIGQKTVEFLGFNITKEGRGLTDTFKTKLLNITPPKDLKQLQSILGLLNFARNFIPNFAELVQPLYNLIASAKGKYIEWSEENTKQLNMVIEALNTASNLEERLPEQRLVIKVNTSPSAGYVRYYNETGKKPIMYLNYVFSKAELKFSMLEKLLTTMHKALIKAMDLAMGQEILVYSPIVSMTKIQKTPLPERKALPIRWITWMTYLEDPRIQFHYDKTLPELKHIPDVYTSSQSPVKHPSQYEGVFYTDGSAIKSPDPTKSNNAGMGIVHATYKPEYQVLNQWSIPLGNHTAQMAEIAAVEFACKKALKIPGPVLVITDSFYVAESANKELPYWKSNGFVNNKKKPLKHISKWKSIAECLSMKPDITIQHEKGISLQIPVFILKGNALADKLATQGSYVVNAGKRTADGSEFEKRTADGSEFESPKKKAKVE

SEQ ID NO: 1298 - protein, 2122 aa, synthetic construct
MPAAKRVKLDGGDKKYSIGLDIGTNSVGWAVITDEYKVPSKKFKVLGNTDRHSIKKNLIGALLFDSGETAEATRLKRTARRRYTRRKNRICYLQEIFSNEMAKVDDSFFHRLEESFLVEEDKKHERHPIFGNIVDEVAYHEKYPTIYHLRKKLVDSTDKADLRLIYLALAHMIKFRGHFLIEGDLNPDNSDVDKLFIQLVQTYNQLFEENPINASGVDAKAILSARLSKSRRLENLIAQLPGEKKNGLFGNLIALSLGLTPNFKSNFDLAEDAKLQLSKDTYDDDLDNLLAQIGDQYADLFLAAKNLSDAILLSDILRVNTEITKAPLSASMIKRYDEHHQDLTLLKALVRQQLPEKYKEIFFDQSKNGYAGYIDGGASQEEFYKFIKPILEKMDGTEELLVKLNREDLLRKQRTFDNGSIPHQIHLGELHAILRRQEDFYPFLKDNREKIEKILTFRIPYYVGPLARGNSRFAWMTRKSEETITPWNFEEVVDKGASAQSFIERMTNFDKNLPNEKVLPKHSLLYEYFTVYNELTKVKYVTEGMRKPAFLSGEQKKAIVDLLFKTNRKVTVKQLKEDYFKKIECFDSVEISGVEDRFNASLGTYHDLLKIIKDKDFLDNEENEDILEDIVLTLTLFEDREMIEERLKTYAHLFDDKVMKQLKRRRYTGWGRLSRKLINGIRDKQSGKTILDFLKSDGFANRNFMQLIHDDSLTFKEDIQKAQVSGQGDSLHEHIANLAGSPAIKKGILQTVKVVDELVKVMGRHKPENIVIEMARENQTTQKGQKNSRERMKRIEEGIKELGSQILKEHPVENTQLQNEKLYLYYLQNGRDMYVDQELDINRLSDYDVDHIVPQSFLKDDSIDNKVLTRSDKARGKSDNVPSEEVVKKMKNYWRQLLNAKLITQRKFDNLTKAERGGLSELDKAGFIKRQLVETRQITKHVAQILDSRMNTKYDENDKLIREVKVITLKSKLVSDFRKDFQFYKVREINNYHHAHDAYLNAVVGTALIKKYPKLESEFVYGDYKVYDVRKMIAKSEQEIGKATAKYFFYSNIMNFFKTEITLANGEIRKRPLIETNGETGEIVWDKGRDFATVRKVLSMPQVNIVKKTEVQTGGFSKESILPKRNSDKLIARKKDWDPKKYGGFDSPTVAYSVLVVAKVEKGKSKKLKSVKELLGITIMERSSFEKNPIDFLEAKGYKEVKKDLIIKLPKYSLFELENGRKRMLASAGELQKGNELALPSKYVNFLYLASHYEKLKGSPEDNEQKQLFVEQHKHYLDEIIEQISEFSKRVILADANLDKVLSAYNKHRDKPIREQAENIIHLFTLTNLGAPAAFKYFDTTIDRKRYTSTKEVLDATLIHQSITGLYETRIDLSQLGGDGGAEAAAKEAAAKEAAAKEAAAKALEAEAAAKEAAAKEAAAKEAAAKAGGVPWLTQQPLQLTILVPLQEYQEKILSKTALPEDQKQQLKTLFVKYDNLWQHWENQVGHRKIRPHNIATGDYPPRPQKQYPINPKAKPSIQIVIDDLLKQGVLTPQNSTMNTPVYPVPKPDGRWRMVLDYREVNKTIPLTAAQNQHSAGILATIVRQKYKTTLDLANGFWAHPITPESYWLTAFTWQGKQYCWTRLPQGFLNSPALFNADVVDLLKEIPNVQVYVDDIYLSHDDPKEHVQQLEKVFQILLQAGYVVSLKKSEIGQKTVEFLGFNITKEGRGLTDTFKTKLLNITPPKDLKQLQSILGLLNFARNFIPNFAELVQPLYNLIAPAKGKYIEWSEENTKQLNMVIEALNTASNLEERLPEQRLVIKVNTSPSAGYVRYYNETGKKPIMYLNYVFSKAELKFSMLEKLLTTMHKALIKAMDLAMGQEILVYSPIVSMTKIQKTPLPERKALPIRWITWMTYLEDPRIQFHYDKTLPELKHIPDVYTSSQSPVKHPSQYEGVFYTDGSAIKSPDPTKSNNAGMGIVHATYKPEYQVLNQWSIPLGNHTAQMAEIAAVEFACKKALKIPGPVLVITDSFYVAESANKELPYWKSNGFVNNKKKPLKHISKWKSIAECLSMKPDITIQHEKGISLQIPVFILKGNALADKLATQGSYVVNAGKRTADGSEFEKRTADGSEFESPKKKAKVE

SEQ ID NO: 1299 - protein, 2096 aa, synthetic construct
MPAAKRVKLDGGDKKYSIGLDIGTNSVGWAVITDEYKVPSKKFKVLGNTDRHSIKKNLIGALLFDSGETAEATRLKRTARRRYTRRKNRICYLQEIFSNEMAKVDDSFFHRLEESFLVEEDKKHERHPIFGNIVDEVAYHEKYPTIYHLRKKLVDSTDKADLRLIYLALAHMIKFRGHFLIEGDLNPDNSDVDKLFIQLVQTYNQLFEENPINASGVDAKAILSARLSKSRRLENLIAQLPGEKKNGLFGNLIALSLGLTPNFKSNFDLAEDAKLQLSKDTYDDDLDNLLAQIGDQYADLFLAAKNLSDAILLSDILRVNTEITKAPLSASMIKRYDEHHQDLTLLKALVRQQLPEKYKEIFFDQSKNGYAGYIDGGASQEEFYKFIKPILEKMDGTEELLVKLNREDLLRKQRTFDNGSIPHQIHLGELHAILRRQEDFYPFLKDNREKIEKILTFRIPYYVGPLARGNSRFAWMTRKSEETITPWNFEEVVDKGASAQSFIERMTNFDKNLPNEKVLPKHSLLYEYFTVYNELTKVKYVTEGMRKPAFLSGEQKKAIVDLLFKTNRKVTVKQLKEDYFKKIECFDSVEISGVEDRFNASLGTYHDLLKIIKDKDFLDNEENEDILEDIVLTLTLFEDREMIEERLKTYAHLFDDKVMKQLKRRRYTGWGRLSRKLINGIRDKQSGKTILDFLKSDGFANRNFMQLIHDDSLTFKEDIQKAQVSGQGDSLHEHIANLAGSPAIKKGILQTVKVVDELVKVMGRHKPENIVIEMARENQTTQKGQKNSRERMKRIEEGIKELGSQILKEHPVENTQLQNEKLYLYYLQNGRDMYVDQELDINRLSDYDVDHIVPQSFLKDDSIDNKVLTRSDKARGKSDNVPSEEVVKKMKNYWRQLLNAKLITQRKFDNLTKAERGGLSELDKAGFIKRQLVETRQITKHVAQILDSRMNTKYDENDKLIREVKVITLKSKLVSDFRKDFQFYKVREINNYHHAHDAYLNAVVGTALIKKYPKLESEFVYGDYKVYDVRKMIAKSEQEIGKATAKYFFYSNIMNFFKTEITLANGEIRKRPLIETNGETGEIVWDKGRDFATVRKVLSMPQVNIVKKTEVQTGGFSKESILPKRNSDKLIARKKDWDPKKYGGFDSPTVAYSVLVVAKVEKGKSKKLKSVKELLGITIMERSSFEKNPIDFLEAKGYKEVKKDLIIKLPKYSLFELENGRKRMLASAGELQKGNELALPSKYVNFLYLASHYEKLKGSPEDNEQKQLFVEQHKHYLDEIIEQISEFSKRVILADANLDKVLSAYNKHRDKPIREQAENIIHLFTLTNLGAPAAFKYFDTTIDRKRYTSTKEVLDATLIHQSITGLYETRIDLSQLGGDGGGGGGSGGGGSGGGGSGGGGSGGVPWLTQQPLQLTILVPLQEYQEKILSKTALPEDQKQQLKTLFVKYDNLWQHWENQVGHRKIRPHNIATGDYPPRPQKQYPINPKAKPSIQIVIDDLLKQGVLTPQNSTMNTPVYPVPKPDGRWRMVLDYREVNKTIPLTAAQNQHSAGILATIVRQKYKTTLDLANGFWAHPITPESYWLTAFTWQGKQYCWTRLPQGFLNSPALFNADVVDLLKEIPNVQVYVDDIYLSHDDPKEHVQQLEKVFQILLQAGYVVSLKKSEIGQKTVEFLGFNITKEGRGLTDTFKTKLLNITPPKDLKQLQSILGLLNFARNFIPNFAELVQPLYNLIAPAKGKYIEWSEENTKQLNMVIEALNTASNLEERLPEQRLVIKVNTSPSAGYVRYYNETGKKPIMYLNYVFSKAELKFSMLEKLLTTMHKALIKAMDLAMGQEILVYSPIVSMTKIQKTPLPERKALPIRWITWMTYLEDPRIQFHYDKTLPELKHIPDVYTSSQSPVKHPSQYEGVFYTDGSAIKSPDPTKSNNAGMGIVHATYKPEYQVLNQWSIPLGNHTAQMAEIAAVEFACKKALKIPGPVLVITDSFYVAESANKELPYWKSNGFVNNKKKPLKHISKWKSIAECLSMKPDITIQHEKGISLQIPVFILKGNALADKLATQGSYVVNAGKRTADGSEFEKRTADGSEFESPKKKAKVE

SEQ ID NO: 1300 - protein, 2096 aa, synthetic construct
MPAAKRVKLDGGDKKYSIGLDIGTNSVGWAVITDEYKVPSKKFKVLGNTDRHSIKKNLIGALLFDSGETAEATRLKRTARRRYTRRKNRICYLQEIFSNEMAKVDDSFFHRLEESFLVEEDKKHERHPIFGNIVDEVAYHEKYPTIYHLRKKLVDSTDKADLRLIYLALAHMIKFRGHFLIEGDLNPDNSDVDKLFIQLVQTYNQLFEENPINASGVDAKAILSARLSKSRRLENLIAQLPGEKKNGLFGNLIALSLGLTPNFKSNFDLAEDAKLQLSKDTYDDDLDNLLAQIGDQYADLFLAAKNLSDAILLSDILRVNTEITKAPLSASMIKRYDEHHQDLTLLKALVRQQLPEKYKEIFFDQSKNGYAGYIDGGASQEEFYKFIKPILEKMDGTEELLVKLNREDLLRKQRTFDNGSIPHQIHLGELHAILRRQEDFYPFLKDNREKIEKILTFRIPYYVGPLARGNSRFAWMTRKSEETITPWNFEEVVDKGASAQSFIERMTNFDKNLPNEKVLPKHSLLYEYFTVYNELTKVKYVTEGMRKPAFLSGEQKKAIVDLLFKTNRKVTVKQLKEDYFKKIECFDSVEISGVEDRFNASLGTYHDLLKIIKDKDFLDNEENEDILEDIVLTLTLFEDREMIEERLKTYAHLFDDKVMKQLKRRRYTGWGRLSRKLINGIRDKQSGKTILDFLKSDGFANRNFMQLIHDDSLTFKEDIQKAQVSGQGDSLHEHIANLAGSPAIKKGILQTVKVVDELVKVMGRHKPENIVIEMARENQTTQKGQKNSRERMKRIEEGIKELGSQILKEHPVENTQLQNEKLYLYYLQNGRDMYVDQELDINRLSDYDVDHIVPQSFLKDDSIDNKVLTRSDKARGKSDNVPSEEVVKKMKNYWRQLLNAKLITQRKFDNLTKAERGGLSELDKAGFIKRQLVETRQITKHVAQILDSRMNTKYDENDKLIREVKVITLKSKLVSDFRKDFQFYKVREINNYHHAHDAYLNAVVGTALIKKYPKLESEFVYGDYKVYDVRKMIAKSEQEIGKATAKYFFYSNIMNFFKTEITLANGEIRKRPLIETNGETGEIVWDKGRDFATVRKVLSMPQVNIVKKTEVQTGGFSKESILPKRNSDKLIARKKDWDPKKYGGFDSPTVAYSVLVVAKVEKGKSKKLKSVKELLGITIMERSSFEKNPIDFLEAKGYKEVKKDLIIKLPKYSLFELENGRKRMLASAGELQKGNELALPSKYVNFLYLASHYEKLKGSPEDNEQKQLFVEQHKHYLDEIIEQISEFSKRVILADANLDKVLSAYNKHRDKPIREQAENIIHLFTLTNLGAPAAFKYFDTTIDRKRYTSTKEVLDATLIHQSITGLYETRIDLSQLGGDGGEAAAKEAAAKEAAAKEAAAKGGVPWLTQQPLQLTILVPLQEYQEKILSKTALPEDQKQQLKTLFVKYDNLWQHWENQVGHRKIRPHNIATGDYPPRPQKQYPINPKAKPSIQIVIDDLLKQGVLTPQNSTMNTPVYPVPKPDGRWRMVLDYREVNKTIPLTAAQNQHSAGILATIVRQKYKTTLDLANGFWAHPITPESYWLTAFTWQGKQYCWTRLPQGFLNSPALFNADVVDLLKEIPNVQVYVDDIYLSHDDPKEHVQQLEKVFQILLQAGYVVSLKKSEIGQKTVEFLGFNITKEGRGLTDTFKTKLLNITPPKDLKQLQSILGLLNFARNFIPNFAELVQPLYNLIAPAKGKYIEWSEENTKQLNMVIEALNTASNLEERLPEQRLVIKVNTSPSAGYVRYYNETGKKPIMYLNYVFSKAELKFSMLEKLLTTMHKALIKAMDLAMGQEILVYSPIVSMTKIQKTPLPERKALPIRWITWMTYLEDPRIQFHYDKTLPELKHIPDVYTSSQSPVKHPSQYEGVFYTDGSAIKSPDPTKSNNAGMGIVHATYKPEYQVLNQWSIPLGNHTAQMAEIAAVEFACKKALKIPGPVLVITDSFYVAESANKELPYWKSNGFVNNKKKPLKHISKWKSIAECLSMKPDITIQHEKGISLQIPVFILKGNALADKLATQGSYVVNAGKRTADGSEFEKRTADGSEFESPKKKAKVE

SEQ ID NO: 1301 - protein, 2084 aa, synthetic construct
MPAAKRVKLDGGDKKYSIGLDIGTNSVGWAVITDEYKVPSKKFKVLGNTDRHSIKKNLIGALLFDSGETAEATRLKRTARRRYTRRKNRICYLQEIFSNEMAKVDDSFFHRLEESFLVEEDKKHERHPIFGNIVDEVAYHEKYPTIYHLRKKLVDSTDKADLRLIYLALAHMIKFRGHFLIEGDLNPDNSDVDKLFIQLVQTYNQLFEENPINASGVDAKAILSARLSKSRRLENLIAQLPGEKKNGLFGNLIALSLGLTPNFKSNFDLAEDAKLQLSKDTYDDDLDNLLAQIGDQYADLFLAAKNLSDAILLSDILRVNTEITKAPLSASMIKRYDEHHQDLTLLKALVRQQLPEKYKEIFFDQSKNGYAGYIDGGASQEEFYKFIKPILEKMDGTEELLVKLNREDLLRKQRTFDNGSIPHQIHLGELHAILRRQEDFYPFLKDNREKIEKILTFRIPYYVGPLARGNSRFAWMTRKSEETITPWNFEEVVDKGASAQSFIERMTNFDKNLPNEKVLPKHSLLYEYFTVYNELTKVKYVTEGMRKPAFLSGEQKKAIVDLLFKTNRKVTVKQLKEDYFKKIECFDSVEISGVEDRFNASLGTYHDLLKIIKDKDFLDNEENEDILEDIVLTLTLFEDREMIEERLKTYAHLFDDKVMKQLKRRRYTGWGRLSRKLINGIRDKQSGKTILDFLKSDGFANRNFMQLIHDDSLTFKEDIQKAQVSGQGDSLHEHIANLAGSPAIKKGILQTVKVVDELVKVMGRHKPENIVIEMARENQTTQKGQKNSRERMKRIEEGIKELGSQILKEHPVENTQLQNEKLYLYYLQNGRDMYVDQELDINRLSDYDVDHIVPQSFLKDDSIDNKVLTRSDKARGKSDNVPSEEVVKKMKNYWRQLLNAKLITQRKFDNLTKAERGGLSELDKAGFIKRQLVETRQITKHVAQILDSRMNTKYDENDKLIREVKVITLKSKLVSDFRKDFQFYKVREINNYHHAHDAYLNAVVGTALIKKYPKLESEFVYGDYKVYDVRKMIAKSEQEIGKATAKYFFYSNIMNFFKTEITLANGEIRKRPLIETNGETGEIVWDKGRDFATVRKVLSMPQVNIVKKTEVQTGGFSKESILPKRNSDKLIARKKDWDPKKYGGFDSPTVAYSVLVVAKVEKGKSKKLKSVKELLGITIMERSSFEKNPIDFLEAKGYKEVKKDLIIKLPKYSLFELENGRKRMLASAGELQKGNELALPSKYVNFLYLASHYEKLKGSPEDNEQKQLFVEQHKHYLDEIIEQISEFSKRVILADANLDKVLSAYNKHRDKPIREQAENIIHLFTLTNLGAPAAFKYFDTTIDRKRYTSTKEVLDATLIHQSITGLYETRIDLSQLGGDGGEAAAKPAPGGVPWLTQQPLQLTILVPLQEYQEKILSKTALPEDQKQQLKTLFVKYDNLWQHWENQVGHRKIRPHNIATGDYPPRPQKQYPINPKAKPSIQIVIDDLLKQGVLTPQNSTMNTPVYPVPKPDGRWRMVLDYREVNKTIPLTAAQNQHSAGILATIVRQKYKTTLDLANGFWAHPITPESYWLTAFTWQGKQYCWTRLPQGFLNSPALFNADVVDLLKEIPNVQVYVDDIYLSHDDPKEHVQQLEKVFQILLQAGYVVSLKKSEIGQKTVEFLGFNITKEGRGLTDTFKTKLLNITPPKDLKQLQSILGLLNFARNFIPNFAELVQPLYNLIAPAKGKYIEWSEENTKQLNMVIEALNTASNLEERLPEQRLVIKVNTSPSAGYVRYYNETGKKPIMYLNYVFSKAELKFSMLEKLLTTMHKALIKAMDLAMGQEILVYSPIVSMTKIQKTPLPERKALPIRWITWMTYLEDPRIQFHYDKTLPELKHIPDVYTSSQSPVKHPSQYEGVFYTDGSAIKSPDPTKSNNAGMGIVHATYKPEYQVLNQWSIPLGNHTAQMAEIAAVEFACKKALKIPGPVLVITDSFYVAESANKELPYWKSNGFVNNKKKPLKHISKWKSIAECLSMKPDITIQHEKGISLQIPVFILKGNALADKLATQGSYVVNAGKRTADGSEFEKRTADGSEFESPKKKAKVE

SEQ ID NO: 1302 - protein, 2087 aa, synthetic construct
MPAAKRVKLDGGDKKYSIGLDIGTNSVGWAVITDEYKVPSKKFKVLGNTDRHSIKKNLIGALLFDSGETAEATRLKRTARRRYTRRKNRICYLQEIFSNEMAKVDDSFFHRLEESFLVEEDKKHERHPIFGNIVDEVAYHEKYPTIYHLRKKLVDSTDKADLRLIYLALAHMIKFRGHFLIEGDLNPDNSDVDKLFIQLVQTYNQLFEENPINASGVDAKAILSARLSKSRRLENLIAQLPGEKKNGLFGNLIALSLGLTPNFKSNFDLAEDAKLQLSKDTYDDDLDNLLAQIGDQYADLFLAAKNLSDAILLSDILRVNTEITKAPLSASMIKRYDEHHQDLTLLKALVRQQLPEKYKEIFFDQSKNGYAGYIDGGASQEEFYKFIKPILEKMDGTEELLVKLNREDLLRKQRTFDNGSIPHQIHLGELHAILRRQEDFYPFLKDNREKIEKILTFRIPYYVGPLARGNSRFAWMTRKSEETITPWNFEEVVDKGASAQSFIERMTNFDKNLPNEKVLPKHSLLYEYFTVYNELTKVKYVTEGMRKPAFLSGEQKKAIVDLLFKTNRKVTVKQLKEDYFKKIECFDSVEISGVEDRFNASLGTYHDLLKIIKDKDFLDNEENEDILEDIVLTLTLFEDREMIEERLKTYAHLFDDKVMKQLKRRRYTGWGRLSRKLINGIRDKQSGKTILDFLKSDGFANRNFMQLIHDDSLTFKEDIQKAQVSGQGDSLHEHIANLAGSPAIKKGILQTVKVVDELVKVMGRHKPENIVIEMARENQTTQKGQKNSRERMKRIEEGIKELGSQILKEHPVENTQLQNEKLYLYYLQNGRDMYVDQELDINRLSDYDVDHIVPQSFLKDDSIDNKVLTRSDKARGKSDNVPSEEVVKKMKNYWRQLLNAKLITQRKFDNLTKAERGGLSELDKAGFIKRQLVETRQITKHVAQILDSRMNTKYDENDKLIREVKVITLKSKLVSDFRKDFQFYKVREINNYHHAHDAYLNAVVGTALIKKYPKLESEFVYGDYKVYDVRKMIAKSEQEIGKATAKYFFYSNIMNFFKTEITLANGEIRKRPLIETNGETGEIVWDKGRDFATVRKVLSMPQVNIVKKTEVQTGGFSKESILPKRNSDKLIARKKDWDPKKYGGFDSPTVAYSVLVVAKVEKGKSKKLKSVKELLGITIMERSSFEKNPIDFLEAKGYKEVKKDLIIKLPKYSLFELENGRKRMLASAGELQKGNELALPSKYVNFLYLASHYEKLKGSPEDNEQKQLFVEQHKHYLDEIIEQISEFSKRVILADANLDKVLSAYNKHRDKPIREQAENIIHLFTLTNLGAPAAFKYFDTTIDRKRYTSTKEVLDATLIHQSITGLYETRIDLSQLGGDGGPAPGSSEAAAKGGVPWLTQQPLQLTILVPLQEYQEKILSKTALPEDQKQQLKTLFVKYDNLWQHWENQVGHRKIRPHNIATGDYPPRPQKQYPINPKAKPSIQIVIDDLLKQGVLTPQNSTMNTPVYPVPKPDGRWRMVLDYREVNKTIPLTAAQNQHSAGILATIVRQKYKTTLDLANGFWAHPITPESYWLTAFTWQGKQYCWTRLPQGFLNSPALFNADVVDLLKEIPNVQVYVDDIYLSHDDPKEHVQQLEKVFQILLQAGYVVSLKKSEIGQKTVEFLGFNITKEGRGLTDTFKTKLLNITPPKDLKQLQSILGLLNFARNFIPNFAELVQPLYNLIAPAKGKYIEWSEENTKQLNMVIEALNTASNLEERLPEQRLVIKVNTSPSAGYVRYYNETGKKPIMYLNYVFSKAELKFSMLEKLLTTMHKALIKAMDLAMGQEILVYSPIVSMTKIQKTPLPERKALPIRWITWMTYLEDPRIQFHYDKTLPELKHIPDVYTSSQSPVKHPSQYEGVFYTDGSAIKSPDPTKSNNAGMGIVHATYKPEYQVLNQWSIPLGNHTAQMAEIAAVEFACKKALKIPGPVLVITDSFYVAESANKELPYWKSNGFVNNKKKPLKHISKWKSIAECLSMKPDITIQHEKGISLQIPVFILKGNALADKLATQGSYVVNAGKRTADGSEFEKRTADGSEFESPKKKAKVE

SEQ ID NO: 1303 - protein, 2091 aa, synthetic construct
MPAAKRVKLDGGDKKYSIGLDIGTNSVGWAVITDEYKVPSKKFKVLGNTDRHSIKKNLIGALLFDSGETAEATRLKRTARRRYTRRKNRICYLQEIFSNEMAKVDDSFFHRLEESFLVEEDKKHERHPIFGNIVDEVAYHEKYPTIYHLRKKLVDSTDKADLRLIYLALAHMIKFRGHFLIEGDLNPDNSDVDKLFIQLVQTYNQLFEENPINASGVDAKAILSARLSKSRRLENLIAQLPGEKKNGLFGNLIALSLGLTPNFKSNFDLAEDAKLQLSKDTYDDDLDNLLAQIGDQYADLFLAAKNLSDAILLSDILRVNTEITKAPLSASMIKRYDEHHQDLTLLKALVRQQLPEKYKEIFFDQSKNGYAGYIDGGASQEEFYKFIKPILEKMDGTEELLVKLNREDLLRKQRTFDNGSIPHQIHLGELHAILRRQEDFYPFLKDNREKIEKILTFRIPYYVGPLARGNSRFAWMTRKSEETITPWNFEEVVDKGASAQSFIERMTNFDKNLPNEKVLPKHSLLYEYFTVYNELTKVKYVTEGMRKPAFLSGEQKKAIVDLLFKTNRKVTVKQLKEDYFKKIECFDSVEISGVEDRFNASLGTYHDLLKIIKDKDFLDNEENEDILEDIVLTLTLFEDREMIEERLKTYAHLFDDKVMKQLKRRRYTGWGRLSRKLINGIRDKQSGKTILDFLKSDGFANRNFMQLIHDDSLTFKEDIQKAQVSGQGDSLHEHIANLAGSPAIKKGILQTVKVVDELVKVMGRHKPENIVIEMARENQTTQKGQKNSRERMKRIEEGIKELGSQILKEHPVENTQLQNEKLYLYYLQNGRDMYVDQELDINRLSDYDVDHIVPQSFLKDDSIDNKVLTRSDKARGKSDNVPSEEVVKKMKNYWRQLLNAKLITQRKFDNLTKAERGGLSELDKAGFIKRQLVETRQITKHVAQILDSRMNTKYDENDKLIREVKVITLKSKLVSDFRKDFQFYKVREINNYHHAHDAYLNAVVGTALIKKYPKLESEFVYGDYKVYDVRKMIAKSEQEIGKATAKYFFYSNIMNFFKTEITLANGEIRKRPLIETNGETGEIVWDKGRDFATVRKVLSMPQVNIVKKTEVQTGGFSKESILPKRNSDKLIARKKDWDPKKYGGFDSPTVAYSVLVVAKVEKGKSKKLKSVKELLGITIMERSSFEKNPIDFLEAKGYKEVKKDLIIKLPKYSLFELENGRKRMLASAGELQKGNELALPSKYVNFLYLASHYEKLKGSPEDNEQKQLFVEQHKHYLDEIIEQISEFSKRVILADANLDKVLSAYNKHRDKPIREQAENIIHLFTLTNLGAPAAFKYFDTTIDRKRYTSTKEVLDATLIHQSITGLYETRIDLSQLGGDGGGSSGSSGSSGSSGSSGGVPWLTQQPLQLTILVPLQEYQEKILSKTALPEDQKQQLKTLFVKYDNLWQHWENQVGHRKIRPHNIATGDYPPRPQKQYPINPKAKPSIQIVIDDLLKQGVLTPQNSTMNTPVYPVPKPDGRWRMVLDYREVNKTIPLTAAQNQHSAGILATIVRQKYKTTLDLANGFWAHPITPESYWLTAFTWQGKQYCWTRLPQGFLNSPALFNADVVDLLKEIPNVQVYVDDIYLSHDDPKEHVQQLEKVFQILLQAGYVVSLKKSEIGQKTVEFLGFNITKEGRGLTDTFKTKLLNITPPKDLKQLQSILGLLNFARNFIPNFAELVQPLYNLIAPAKGKYIEWSEENTKQLNMVIEALNTASNLEERLPEQRLVIKVNTSPSAGYVRYYNETGKKPIMYLNYVFSKAELKFSMLEKLLTTMHKALIKAMDLAMGQEILVYSPIVSMTKIQKTPLPERKALPIRWITWMTYLEDPRIQFHYDKTLPELKHIPDVYTSSQSPVKHPSQYEGVFYTDGSAIKSPDPTKSNNAGMGIVHATYKPEYQVLNQWSIPLGNHTAQMAEIAAVEFACKKALKIPGPVLVITDSFYVAESANKELPYWKSNGFVNNKKKPLKHISKWKSIAECLSMKPDITIQHEKGISLQIPVFILKGNALADKLATQGSYVVNAGKRTADGSEFEKRTADGSEFESPKKKAKVE

SEQ ID NO: 1304 - protein, 2085 aa, synthetic construct
MPAAKRVKLDGGDKKYSIGLDIGTNSVGWAVITDEYKVPSKKFKVLGNTDRHSIKKNLIGALLFDSGETAEATRLKRTARRRYTRRKNRICYLQEIFSNEMAKVDDSFFHRLEESFLVEEDKKHERHPIFGNIVDEVAYHEKYPTIYHLRKKLVDSTDKADLRLIYLALAHMIKFRGHFLIEGDLNPDNSDVDKLFIQLVQTYNQLFEENPINASGVDAKAILSARLSKSRRLENLIAQLPGEKKNGLFGNLIALSLGLTPNFKSNFDLAEDAKLQLSKDTYDDDLDNLLAQIGDQYADLFLAAKNLSDAILLSDILRVNTEITKAPLSASMIKRYDEHHQDLTLLKALVRQQLPEKYKEIFFDQSKNGYAGYIDGGASQEEFYKFIKPILEKMDGTEELLVKLNREDLLRKQRTFDNGSIPHQIHLGELHAILRRQEDFYPFLKDNREKIEKILTFRIPYYVGPLARGNSRFAWMTRKSEETITPWNFEEVVDKGASAQSFIERMTNFDKNLPNEKVLPKHSLLYEYFTVYNELTKVKYVTEGMRKPAFLSGEQKKAIVDLLFKTNRKVTVKQLKEDYFKKIECFDSVEISGVEDRFNASLGTYHDLLKIIKDKDFLDNEENEDILEDIVLTLTLFEDREMIEERLKTYAHLFDDKVMKQLKRRRYTGWGRLSRKLINGIRDKQSGKTILDFLKSDGFANRNFMQLIHDDSLTFKEDIQKAQVSGQGDSLHEHIANLAGSPAIKKGILQTVKVVDELVKVMGRHKPENIVIEMARENQTTQKGQKNSRERMKRIEEGIKELGSQILKEHPVENTQLQNEKLYLYYLQNGRDMYVDQELDINRLSDYDVDHIVPQSFLKDDSIDNKVLTRSDKARGKSDNVPSEEVVKKMKNYWRQLLNAKLITQRKFDNLTKAERGGLSELDKAGFIKRQLVETRQITKHVAQILDSRMNTKYDENDKLIREVKVITLKSKLVSDFRKDFQFYKVREINNYHHAHDAYLNAVVGTALIKKYPKLESEFVYGDYKVYDVRKMIAKSEQEIGKATAKYFFYSNIMNFFKTEITLANGEIRKRPLIETNGETGEIVWDKGRDFATVRKVLSMPQVNIVKKTEVQTGGFSKESILPKRNSDKLIARKKDWDPKKYGGFDSPTVAYSVLVVAKVEKGKSKKLKSVKELLGITIMERSSFEKNPIDFLEAKGYKEVKKDLIIKLPKYSLFELENGRKRMLASAGELQKGNELALPSKYVNFLYLASHYEKLKGSPEDNEQKQLFVEQHKHYLDEIIEQISEFSKRVILADANLDKVLSAYNKHRDKPIREQAENIIHLFTLTNLGAPAAFKYFDTTIDRKRYTSTKEVLDATLIHQSITGLYETRIDLSQLGGDGGGGSGGSGGSGGVPWLTQQPLQLTILVPLQEYQEKILSKTALPEDQKQQLKTLFVKYDNLWQHWENQVGHRKIRPHNIATGDYPPRPQKQYPINPKAKPSIQIVIDDLLKQGVLTPQNSTMNTPVYPVPKPDGRWRMVLDYREVNKTIPLTAAQNQHSAGILATIVRQKYKTTLDLANGFWAHPITPESYWLTAFTWQGKQYCWTRLPQGFLNSPALFNADVVDLLKEIPNVQVYVDDIYLSHDDPKEHVQQLEKVFQILLQAGYVVSLKKSEIGQKTVEFLGFNITKEGRGLTDTFKTKLLNITPPKDLKQLQSILGLLNFARNFIPNFAELVQPLYNLIAPAKGKYIEWSEENTKQLNMVIEALNTASNLEERLPEQRLVIKVNTSPSAGYVRYYNETGKKPIMYLNYVFSKAELKFSMLEKLLTTMHKALIKAMDLAMGQEILVYSPIVSMTKIQKTPLPERKALPIRWITWMTYLEDPRIQFHYDKTLPELKHIPDVYTSSQSPVKHPSQYEGVFYTDGSAIKSPDPTKSNNAGMGIVHATYKPEYQVLNQWSIPLGNHTAQMAEIAAVEFACKKALKIPGPVLVITDSFYVAESANKELPYWKSNGFVNNKKKPLKHISKWKSIAECLSMKPDITIQHEKGISLQIPVFILKGNALADKLATQGSYVVNAGKRTADGSEFEKRTADGSEFESPKKKAKVE

SEQ ID NO: 1305 - protein, 2085 aa, synthetic construct
MPAAKRVKLDGGDKKYSIGLDIGTNSVGWAVITDEYKVPSKKFKVLGNTDRHSIKKNLIGALLFDSGETAEATRLKRTARRRYTRRKNRICYLQEIFSNEMAKVDDSFFHRLEESFLVEEDKKHERHPIFGNIVDEVAYHEKYPTIYHLRKKLVDSTDKADLRLIYLALAHMIKFRGHFLIEGDLNPDNSDVDKLFIQLVQTYNQLFEENPINASGVDAKAILSARLSKSRRLENLIAQLPGEKKNGLFGNLIALSLGLTPNFKSNFDLAEDAKLQLSKDTYDDDLDNLLAQIGDQYADLFLAAKNLSDAILLSDILRVNTEITKAPLSASMIKRYDEHHQDLTLLKALVRQQLPEKYKEIFFDQSKNGYAGYIDGGASQEEFYKFIKPILEKMDGTEELLVKLNREDLLRKQRTFDNGSIPHQIHLGELHAILRRQEDFYPFLKDNREKIEKILTFRIPYYVGPLARGNSRFAWMTRKSEETITPWNFEEVVDKGASAQSFIERMTNFDKNLPNEKVLPKHSLLYEYFTVYNELTKVKYVTEGMRKPAFLSGEQKKAIVDLLFKTNRKVTVKQLKEDYFKKIECFDSVEISGVEDRFNASLGTYHDLLKIIKDKDFLDNEENEDILEDIVLTLTLFEDREMIEERLKTYAHLFDDKVMKQLKRRRYTGWGRLSRKLINGIRDKQSGKTILDFLKSDGFANRNFMQLIHDDSLTFKEDIQKAQVSGQGDSLHEHIANLAGSPAIKKGILQTVKVVDELVKVMGRHKPENIVIEMARENQTTQKGQKNSRERMKRIEEGIKELGSQILKEHPVENTQLQNEKLYLYYLQNGRDMYVDQELDINRLSDYDVDHIVPQSFLKDDSIDNKVLTRSDKARGKSDNVPSEEVVKKMKNYWRQLLNAKLITQRKFDNLTKAERGGLSELDKAGFIKRQLVETRQITKHVAQILDSRMNTKYDENDKLIREVKVITLKSKLVSDFRKDFQFYKVREINNYHHAHDAYLNAVVGTALIKKYPKLESEFVYGDYKVYDVRKMIAKSEQEIGKATAKYFFYSNIMNFFKTEITLANGEIRKRPLIETNGETGEIVWDKGRDFATVRKVLSMPQVNIVKKTEVQTGGFSKESILPKRNSDKLIARKKDWDPKKYGGFDSPTVAYSVLVVAKVEKGKSKKLKSVKELLGITIMERSSFEKNPIDFLEAKGYKEVKKDLIIKLPKYSLFELENGRKRMLASAGELQKGNELALPSKYVNFLYLASHYEKLKGSPEDNEQKQLFVEQHKHYLDEIIEQISEFSKRVILADANLDKVLSAYNKHRDKPIREQAENIIHLFTLTNLGAPAAFKYFDTTIDRKRYTSTKEVLDATLIHQSITGLYETRIDLSQLGGDGGGGGGSSPAPGGVPWLTQQPLQLTILVPLQEYQEKILSKTALPEDQKQQLKTLFVKYDNLWQHWENQVGHRKIRPHNIATGDYPPRPQKQYPINPKAKPSIQIVIDDLLKQGVLTPQNSTMNTPVYPVPKPDGRWRMVLDYREVNKTIPLTAAQNQHSAGILATIVRQKYKTTLDLANGFWAHPITPESYWLTAFTWQGKQYCWTRLPQGFLNSPALFNADVVDLLKEIPNVQVYVDDIYLSHDDPKEHVQQLEKVFQILLQAGYVVSLKKSEIGQKTVEFLGFNITKEGRGLTDTFKTKLLNITPPKDLKQLQSILGLLNFARNFIPNFAELVQPLYNLIAPAKGKYIEWSEENTKQLNMVIEALNTASNLEERLPEQRLVIKVNTSPSAGYVRYYNETGKKPIMYLNYVFSKAELKFSMLEKLLTTMHKALIKAMDLAMGQEILVYSPIVSMTKIQKTPLPERKALPIRWITWMTYLEDPRIQFHYDKTLPELKHIPDVYTSSQSPVKHPSQYEGVFYTDGSAIKSPDPTKSNNAGMGIVHATYKPEYQVLNQWSIPLGNHTAQMAEIAAVEFACKKALKIPGPVLVITDSFYVAESANKELPYWKSNGFVNNKKKPLKHISKWKSIAECLSMKPDITIQHEKGISLQIPVFILKGNALADKLATQGSYVVNAGKRTADGSEFEKRTADGSEFESPKKKAKVE

SEQ ID NO: 1306 - protein, 2087 aa, synthetic construct
MPAAKRVKLDGGDKKYSIGLDIGTNSVGWAVITDEYKVPSKKFKVLGNTDRHSIKKNLIGALLFDSGETAEATRLKRTARRRYTRRKNRICYLQEIFSNEMAKVDDSFFHRLEESFLVEEDKKHERHPIFGNIVDEVAYHEKYPTIYHLRKKLVDSTDKADLRLIYLALAHMIKFRGHFLIEGDLNPDNSDVDKLFIQLVQTYNQLFEENPINASGVDAKAILSARLSKSRRLENLIAQLPGEKKNGLFGNLIALSLGLTPNFKSNFDLAEDAKLQLSKDTYDDDLDNLLAQIGDQYADLFLAAKNLSDAILLSDILRVNTEITKAPLSASMIKRYDEHHQDLTLLKALVRQQLPEKYKEIFFDQSKNGYAGYIDGGASQEEFYKFIKPILEKMDGTEELLVKLNREDLLRKQRTFDNGSIPHQIHLGELHAILRRQEDFYPFLKDNREKIEKILTFRIPYYVGPLARGNSRFAWMTRKSEETITPWNFEEVVDKGASAQSFIERMTNFDKNLPNEKVLPKHSLLYEYFTVYNELTKVKYVTEGMRKPAFLSGEQKKAIVDLLFKTNRKVTVKQLKEDYFKKIECFDSVEISGVEDRFNASLGTYHDLLKIIKDKDFLDNEENEDILEDIVLTLTLFEDREMIEERLKTYAHLFDDKVMKQLKRRRYTGWGRLSRKLINGIRDKQSGKTILDFLKSDGFANRNFMQLIHDDSLTFKEDIQKAQVSGQGDSLHEHIANLAGSPAIKKGILQTVKVVDELVKVMGRHKPENIVIEMARENQTTQKGQKNSRERMKRIEEGIKELGSQILKEHPVENTQLQNEKLYLYYLQNGRDMYVDQELDINRLSDYDVDHIVPQSFLKDDSIDNKVLTRSDKARGKSDNVPSEEVVKKMKNYWRQLLNAKLITQRKFDNLTKAERGGLSELDKAGFIKRQLVETRQITKHVAQILDSRMNTKYDENDKLIREVKVITLKSKLVSDFRKDFQFYKVREINNYHHAHDAYLNAVVGTALIKKYPKLESEFVYGDYKVYDVRKMIAKSEQEIGKATAKYFFYSNIMNFFKTEITLANGEIRKRPLIETNGETGEIVWDKGRDFATVRKVLSMPQVNIVKKTEVQTGGFSKESILPKRNSDKLIARKKDWDPKKYGGFDSPTVAYSVLVVAKVEKGKSKKLKSVKELLGITIMERSSFEKNPIDFLEAKGYKEVKKDLIIKLPKYSLFELENGRKRMLASAGELQKGNELALPSKYVNFLYLASHYEKLKGSPEDNEQKQLFVEQHKHYLDEIIEQISEFSKRVILADANLDKVLSAYNKHRDKPIREQAENIIHLFTLTNLGAPAAFKYFDTTIDRKRYTSTKEVLDATLIHQSITGLYETRIDLSQLGGDGGGSSGGSEAAAKGGVPWLTQQPLQLTILVPLQEYQEKILSKTALPEDQKQQLKTLFVKYDNLWQHWENQVGHRKIRPHNIATGDYPPRPQKQYPINPKAKPSIQIVIDDLLKQGVLTPQNSTMNTPVYPVPKPDGRWRMVLDYREVNKTIPLTAAQNQHSAGILATIVRQKYKTTLDLANGFWAHPITPESYWLTAFTWQGKQYCWTRLPQGFLNSPALFNADVVDLLKEIPNVQVYVDDIYLSHDDPKEHVQQLEKVFQILLQAGYVVSLKKSEIGQKTVEFLGFNITKEGRGLTDTFKTKLLNITPPKDLKQLQSILGLLNFARNFIPNFAELVQPLYNLIAPAKGKYIEWSEENTKQLNMVIEALNTASNLEERLPEQRLVIKVNTSPSAGYVRYYNETGKKPIMYLNYVFSKAELKFSMLEKLLTTMHKALIKAMDLAMGQEILVYSPIVSMTKIQKTPLPERKALPIRWITWMTYLEDPRIQFHYDKTLPELKHIPDVYTSSQSPVKHPSQYEGVFYTDGSAIKSPDPTKSNNAGMGIVHATYKPEYQVLNQWSIPLGNHTAQMAEIAAVEFACKKALKIPGPVLVITDSFYVAESANKELPYWKSNGFVNNKKKPLKHISKWKSIAECLSMKPDITIQHEKGISLQIPVFILKGNALADKLATQGSYVVNAGKRTADGSEFEKRTADGSEFESPKKKAKVE

SEQ ID NO: 1307 - protein, 2085 aa, synthetic construct
MPAAKRVKLDGGDKKYSIGLDIGTNSVGWAVITDEYKVPSKKFKVLGNTDRHSIKKNLIGALLFDSGETAEATRLKRTARRRYTRRKNRICYLQEIFSNEMAKVDDSFFHRLEESFLVEEDKKHERHPIFGNIVDEVAYHEKYPTIYHLRKKLVDSTDKADLRLIYLALAHMIKFRGHFLIEGDLNPDNSDVDKLFIQLVQTYNQLFEENPINASGVDAKAILSARLSKSRRLENLIAQLPGEKKNGLFGNLIALSLGLTPNFKSNFDLAEDAKLQLSKDTYDDDLDNLLAQIGDQYADLFLAAKNLSDAILLSDILRVNTEITKAPLSASMIKRYDEHHQDLTLLKALVRQQLPEKYKEIFFDQSKNGYAGYIDGGASQEEFYKFIKPILEKMDGTEELLVKLNREDLLRKQRTFDNGSIPHQIHLGELHAILRRQEDFYPFLKDNREKIEKILTFRIPYYVGPLARGNSRFAWMTRKSEETITPWNFEEVVDKGASAQSFIERMTNFDKNLPNEKVLPKHSLLYEYFTVYNELTKVKYVTEGMRKPAFLSGEQKKAIVDLLFKTNRKVTVKQLKEDYFKKIECFDSVEISGVEDRFNASLGTYHDLLKIIKDKDFLDNEENEDILEDIVLTLTLFEDREMIEERLKTYAHLFDDKVMKQLKRRRYTGWGRLSRKLINGIRDKQSGKTILDFLKSDGFANRNFMQLIHDDSLTFKEDIQKAQVSGQGDSLHEHIANLAGSPAIKKGILQTVKVVDELVKVMGRHKPENIVIEMARENQTTQKGQKNSRERMKRIEEGIKELGSQILKEHPVENTQLQNEKLYLYYLQNGRDMYVDQELDINRLSDYDVDHIVPQSFLKDDSIDNKVLTRSDKARGKSDNVPSEEVVKKMKNYWRQLLNAKLITQRKFDNLTKAERGGLSELDKAGFIKRQLVETRQITKHVAQILDSRMNTKYDENDKLIREVKVITLKSKLVSDFRKDFQFYKVREINNYHHAHDAYLNAVVGTALIKKYPKLESEFVYGDYKVYDVRKMIAKSEQEIGKATAKYFFYSNIMNFFKTEITLANGEIRKRPLIETNGETGEIVWDKGRDFATVRKVLSMPQVNIVKKTEVQTGGFSKESILPKRNSDKLIARKKDWDPKKYGGFDSPTVAYSVLVVAKVEKGKSKKLKSVKELLGITIMERSSFEKNPIDFLEAKGYKEVKKDLIIKLPKYSLFELENGRKRMLASAGELQKGNELALPSKYVNFLYLASHYEKLKGSPEDNEQKQLFVEQHKHYLDEIIEQISEFSKRVILADANLDKVLSAYNKHRDKPIREQAENIIHLFTLTNLGAPAAFKYFDTTIDRKRYTSTKEVLDATLIHQSITGLYETRIDLSQLGGDGGGSSPAPGGSGGVPWLTQQPLQLTILVPLQEYQEKILSKTALPEDQKQQLKTLFVKYDNLWQHWENQVGHRKIRPHNIATGDYPPRPQKQYPINPKAKPSIQIVIDDLLKQGVLTPQNSTMNTPVYPVPKPDGRWRMVLDYREVNKTIPLTAAQNQHSAGILATIVRQKYKTTLDLANGFWAHPITPESYWLTAFTWQGKQYCWTRLPQGFLNSPALFNADVVDLLKEIPNVQVYVDDIYLSHDDPKEHVQQLEKVFQILLQAGYVVSLKKSEIGQKTVEFLGFNITKEGRGLTDTFKTKLLNITPPKDLKQLQSILGLLNFARNFIPNFAELVQPLYNLIAPAKGKYIEWSEENTKQLNMVIEALNTASNLEERLPEQRLVIKVNTSPSAGYVRYYNETGKKPIMYLNYVFSKAELKFSMLEKLLTTMHKALIKAMDLAMGQEILVYSPIVSMTKIQKTPLPERKALPIRWITWMTYLEDPRIQFHYDKTLPELKHIPDVYTSSQSPVKHPSQYEGVFYTDGSAIKSPDPTKSNNAGMGIVHATYKPEYQVLNQWSIPLGNHTAQMAEIAAVEFACKKALKIPGPVLVITDSFYVAESANKELPYWKSNGFVNNKKKPLKHISKWKSIAECLSMKPDITIQHEKGISLQIPVFILKGNALADKLATQGSYVVNAGKRTADGSEFEKRTADGSEFESPKKKAKVE

SEQ ID NO: 1308 - protein, 2086 aa, synthetic construct
MPAAKRVKLDGGDKKYSIGLDIGTNSVGWAVITDEYKVPSKKFKVLGNTDRHSIKKNLIGALLFDSGETAEATRLKRTARRRYTRRKNRICYLQEIFSNEMAKVDDSFFHRLEESFLVEEDKKHERHPIFGNIVDEVAYHEKYPTIYHLRKKLVDSTDKADLRLIYLALAHMIKFRGHFLIEGDLNPDNSDVDKLFIQLVQTYNQLFEENPINASGVDAKAILSARLSKSRRLENLIAQLPGEKKNGLFGNLIALSLGLTPNFKSNFDLAEDAKLQLSKDTYDDDLDNLLAQIGDQYADLFLAAKNLSDAILLSDILRVNTEITKAPLSASMIKRYDEHHQDLTLLKALVRQQLPEKYKEIFFDQSKNGYAGYIDGGASQEEFYKFIKPILEKMDGTEELLVKLNREDLLRKQRTFDNGSIPHQIHLGELHAILRRQEDFYPFLKDNREKIEKILTFRIPYYVGPLARGNSRFAWMTRKSEETITPWNFEEVVDKGASAQSFIERMTNFDKNLPNEKVLPKHSLLYEYFTVYNELTKVKYVTEGMRKPAFLSGEQKKAIVDLLFKTNRKVTVKQLKEDYFKKIECFDSVEISGVEDRFNASLGTYHDLLKIIKDKDFLDNEENEDILEDIVLTLTLFEDREMIEERLKTYAHLFDDKVMKQLKRRRYTGWGRLSRKLINGIRDKQSGKTILDFLKSDGFANRNFMQLIHDDSLTFKEDIQKAQVSGQGDSLHEHIANLAGSPAIKKGILQTVKVVDELVKVMGRHKPENIVIEMARENQTTQKGQKNSRERMKRIEEGIKELGSQILKEHPVENTQLQNEKLYLYYLQNGRDMYVDQELDINRLSDYDVDHIVPQSFLKDDSIDNKVLTRSDKARGKSDNVPSEEVVKKMKNYWRQLLNAKLITQRKFDNLTKAERGGLSELDKAGFIKRQLVETRQITKHVAQILDSRMNTKYDENDKLIREVKVITLKSKLVSDFRKDFQFYKVREINNYHHAHDAYLNAVVGTALIKKYPKLESEFVYGDYKVYDVRKMIAKSEQEIGKATAKYFFYSNIMNFFKTEITLANGEIRKRPLIETNGETGEIVWDKGRDFATVRKVLSMPQVNIVKKTEVQTGGFSKESILPKRNSDKLIARKKDWDPKKYGGFDSPTVAYSVLVVAKVEKGKSKKLKSVKELLGITIMERSSFEKNPIDFLEAKGYKEVKKDLIIKLPKYSLFELENGRKRMLASAGELQKGNELALPSKYVNFLYLASHYEKLKGSPEDNEQKQLFVEQHKHYLDEIIEQISEFSKRVILADANLDKVLSAYNKHRDKPIREQAENIIHLFTLTNLGAPAAFKYFDTTIDRKRYTSTKEVLDATLIHQSITGLYETRIDLSQLGGDGGEAAAKEAAAKGGVPWLTQQPLQLTILVPLQEYQEKILSKTALPEDQKQQLKTLFVKYDNLWQHWENQVGHRKIRPHNIATGDYPPRPQKQYPINPKAKPSIQIVIDDLLKQGVLTPQNSTMNTPVYPVPKPDGRWRMVLDYREVNKTIPLTAAQNQHSAGILATIVRQKYKTTLDLANGFWAHPITPESYWLTAFTWQGKQYCWTRLPQGFLNSPALFNADVVDLLKEIPNVQVYVDDIYLSHDDPKEHVQQLEKVFQILLQAGYVVSLKKSEIGQKTVEFLGFNITKEGRGLTDTFKTKLLNITPPKDLKQLQSILGLLNFARNFIPNFAELVQPLYNLIAPAKGKYIEWSEENTKQLNMVIEALNTASNLEERLPEQRLVIKVNTSPSAGYVRYYNETGKKPIMYLNYVFSKAELKFSMLEKLLTTMHKALIKAMDLAMGQEILVYSPIVSMTKIQKTPLPERKALPIRWITWMTYLEDPRIQFHYDKTLPELKHIPDVYTSSQSPVKHPSQYEGVFYTDGSAIKSPDPTKSNNAGMGIVHATYKPEYQVLNQWSIPLGNHTAQMAEIAAVEFACKKALKIPGPVLVITDSFYVAESANKELPYWKSNGFVNNKKKPLKHISKWKSIAECLSMKPDITIQHEKGISLQIPVFILKGNALADKLATQGSYVVNAGKRTADGSEFEKRTADGSEFESPKKKAKVE

SEQ ID NO: 1309 - protein, 2087 aa, synthetic construct
MPAAKRVKLDGGDKKYSIGLDIGTNSVGWAVITDEYKVPSKKFKVLGNTDRHSIKKNLIGALLFDSGETAEATRLKRTARRRYTRRKNRICYLQEIFSNEMAKVDDSFFHRLEESFLVEEDKKHERHPIFGNIVDEVAYHEKYPTIYHLRKKLVDSTDKADLRLIYLALAHMIKFRGHFLIEGDLNPDNSDVDKLFIQLVQTYNQLFEENPINASGVDAKAILSARLSKSRRLENLIAQLPGEKKNGLFGNLIALSLGLTPNFKSNFDLAEDAKLQLSKDTYDDDLDNLLAQIGDQYADLFLAAKNLSDAILLSDILRVNTEITKAPLSASMIKRYDEHHQDLTLLKALVRQQLPEKYKEIFFDQSKNGYAGYIDGGASQEEFYKFIKPILEKMDGTEELLVKLNREDLLRKQRTFDNGSIPHQIHLGELHAILRRQEDFYPFLKDNREKIEKILTFRIPYYVGPLARGNSRFAWMTRKSEETITPWNFEEVVDKGASAQSFIERMTNFDKNLPNEKVLPKHSLLYEYFTVYNELTKVKYVTEGMRKPAFLSGEQKKAIVDLLFKTNRKVTVKQLKEDYFKKIECFDSVEISGVEDRFNASLGTYHDLLKIIKDKDFLDNEENEDILEDIVLTLTLFEDREMIEERLKTYAHLFDDKVMKQLKRRRYTGWGRLSRKLINGIRDKQSGKTILDFLKSDGFANRNFMQLIHDDSLTFKEDIQKAQVSGQGDSLHEHIANLAGSPAIKKGILQTVKVVDELVKVMGRHKPENIVIEMARENQTTQKGQKNSRERMKRIEEGIKELGSQILKEHPVENTQLQNEKLYLYYLQNGRDMYVDQELDINRLSDYDVDHIVPQSFLKDDSIDNKVLTRSDKARGKSDNVPSEEVVKKMKNYWRQLLNAKLITQRKFDNLTKAERGGLSELDKAGFIKRQLVETRQITKHVAQILDSRMNTKYDENDKLIREVKVITLKSKLVSDFRKDFQFYKVREINNYHHAHDAYLNAVVGTALIKKYPKLESEFVYGDYKVYDVRKMIAKSEQEIGKATAKYFFYSNIMNFFKTEITLANGEIRKRPLIETNGETGEIVWDKGRDFATVRKVLSMPQVNIVKKTEVQTGGFSKESILPKRNSDKLIARKKDWDPKKYGGFDSPTVAYSVLVVAKVEKGKSKKLKSVKELLGITIMERSSFEKNPIDFLEAKGYKEVKKDLIIKLPKYSLFELENGRKRMLASAGELQKGNELALPSKYVNFLYLASHYEKLKGSPEDNEQKQLFVEQHKHYLDEIIEQISEFSKRVILADANLDKVLSAYNKHRDKPIREQAENIIHLFTLTNLGAPAAFKYFDTTIDRKRYTSTKEVLDATLIHQSITGLYETRIDLSQLGGDGGGGGEAAAKPAPGGVPWLTQQPLQLTILVPLQEYQEKILSKTALPEDQKQQLKTLFVKYDNLWQHWENQVGHRKIRPHNIATGDYPPRPQKQYPINPKAKPSIQIVIDDLLKQGVLTPQNSTMNTPVYPVPKPDGRWRMVLDYREVNKTIPLTAAQNQHSAGILATIVRQKYKTTLDLANGFWAHPITPESYWLTAFTWQGKQYCWTRLPQGFLNSPALFNADVVDLLKEIPNVQVYVDDIYLSHDDPKEHVQQLEKVFQILLQAGYVVSLKKSEIGQKTVEFLGFNITKEGRGLTDTFKTKLLNITPPKDLKQLQSILGLLNFARNFIPNFAELVQPLYNLIAPAKGKYIEWSEENTKQLNMVIEALNTASNLEERLPEQRLVIKVNTSPSAGYVRYYNETGKKPIMYLNYVFSKAELKFSMLEKLLTTMHKALIKAMDLAMGQEILVYSPIVSMTKIQKTPLPERKALPIRWITWMTYLEDPRIQFHYDKTLPELKHIPDVYTSSQSPVKHPSQYEGVFYTDGSAIKSPDPTKSNNAGMGIVHATYKPEYQVLNQWSIPLGNHTAQMAEIAAVEFACKKALKIPGPVLVITDSFYVAESANKELPYWKSNGFVNNKKKPLKHISKWKSIAECLSMKPDITIQHEKGISLQIPVFILKGNALADKLATQGSYVVNAGKRTADGSEFEKRTADGSEFESPKKKAKVE

SEQ ID NO: 1310 - protein, 2085 aa, synthetic construct
MPAAKRVKLDGGDKKYSIGLDIGTNSVGWAVITDEYKVPSKKFKVLGNTDRHSIKKNLIGALLFDSGETAEATRLKRTARRRYTRRKNRICYLQEIFSNEMAKVDDSFFHRLEESFLVEEDKKHERHPIFGNIVDEVAYHEKYPTIYHLRKKLVDSTDKADLRLIYLALAHMIKFRGHFLIEGDLNPDNSDVDKLFIQLVQTYNQLFEENPINASGVDAKAILSARLSKSRRLENLIAQLPGEKKNGLFGNLIALSLGLTPNFKSNFDLAEDAKLQLSKDTYDDDLDNLLAQIGDQYADLFLAAKNLSDAILLSDILRVNTEITKAPLSASMIKRYDEHHQDLTLLKALVRQQLPEKYKEIFFDQSKNGYAGYIDGGASQEEFYKFIKPILEKMDGTEELLVKLNREDLLRKQRTFDNGSIPHQIHLGELHAILRRQEDFYPFLKDNREKIEKILTFRIPYYVGPLARGNSRFAWMTRKSEETITPWNFEEVVDKGASAQSFIERMTNFDKNLPNEKVLPKHSLLYEYFTVYNELTKVKYVTEGMRKPAFLSGEQKKAIVDLLFKTNRKVTVKQLKEDYFKKIECFDSVEISGVEDRFNASLGTYHDLLKIIKDKDFLDNEENEDILEDIVLTLTLFEDREMIEERLKTYAHLFDDKVMKQLKRRRYTGWGRLSRKLINGIRDKQSGKTILDFLKSDGFANRNFMQLIHDDSLTFKEDIQKAQVSGQGDSLHEHIANLAGSPAIKKGILQTVKVVDELVKVMGRHKPENIVIEMARENQTTQKGQKNSRERMKRIEEGIKELGSQILKEHPVENTQLQNEKLYLYYLQNGRDMYVDQELDINRLSDYDVDHIVPQSFLKDDSIDNKVLTRSDKARGKSDNVPSEEVVKKMKNYWRQLLNAKLITQRKFDNLTKAERGGLSELDKAGFIKRQLVETRQITKHVAQILDSRMNTKYDENDKLIREVKVITLKSKLVSDFRKDFQFYKVREINNYHHAHDAYLNAVVGTALIKKYPKLESEFVYGDYKVYDVRKMIAKSEQEIGKATAKYFFYSNIMNFFKTEITLANGEIRKRPLIETNGETGEIVWDKGRDFATVRKVLSMPQVNIVKKTEVQTGGFSKESILPKRNSDKLIARKKDWDPKKYGGFDSPTVAYSVLVVAKVEKGKSKKLKSVKELLGITIMERSSFEKNPIDFLEAKGYKEVKKDLIIKLPKYSLFELENGRKRMLASAGELQKGNELALPSKYVNFLYLASHYEKLKGSPEDNEQKQLFVEQHKHYLDEIIEQISEFSKRVILADANLDKVLSAYNKHRDKPIREQAENIIHLFTLTNLGAPAAFKYFDTTIDRKRYTSTKEVLDATLIHQSITGLYETRIDLSQLGGDGGGGSGGGPAPGGVPWLTQQPLQLTILVPLQEYQEKILSKTALPEDQKQQLKTLFVKYDNLWQHWENQVGHRKIRPHNIATGDYPPRPQKQYPINPKAKPSIQIVIDDLLKQGVLTPQNSTMNTPVYPVPKPDGRWRMVLDYREVNKTIPLTAAQNQHSAGILATIVRQKYKTTLDLANGFWAHPITPESYWLTAFTWQGKQYCWTRLPQGFLNSPALFNADVVDLLKEIPNVQVYVDDIYLSHDDPKEHVQQLEKVFQILLQAGYVVSLKKSEIGQKTVEFLGFNITKEGRGLTDTFKTKLLNITPPKDLKQLQSILGLLNFARNFIPNFAELVQPLYNLIAPAKGKYIEWSEENTKQLNMVIEALNTASNLEERLPEQRLVIKVNTSPSAGYVRYYNETGKKPIMYLNYVFSKAELKFSMLEKLLTTMHKALIKAMDLAMGQEILVYSPIVSMTKIQKTPLPERKALPIRWITWMTYLEDPRIQFHYDKTLPELKHIPDVYTSSQSPVKHPSQYEGVFYTDGSAIKSPDPTKSNNAGMGIVHATYKPEYQVLNQWSIPLGNHTAQMAEIAAVEFACKKALKIPGPVLVITDSFYVAESANKELPYWKSNGFVNNKKKPLKHISKWKSIAECLSMKPDITIQHEKGISLQIPVFILKGNALADKLATQGSYVVNAGKRTADGSEFEKRTADGSEFESPKKKAKVE

SEQ ID NO: 1311 - protein, 2122 aa, synthetic construct
MPAAKRVKLDGGDKKYSIGLDIGTNSVGWAVITDEYKVPSKKFKVLGNTDRHSIKKNLIGALLFDSGETAEATRLKRTARRRYTRRKNRICYLQEIFSNEMAKVDDSFFHRLEESFLVEEDKKHERHPIFGNIVDEVAYHEKYPTIYHLRKKLVDSTDKADLRLIYLALAHMIKFRGHFLIEGDLNPDNSDVDKLFIQLVQTYNQLFEENPINASGVDAKAILSARLSKSRRLENLIAQLPGEKKNGLFGNLIALSLGLTPNFKSNFDLAEDAKLQLSKDTYDDDLDNLLAQIGDQYADLFLAAKNLSDAILLSDILRVNTEITKAPLSASMIKRYDEHHQDLTLLKALVRQQLPEKYKEIFFDQSKNGYAGYIDGGASQEEFYKFIKPILEKMDGTEELLVKLNREDLLRKQRTFDNGSIPHQIHLGELHAILRRQEDFYPFLKDNREKIEKILTFRIPYYVGPLARGNSRFAWMTRKSEETITPWNFEEVVDKGASAQSFIERMTNFDKNLPNEKVLPKHSLLYEYFTVYNELTKVKYVTEGMRKPAFLSGEQKKAIVDLLFKTNRKVTVKQLKEDYFKKIECFDSVEISGVEDRFNASLGTYHDLLKIIKDKDFLDNEENEDILEDIVLTLTLFEDREMIEERLKTYAHLFDDKVMKQLKRRRYTGWGRLSRKLINGIRDKQSGKTILDFLKSDGFANRNFMQLIHDDSLTFKEDIQKAQVSGQGDSLHEHIANLAGSPAIKKGILQTVKVVDELVKVMGRHKPENIVIEMARENQTTQKGQKNSRERMKRIEEGIKELGSQILKEHPVENTQLQNEKLYLYYLQNGRDMYVDQELDINRLSDYDVDHIVPQSFLKDDSIDNKVLTRSDKARGKSDNVPSEEVVKKMKNYWRQLLNAKLITQRKFDNLTKAERGGLSELDKAGFIKRQLVETRQITKHVAQILDSRMNTKYDENDKLIREVKVITLKSKLVSDFRKDFQFYKVREINNYHHAHDAYLNAVVGTALIKKYPKLESEFVYGDYKVYDVRKMIAKSEQEIGKATAKYFFYSNIMNFFKTEITLANGEIRKRPLIETNGETGEIVWDKGRDFATVRKVLSMPQVNIVKKTEVQTGGFSKESILPKRNSDKLIARKKDWDPKKYGGFDSPTVAYSVLVVAKVEKGKSKKLKSVKELLGITIMERSSFEKNPIDFLEAKGYKEVKKDLIIKLPKYSLFELENGRKRMLASAGELQKGNELALPSKYVNFLYLASHYEKLKGSPEDNEQKQLFVEQHKHYLDEIIEQISEFSKRVILADANLDKVLSAYNKHRDKPIREQAENIIHLFTLTNLGAPAAFKYFDTTIDRKRYTSTKEVLDATLIHQSITGLYETRIDLSQLGGDGGAEAAAKEAAAKEAAAKEAAAKALEAEAAAKEAAAKEAAAKEAAAKAGGVPWLTQQPLQLTILVPLQEYQEKILSKTALPEDQKQQLKTLFVKYDNLWQHWENQVGHRKIRPHNIATGDYPPRPQKQYPINPKAKPSIQIVIDDLLKQGVLTPQNSTMNTPVYPVPKPDGRWRMVLDYREVNKTIPLTAAQNQHSAGILATIVRQKYKTTLDLANGFWAHPITPESYWLTAFTWQGKQYCWTRLPQGFLNSPALFNADVVDLLKEIPNVQVYVDDIYLSHDDPKEHVQQLEKVFQILLQAGYVVSLKKSEIGQKTVEFLGFNITKEGRGLTDTFKTKLLNITPPKDLKQLQSILGKLNFARNFIPNFAELVQPLYNLIAPAKGKYIEWSEENTKQLNMVIEALNTASNLEERLPEQRLVIKVNTSPSAGYVRYYNETGKKPIMYLNYVFSKAELKFSMLEKLLTTMHKALIKAMDLAMGQEILVYSPIVSMTKIQKTPLPERKALPIRWITWMTYLEDPRIQFHYDKTLPELKHIPDVYTSSQSPVKHPSQYEGVFYTDGSAIKSPDPTKSNNAGMGIVHATYKPEYQVLNQWSIPLGNHTAQMAEIAAVEFACKKALKIPGPVLVITDSFYVAESANKELPYWKSNGFVNNKKKPLKHISKWKSIAECLSMKPDITIQHEKGISLQIPVFILKGNALADKLATQGSYVVNAGKRTADGSEFEKRTADGSEFESPKKKAKVE

SEQ ID NO: 1312 - protein, 2092 aa, synthetic construct
MPAAKRVKLDGGDKKYSIGLDIGTNSVGWAVITDEYKVPSKKFKVLGNTDRHSIKKNLIGALLFDSGETAEATRLKRTARRRYTRRKNRICYLQEIFSNEMAKVDDSFFHRLEESFLVEEDKKHERHPIFGNIVDEVAYHEKYPTIYHLRKKLVDSTDKADLRLIYLALAHMIKFRGHFLIEGDLNPDNSDVDKLFIQLVQTYNQLFEENPINASGVDAKAILSARLSKSRRLENLIAQLPGEKKNGLFGNLIALSLGLTPNFKSNFDLAEDAKLQLSKDTYDDDLDNLLAQIGDQYADLFLAAKNLSDAILLSDILRVNTEITKAPLSASMIKRYDEHHQDLTLLKALVRQQLPEKYKEIFFDQSKNGYAGYIDGGASQEEFYKFIKPILEKMDGTEELLVKLNREDLLRKQRTFDNGSIPHQIHLGELHAILRRQEDFYPFLKDNREKIEKILTFRIPYYVGPLARGNSRFAWMTRKSEETITPWNFEEVVDKGASAQSFIERMTNFDKNLPNEKVLPKHSLLYEYFTVYNELTKVKYVTEGMRKPAFLSGEQKKAIVDLLFKTNRKVTVKQLKEDYFKKIECFDSVEISGVEDRFNASLGTYHDLLKIIKDKDFLDNEENEDILEDIVLTLTLFEDREMIEERLKTYAHLFDDKVMKQLKRRRYTGWGRLSRKLINGIRDKQSGKTILDFLKSDGFANRNFMQLIHDDSLTFKEDIQKAQVSGQGDSLHEHIANLAGSPAIKKGILQTVKVVDELVKVMGRHKPENIVIEMARENQTTQKGQKNSRERMKRIEEGIKELGSQILKEHPVENTQLQNEKLYLYYLQNGRDMYVDQELDINRLSDYDVDHIVPQSFLKDDSIDNKVLTRSDKARGKSDNVPSEEVVKKMKNYWRQLLNAKLITQRKFDNLTKAERGGLSELDKAGFIKRQLVETRQITKHVAQILDSRMNTKYDENDKLIREVKVITLKSKLVSDFRKDFQFYKVREINNYHHAHDAYLNAVVGTALIKKYPKLESEFVYGDYKVYDVRKMIAKSEQEIGKATAKYFFYSNIMNFFKTEITLANGEIRKRPLIETNGETGEIVWDKGRDFATVRKVLSMPQVNIVKKTEVQTGGFSKESILPKRNSDKLIARKKDWDPKKYGGFDSPTVAYSVLVVAKVEKGKSKKLKSVKELLGITIMERSSFEKNPIDFLEAKGYKEVKKDLIIKLPKYSLFELENGRKRMLASAGELQKGNELALPSKYVNFLYLASHYEKLKGSPEDNEQKQLFVEQHKHYLDEIIEQISEFSKRVILADANLDKVLSAYNKHRDKPIREQAENIIHLFTLTNLGAPAAFKYFDTTIDRKRYTSTKEVLDATLIHQSITGLYETRIDLSQLGGDGGSGSETPGTSESATPESGGVPWLTQQPLQLTILVPLQEYQEKILSKTALPEDQKQQLKTLFVKYDNLWQHWENQVGHRKIRPHNIATGDYPPRPQKQYPINPKAKPSIQIVIDDLLKQGVLTPQNSTMNTPVYPVPKPDGRWRMVLDYREVNKTIPLTAAQNQHSAGILATIVRQKYKTTLDLANGFWAHPITPESYWLTAFTWQGKQYCWTRLPQGFLNSPALFNADVVDLLKEIPNVQVYVDDIYLSHDDPKEHVQQLEKVFQILLQAGYVVSLKKSEIGQKTVEFLGFNITKEGRGLTDTFKTKLLNITPPKDLKQLQSILGKLNFARNFIPNFAELVQPLYNLIAPAKGKYIEWSEENTKQLNMVIEALNTASNLEERLPEQRLVIKVNTSPSAGYVRYYNETGKKPIMYLNYVFSKAELKFSMLEKLLTTMHKALIKAMDLAMGQEILVYSPIVSMTKIQKTPLPERKALPIRWITWMTYLEDPRIQFHYDKTLPELKHIPDVYTSSQSPVKHPSQYEGVFYTDGSAIKSPDPTKSNNAGMGIVHATYKPEYQVLNQWSIPLGNHTAQMAEIAAVEFACKKALKIPGPVLVITDSFYVAESANKELPYWKSNGFVNNKKKPLKHISKWKSIAECLSMKPDITIQHEKGISLQIPVFILKGNALADKLATQGSYVVNAGKRTADGSEFEKRTADGSEFESPKKKAKVE

SEQ ID NO: 1313 - protein, 2096 aa, synthetic construct
MPAAKRVKLDGGDKKYSIGLDIGTNSVGWAVITDEYKVPSKKFKVLGNTDRHSIKKNLIGALLFDSGETAEATRLKRTARRRYTRRKNRICYLQEIFSNEMAKVDDSFFHRLEESFLVEEDKKHERHPIFGNIVDEVAYHEKYPTIYHLRKKLVDSTDKADLRLIYLALAHMIKFRGHFLIEGDLNPDNSDVDKLFIQLVQTYNQLFEENPINASGVDAKAILSARLSKSRRLENLIAQLPGEKKNGLFGNLIALSLGLTPNFKSNFDLAEDAKLQLSKDTYDDDLDNLLAQIGDQYADLFLAAKNLSDAILLSDILRVNTEITKAPLSASMIKRYDEHHQDLTLLKALVRQQLPEKYKEIFFDQSKNGYAGYIDGGASQEEFYKFIKPILEKMDGTEELLVKLNREDLLRKQRTFDNGSIPHQIHLGELHAILRRQEDFYPFLKDNREKIEKILTFRIPYYVGPLARGNSRFAWMTRKSEETITPWNFEEVVDKGASAQSFIERMTNFDKNLPNEKVLPKHSLLYEYFTVYNELTKVKYVTEGMRKPAFLSGEQKKAIVDLLFKTNRKVTVKQLKEDYFKKIECFDSVEISGVEDRFNASLGTYHDLLKIIKDKDFLDNEENEDILEDIVLTLTLFEDREMIEERLKTYAHLFDDKVMKQLKRRRYTGWGRLSRKLINGIRDKQSGKTILDFLKSDGFANRNFMQLIHDDSLTFKEDIQKAQVSGQGDSLHEHIANLAGSPAIKKGILQTVKVVDELVKVMGRHKPENIVIEMARENQTTQKGQKNSRERMKRIEEGIKELGSQILKEHPVENTQLQNEKLYLYYLQNGRDMYVDQELDINRLSDYDVDHIVPQSFLKDDSIDNKVLTRSDKARGKSDNVPSEEVVKKMKNYWRQLLNAKLITQRKFDNLTKAERGGLSELDKAGFIKRQLVETRQITKHVAQILDSRMNTKYDENDKLIREVKVITLKSKLVSDFRKDFQFYKVREINNYHHAHDAYLNAVVGTALIKKYPKLESEFVYGDYKVYDVRKMIAKSEQEIGKATAKYFFYSNIMNFFKTEITLANGEIRKRPLIETNGETGEIVWDKGRDFATVRKVLSMPQVNIVKKTEVQTGGFSKESILPKRNSDKLIARKKDWDPKKYGGFDSPTVAYSVLVVAKVEKGKSKKLKSVKELLGITIMERSSFEKNPIDFLEAKGYKEVKKDLIIKLPKYSLFELENGRKRMLASAGELQKGNELALPSKYVNFLYLASHYEKLKGSPEDNEQKQLFVEQHKHYLDEIIEQISEFSKRVILADANLDKVLSAYNKHRDKPIREQAENIIHLFTLTNLGAPAAFKYFDTTIDRKRYTSTKEVLDATLIHQSITGLYETRIDLSQLGGDGGEAAAKEAAAKEAAAKEAAAKGGVPWLTQQPLQLTILVPLQEYQEKILSKTALPEDQKQQLKTLFVKYDNLWQHWENQVGHRKIRPHNIATGDYPPRPQKQYPINPKAKPSIQIVIDDLLKQGVLTPQNSTMNTPVYPVPKPDGRWRMVLDYREVNKTIPLTAAQNQHSAGILATIVRQKYKTTLDLANGFWAHPITPESYWLTAFTWQGKQYCWTRLPQGFLNSPALFNADVVDLLKEIPNVQVYVDDIYLSHDDPKEHVQQLEKVFQILLQAGYVVSLKKSEIGQKTVEFLGFNITKEGRGLTDTFKTKLLNITPPKDLKQLQSILGKLNFARNFIPNFAELVQPLYNLIAPAKGKYIEWSEENTKQLNMVIEALNTASNLEERLPEQRLVIKVNTSPSAGYVRYYNETGKKPIMYLNYVFSKAELKFSMLEKLLTTMHKALIKAMDLAMGQEILVYSPIVSMTKIQKTPLPERKALPIRWITWMTYLEDPRIQFHYDKTLPELKHIPDVYTSSQSPVKHPSQYEGVFYTDGSAIKSPDPTKSNNAGMGIVHATYKPEYQVLNQWSIPLGNHTAQMAEIAAVEFACKKALKIPGPVLVITDSFYVAESANKELPYWKSNGFVNNKKKPLKHISKWKSIAECLSMKPDITIQHEKGISLQIPVFILKGNALADKLATQGSYVVNAGKRTADGSEFEKRTADGSEFESPKKKAKVE

SEQ ID NO: 1314 - protein, 2096 aa, synthetic construct
MPAAKRVKLDGGDKKYSIGLDIGTNSVGWAVITDEYKVPSKKFKVLGNTDRHSIKKNLIGALLFDSGETAEATRLKRTARRRYTRRKNRICYLQEIFSNEMAKVDDSFFHRLEESFLVEEDKKHERHPIFGNIVDEVAYHEKYPTIYHLRKKLVDSTDKADLRLIYLALAHMIKFRGHFLIEGDLNPDNSDVDKLFIQLVQTYNQLFEENPINASGVDAKAILSARLSKSRRLENLIAQLPGEKKNGLFGNLIALSLGLTPNFKSNFDLAEDAKLQLSKDTYDDDLDNLLAQIGDQYADLFLAAKNLSDAILLSDILRVNTEITKAPLSASMIKRYDEHHQDLTLLKALVRQQLPEKYKEIFFDQSKNGYAGYIDGGASQEEFYKFIKPILEKMDGTEELLVKLNREDLLRKQRTFDNGSIPHQIHLGELHAILRRQEDFYPFLKDNREKIEKILTFRIPYYVGPLARGNSRFAWMTRKSEETITPWNFEEVVDKGASAQSFIERMTNFDKNLPNEKVLPKHSLLYEYFTVYNELTKVKYVTEGMRKPAFLSGEQKKAIVDLLFKTNRKVTVKQLKEDYFKKIECFDSVEISGVEDRFNASLGTYHDLLKIIKDKDFLDNEENEDILEDIVLTLTLFEDREMIEERLKTYAHLFDDKVMKQLKRRRYTGWGRLSRKLINGIRDKQSGKTILDFLKSDGFANRNFMQLIHDDSLTFKEDIQKAQVSGQGDSLHEHIANLAGSPAIKKGILQTVKVVDELVKVMGRHKPENIVIEMARENQTTQKGQKNSRERMKRIEEGIKELGSQILKEHPVENTQLQNEKLYLYYLQNGRDMYVDQELDINRLSDYDVDHIVPQSFLKDDSIDNKVLTRSDKARGKSDNVPSEEVVKKMKNYWRQLLNAKLITQRKFDNLTKAERGGLSELDKAGFIKRQLVETRQITKHVAQILDSRMNTKYDENDKLIREVKVITLKSKLVSDFRKDFQFYKVREINNYHHAHDAYLNAVVGTALIKKYPKLESEFVYGDYKVYDVRKMIAKSEQEIGKATAKYFFYSNIMNFFKTEITLANGEIRKRPLIETNGETGEIVWDKGRDFATVRKVLSMPQVNIVKKTEVQTGGFSKESILPKRNSDKLIARKKDWDPKKYGGFDSPTVAYSVLVVAKVEKGKSKKLKSVKELLGITIMERSSFEKNPIDFLEAKGYKEVKKDLIIKLPKYSLFELENGRKRMLASAGELQKGNELALPSKYVNFLYLASHYEKLKGSPEDNEQKQLFVEQHKHYLDEIIEQISEFSKRVILADANLDKVLSAYNKHRDKPIREQAENIIHLFTLTNLGAPAAFKYFDTTIDRKRYTSTKEVLDATLIHQSITGLYETRIDLSQLGGDGGGGGGSGGGGSGGGGSGGGGSGGVPWLTQQPLQLTILVPLQEYQEKILSKTALPEDQKQQLKTLFVKYDNLWQHWENQVGHRKIRPHNIATGDYPPRPQKQYPINPKAKPSIQIVIDDLLKQGVLTPQNSTMNTPVYPVPKPDGRWRMVLDYREVNKTIPLTAAQNQHSAGILATIVRQKYKTTLDLANGFWAHPITPESYWLTAFTWQGKQYCWTRLPQGFLNSPALFNADVVDLLKEIPNVQVYVDDIYLSHDDPKEHVQQLEKVFQILLQAGYVVSLKKSEIGQKTVEFLGFNITKEGRGLTDTFKTKLLNITPPKDLKQLQSILGKLNFARNFIPNFAELVQPLYNLIAPAKGKYIEWSEENTKQLNMVIEALNTASNLEERLPEQRLVIKVNTSPSAGYVRYYNETGKKPIMYLNYVFSKAELKFSMLEKLLTTMHKALIKAMDLAMGQEILVYSPIVSMTKIQKTPLPERKALPIRWITWMTYLEDPRIQFHYDKTLPELKHIPDVYTSSQSPVKHPSQYEGVFYTDGSAIKSPDPTKSNNAGMGIVHATYKPEYQVLNQWSIPLGNHTAQMAEIAAVEFACKKALKIPGPVLVITDSFYVAESANKELPYWKSNGFVNNKKKPLKHISKWKSIAECLSMKPDITIQHEKGISLQIPVFILKGNALADKLATQGSYVVNAGKRTADGSEFEKRTADGSEFESPKKKAKVE

SEQ ID NO: 1315 - protein, 2087 aa, synthetic construct
MPAAKRVKLDGGDKKYSIGLDIGTNSVGWAVITDEYKVPSKKFKVLGNTDRHSIKKNLIGALLFDSGETAEATRLKRTARRRYTRRKNRICYLQEIFSNEMAKVDDSFFHRLEESFLVEEDKKHERHPIFGNIVDEVAYHEKYPTIYHLRKKLVDSTDKADLRLIYLALAHMIKFRGHFLIEGDLNPDNSDVDKLFIQLVQTYNQLFEENPINASGVDAKAILSARLSKSRRLENLIAQLPGEKKNGLFGNLIALSLGLTPNFKSNFDLAEDAKLQLSKDTYDDDLDNLLAQIGDQYADLFLAAKNLSDAILLSDILRVNTEITKAPLSASMIKRYDEHHQDLTLLKALVRQQLPEKYKEIFFDQSKNGYAGYIDGGASQEEFYKFIKPILEKMDGTEELLVKLNREDLLRKQRTFDNGSIPHQIHLGELHAILRRQEDFYPFLKDNREKIEKILTFRIPYYVGPLARGNSRFAWMTRKSEETITPWNFEEVVDKGASAQSFIERMTNFDKNLPNEKVLPKHSLLYEYFTVYNELTKVKYVTEGMRKPAFLSGEQKKAIVDLLFKTNRKVTVKQLKEDYFKKIECFDSVEISGVEDRFNASLGTYHDLLKIIKDKDFLDNEENEDILEDIVLTLTLFEDREMIEERLKTYAHLFDDKVMKQLKRRRYTGWGRLSRKLINGIRDKQSGKTILDFLKSDGFANRNFMQLIHDDSLTFKEDIQKAQVSGQGDSLHEHIANLAGSPAIKKGILQTVKVVDELVKVMGRHKPENIVIEMARENQTTQKGQKNSRERMKRIEEGIKELGSQILKEHPVENTQLQNEKLYLYYLQNGRDMYVDQELDINRLSDYDVDHIVPQSFLKDDSIDNKVLTRSDKARGKSDNVPSEEVVKKMKNYWRQLLNAKLITQRKFDNLTKAERGGLSELDKAGFIKRQLVETRQITKHVAQILDSRMNTKYDENDKLIREVKVITLKSKLVSDFRKDFQFYKVREINNYHHAHDAYLNAVVGTALIKKYPKLESEFVYGDYKVYDVRKMIAKSEQEIGKATAKYFFYSNIMNFFKTEITLANGEIRKRPLIETNGETGEIVWDKGRDFATVRKVLSMPQVNIVKKTEVQTGGFSKESILPKRNSDKLIARKKDWDPKKYGGFDSPTVAYSVLVVAKVEKGKSKKLKSVKELLGITIMERSSFEKNPIDFLEAKGYKEVKKDLIIKLPKYSLFELENGRKRMLASAGELQKGNELALPSKYVNFLYLASHYEKLKGSPEDNEQKQLFVEQHKHYLDEIIEQISEFSKRVILADANLDKVLSAYNKHRDKPIREQAENIIHLFTLTNLGAPAAFKYFDTTIDRKRYTSTKEVLDATLIHQSITGLYETRIDLSQLGGDGGGSSPAPEAAAKGGVPWLTQQPLQLTILVPLQEYQEKILSKTALPEDQKQQLKTLFVKYDNLWQHWENQVGHRKIRPHNIATGDYPPRPQKQYPINPKAKPSIQIVIDDLLKQGVLTPQNSTMNTPVYPVPKPDGRWRMVLDYREVNKTIPLTAAQNQHSAGILATIVRQKYKTTLDLANGFWAHPITPESYWLTAFTWQGKQYCWTRLPQGFLNSPALFNADVVDLLKEIPNVQVYVDDIYLSHDDPKEHVQQLEKVFQILLQAGYVVSLKKSEIGQKTVEFLGFNITKEGRGLTDTFKTKLLNITPPKDLKQLQSILGKLNFARNFIPNFAELVQPLYNLIAPAKGKYIEWSEENTKQLNMVIEALNTASNLEERLPEQRLVIKVNTSPSAGYVRYYNETGKKPIMYLNYVFSKAELKFSMLEKLLTTMHKALIKAMDLAMGQEILVYSPIVSMTKIQKTPLPERKALPIRWITWMTYLEDPRIQFHYDKTLPELKHIPDVYTSSQSPVKHPSQYEGVFYTDGSAIKSPDPTKSNNAGMGIVHATYKPEYQVLNQWSIPLGNHTAQMAEIAAVEFACKKALKIPGPVLVITDSFYVAESANKELPYWKSNGFVNNKKKPLKHISKWKSIAECLSMKPDITIQHEKGISLQIPVFILKGNALADKLATQGSYVVNAGKRTADGSEFEKRTADGSEFESPKKKAKVE

SEQ ID NO: 1316 - protein, 2086 aa, synthetic construct
MPAAKRVKLDGGDKKYSIGLDIGTNSVGWAVITDEYKVPSKKFKVLGNTDRHSIKKNLIGALLFDSGETAEATRLKRTARRRYTRRKNRICYLQEIFSNEMAKVDDSFFHRLEESFLVEEDKKHERHPIFGNIVDEVAYHEKYPTIYHLRKKLVDSTDKADLRLIYLALAHMIKFRGHFLIEGDLNPDNSDVDKLFIQLVQTYNQLFEENPINASGVDAKAILSARLSKSRRLENLIAQLPGEKKNGLFGNLIALSLGLTPNFKSNFDLAEDAKLQLSKDTYDDDLDNLLAQIGDQYADLFLAAKNLSDAILLSDILRVNTEITKAPLSASMIKRYDEHHQDLTLLKALVRQQLPEKYKEIFFDQSKNGYAGYIDGGASQEEFYKFIKPILEKMDGTEELLVKLNREDLLRKQRTFDNGSIPHQIHLGELHAILRRQEDFYPFLKDNREKIEKILTFRIPYYVGPLARGNSRFAWMTRKSEETITPWNFEEVVDKGASAQSFIERMTNFDKNLPNEKVLPKHSLLYEYFTVYNELTKVKYVTEGMRKPAFLSGEQKKAIVDLLFKTNRKVTVKQLKEDYFKKIECFDSVEISGVEDRFNASLGTYHDLLKIIKDKDFLDNEENEDILEDIVLTLTLFEDREMIEERLKTYAHLFDDKVMKQLKRRRYTGWGRLSRKLINGIRDKQSGKTILDFLKSDGFANRNFMQLIHDDSLTFKEDIQKAQVSGQGDSLHEHIANLAGSPAIKKGILQTVKVVDELVKVMGRHKPENIVIEMARENQTTQKGQKNSRERMKRIEEGIKELGSQILKEHPVENTQLQNEKLYLYYLQNGRDMYVDQELDINRLSDYDVDHIVPQSFLKDDSIDNKVLTRSDKARGKSDNVPSEEVVKKMKNYWRQLLNAKLITQRKFDNLTKAERGGLSELDKAGFIKRQLVETRQITKHVAQILDSRMNTKYDENDKLIREVKVITLKSKLVSDFRKDFQFYKVREINNYHHAHDAYLNAVVGTALIKKYPKLESEFVYGDYKVYDVRKMIAKSEQEIGKATAKYFFYSNIMNFFKTEITLANGEIRKRPLIETNGETGEIVWDKGRDFATVRKVLSMPQVNIVKKTEVQTGGFSKESILPKRNSDKLIARKKDWDPKKYGGFDSPTVAYSVLVVAKVEKGKSKKLKSVKELLGITIMERSSFEKNPIDFLEAKGYKEVKKDLIIKLPKYSLFELENGRKRMLASAGELQKGNELALPSKYVNFLYLASHYEKLKGSPEDNEQKQLFVEQHKHYLDEIIEQISEFSKRVILADANLDKVLSAYNKHRDKPIREQAENIIHLFTLTNLGAPAAFKYFDTTIDRKRYTSTKEVLDATLIHQSITGLYETRIDLSQLGGDGGGGGGSGGGGSGGVPWLTQQPLQLTILVPLQEYQEKILSKTALPEDQKQQLKTLFVKYDNLWQHWENQVGHRKIRPHNIATGDYPPRPQKQYPINPKAKPSIQIVIDDLLKQGVLTPQNSTMNTPVYPVPKPDGRWRMVLDYREVNKTIPLTAAQNQHSAGILATIVRQKYKTTLDLANGFWAHPITPESYWLTAFTWQGKQYCWTRLPQGFLNSPALFNADVVDLLKEIPNVQVYVDDIYLSHDDPKEHVQQLEKVFQILLQAGYVVSLKKSEIGQKTVEFLGFNITKEGRGLTDTFKTKLLNITPPKDLKQLQSILGKLNFARNFIPNFAELVQPLYNLIAPAKGKYIEWSEENTKQLNMVIEALNTASNLEERLPEQRLVIKVNTSPSAGYVRYYNETGKKPIMYLNYVFSKAELKFSMLEKLLTTMHKALIKAMDLAMGQEILVYSPIVSMTKIQKTPLPERKALPIRWITWMTYLEDPRIQFHYDKTLPELKHIPDVYTSSQSPVKHPSQYEGVFYTDGSAIKSPDPTKSNNAGMGIVHATYKPEYQVLNQWSIPLGNHTAQMAEIAAVEFACKKALKIPGPVLVITDSFYVAESANKELPYWKSNGFVNNKKKPLKHISKWKSIAECLSMKPDITIQHEKGISLQIPVFILKGNALADKLATQGSYVVNAGKRTADGSEFEKRTADGSEFESPKKKAKVE

SEQ ID NO: 1317 - protein, 2087 aa, synthetic construct
MPAAKRVKLDGGDKKYSIGLDIGTNSVGWAVITDEYKVPSKKFKVLGNTDRHSIKKNLIGALLFDSGETAEATRLKRTARRRYTRRKNRICYLQEIFSNEMAKVDDSFFHRLEESFLVEEDKKHERHPIFGNIVDEVAYHEKYPTIYHLRKKLVDSTDKADLRLIYLALAHMIKFRGHFLIEGDLNPDNSDVDKLFIQLVQTYNQLFEENPINASGVDAKAILSARLSKSRRLENLIAQLPGEKKNGLFGNLIALSLGLTPNFKSNFDLAEDAKLQLSKDTYDDDLDNLLAQIGDQYADLFLAAKNLSDAILLSDILRVNTEITKAPLSASMIKRYDEHHQDLTLLKALVRQQLPEKYKEIFFDQSKNGYAGYIDGGASQEEFYKFIKPILEKMDGTEELLVKLNREDLLRKQRTFDNGSIPHQIHLGELHAILRRQEDFYPFLKDNREKIEKILTFRIPYYVGPLARGNSRFAWMTRKSEETITPWNFEEVVDKGASAQSFIERMTNFDKNLPNEKVLPKHSLLYEYFTVYNELTKVKYVTEGMRKPAFLSGEQKKAIVDLLFKTNRKVTVKQLKEDYFKKIECFDSVEISGVEDRFNASLGTYHDLLKIIKDKDFLDNEENEDILEDIVLTLTLFEDREMIEERLKTYAHLFDDKVMKQLKRRRYTGWGRLSRKLINGIRDKQSGKTILDFLKSDGFANRNFMQLIHDDSLTFKEDIQKAQVSGQGDSLHEHIANLAGSPAIKKGILQTVKVVDELVKVMGRHKPENIVIEMARENQTTQKGQKNSRERMKRIEEGIKELGSQILKEHPVENTQLQNEKLYLYYLQNGRDMYVDQELDINRLSDYDVDHIVPQSFLKDDSIDNKVLTRSDKARGKSDNVPSEEVVKKMKNYWRQLLNAKLITQRKFDNLTKAERGGLSELDKAGFIKRQLVETRQITKHVAQILDSRMNTKYDENDKLIREVKVITLKSKLVSDFRKDFQFYKVREINNYHHAHDAYLNAVVGTALIKKYPKLESEFVYGDYKVYDVRKMIAKSEQEIGKATAKYFFYSNIMNFFKTEITLANGEIRKRPLIETNGETGEIVWDKGRDFATVRKVLSMPQVNIVKKTEVQTGGFSKESILPKRNSDKLIARKKDWDPKKYGGFDSPTVAYSVLVVAKVEKGKSKKLKSVKELLGITIMERSSFEKNPIDFLEAKGYKEVKKDLIIKLPKYSLFELENGRKRMLASAGELQKGNELALPSKYVNFLYLASHYEKLKGSPEDNEQKQLFVEQHKHYLDEIIEQISEFSKRVILADANLDKVLSAYNKHRDKPIREQAENIIHLFTLTNLGAPAAFKYFDTTIDRKRYTSTKEVLDATLIHQSITGLYETRIDLSQLGGDGGPAPGSSEAAAKGGVPWLTQQPLQLTILVPLQEYQEKILSKTALPEDQKQQLKTLFVKYDNLWQHWENQVGHRKIRPHNIATGDYPPRPQKQYPINPKAKPSIQIVIDDLLKQGVLTPQNSTMNTPVYPVPKPDGRWRMVLDYREVNKTIPLTAAQNQHSAGILATIVRQKYKTTLDLANGFWAHPITPESYWLTAFTWQGKQYCWTRLPQGFLNSPALFNADVVDLLKEIPNVQVYVDDIYLSHDDPKEHVQQLEKVFQILLQAGYVVSLKKSEIGQKTVEFLGFNITKEGRGLTDTFKTKLLNITPPKDLKQLQSILGKLNFARNFIPNFAELVQPLYNLIAPAKGKYIEWSEENTKQLNMVIEALNTASNLEERLPEQRLVIKVNTSPSAGYVRYYNETGKKPIMYLNYVFSKAELKFSMLEKLLTTMHKALIKAMDLAMGQEILVYSPIVSMTKIQKTPLPERKALPIRWITWMTYLEDPRIQFHYDKTLPELKHIPDVYTSSQSPVKHPSQYEGVFYTDGSAIKSPDPTKSNNAGMGIVHATYKPEYQVLNQWSIPLGNHTAQMAEIAAVEFACKKALKIPGPVLVITDSFYVAESANKELPYWKSNGFVNNKKKPLKHISKWKSIAECLSMKPDITIQHEKGISLQIPVFILKGNALADKLATQGSYVVNAGKRTADGSEFEKRTADGSEFESPKKKAKVE

SEQ ID NO: 1318 - protein, 2087 aa, synthetic construct
MPAAKRVKLDGGDKKYSIGLDIGTNSVGWAVITDEYKVPSKKFKVLGNTDRHSIKKNLIGALLFDSGETAEATRLKRTARRRYTRRKNRICYLQEIFSNEMAKVDDSFFHRLEESFLVEEDKKHERHPIFGNIVDEVAYHEKYPTIYHLRKKLVDSTDKADLRLIYLALAHMIKFRGHFLIEGDLNPDNSDVDKLFIQLVQTYNQLFEENPINASGVDAKAILSARLSKSRRLENLIAQLPGEKKNGLFGNLIALSLGLTPNFKSNFDLAEDAKLQLSKDTYDDDLDNLLAQIGDQYADLFLAAKNLSDAILLSDILRVNTEITKAPLSASMIKRYDEHHQDLTLLKALVRQQLPEKYKEIFFDQSKNGYAGYIDGGASQEEFYKFIKPILEKMDGTEELLVKLNREDLLRKQRTFDNGSIPHQIHLGELHAILRRQEDFYPFLKDNREKIEKILTFRIPYYVGPLARGNSRFAWMTRKSEETITPWNFEEVVDKGASAQSFIERMTNFDKNLPNEKVLPKHSLLYEYFTVYNELTKVKYVTEGMRKPAFLSGEQKKAIVDLLFKTNRKVTVKQLKEDYFKKIECFDSVEISGVEDRFNASLGTYHDLLKIIKDKDFLDNEENEDILEDIVLTLTLFEDREMIEERLKTYAHLFDDKVMKQLKRRRYTGWGRLSRKLINGIRDKQSGKTILDFLKSDGFANRNFMQLIHDDSLTFKEDIQKAQVSGQGDSLHEHIANLAGSPAIKKGILQTVKVVDELVKVMGRHKPENIVIEMARENQTTQKGQKNSRERMKRIEEGIKELGSQILKEHPVENTQLQNEKLYLYYLQNGRDMYVDQELDINRLSDYDVDHIVPQSFLKDDSIDNKVLTRSDKARGKSDNVPSEEVVKKMKNYWRQLLNAKLITQRKFDNLTKAERGGLSELDKAGFIKRQLVETRQITKHVAQILDSRMNTKYDENDKLIREVKVITLKSKLVSDFRKDFQFYKVREINNYHHAHDAYLNAVVGTALIKKYPKLESEFVYGDYKVYDVRKMIAKSEQEIGKATAKYFFYSNIMNFFKTEITLANGEIRKRPLIETNGETGEIVWDKGRDFATVRKVLSMPQVNIVKKTEVQTGGFSKESILPKRNSDKLIARKKDWDPKKYGGFDSPTVAYSVLVVAKVEKGKSKKLKSVKELLGITIMERSSFEKNPIDFLEAKGYKEVKKDLIIKLPKYSLFELENGRKRMLASAGELQKGNELALPSKYVNFLYLASHYEKLKGSPEDNEQKQLFVEQHKHYLDEIIEQISEFSKRVILADANLDKVLSAYNKHRDKPIREQAENIIHLFTLTNLGAPAAFKYFDTTIDRKRYTSTKEVLDATLIHQSITGLYETRIDLSQLGGDGGPAPAPAPAPAPGGVPWLTQQPLQLTILVPLQEYQEKILSKTALPEDQKQQLKTLFVKYDNLWQHWENQVGHRKIRPHNIATGDYPPRPQKQYPINPKAKPSIQIVIDDLLKQGVLTPQNSTMNTPVYPVPKPDGRWRMVLDYREVNKTIPLTAAQNQHSAGILATIVRQKYKTTLDLANGFWAHPITPESYWLTAFTWQGKQYCWTRLPQGFLNSPALFNADVVDLLKEIPNVQVYVDDIYLSHDDPKEHVQQLEKVFQILLQAGYVVSLKKSEIGQKTVEFLGFNITKEGRGLTDTFKTKLLNITPPKDLKQLQSILGKLNFARNFIPNFAELVQPLYNLIAPAKGKYIEWSEENTKQLNMVIEALNTASNLEERLPEQRLVIKVNTSPSAGYVRYYNETGKKPIMYLNYVFSKAELKFSMLEKLLTTMHKALIKAMDLAMGQEILVYSPIVSMTKIQKTPLPERKALPIRWITWMTYLEDPRIQFHYDKTLPELKHIPDVYTSSQSPVKHPSQYEGVFYTDGSAIKSPDPTKSNNAGMGIVHATYKPEYQVLNQWSIPLGNHTAQMAEIAAVEFACKKALKIPGPVLVITDSFYVAESANKELPYWKSNGFVNNKKKPLKHISKWKSIAECLSMKPDITIQHEKGISLQIPVFILKGNALADKLATQGSYVVNAGKRTADGSEFEKRTADGSEFESPKKKAKVE

SEQ ID NO: 1319 - protein, 2085 aa, synthetic construct
MPAAKRVKLDGGDKKYSIGLDIGTNSVGWAVITDEYKVPSKKFKVLGNTDRHSIKKNLIGALLFDSGETAEATRLKRTARRRYTRRKNRICYLQEIFSNEMAKVDDSFFHRLEESFLVEEDKKHERHPIFGNIVDEVAYHEKYPTIYHLRKKLVDSTDKADLRLIYLALAHMIKFRGHFLIEGDLNPDNSDVDKLFIQLVQTYNQLFEENPINASGVDAKAILSARLSKSRRLENLIAQLPGEKKNGLFGNLIALSLGLTPNFKSNFDLAEDAKLQLSKDTYDDDLDNLLAQIGDQYADLFLAAKNLSDAILLSDILRVNTEITKAPLSASMIKRYDEHHQDLTLLKALVRQQLPEKYKEIFFDQSKNGYAGYIDGGASQEEFYKFIKPILEKMDGTEELLVKLNREDLLRKQRTFDNGSIPHQIHLGELHAILRRQEDFYPFLKDNREKIEKILTFRIPYYVGPLARGNSRFAWMTRKSEETITPWNFEEVVDKGASAQSFIERMTNFDKNLPNEKVLPKHSLLYEYFTVYNELTKVKYVTEGMRKPAFLSGEQKKAIVDLLFKTNRKVTVKQLKEDYFKKIECFDSVEISGVEDRFNASLGTYHDLLKIIKDKDFLDNEENEDILEDIVLTLTLFEDREMIEERLKTYAHLFDDKVMKQLKRRRYTGWGRLSRKLINGIRDKQSGKTILDFLKSDGFANRNFMQLIHDDSLTFKEDIQKAQVSGQGDSLHEHIANLAGSPAIKKGILQTVKVVDELVKVMGRHKPENIVIEMARENQTTQKGQKNSRERMKRIEEGIKELGSQILKEHPVENTQLQNEKLYLYYLQNGRDMYVDQELDINRLSDYDVDHIVPQSFLKDDSIDNKVLTRSDKARGKSDNVPSEEVVKKMKNYWRQLLNAKLITQRKFDNLTKAERGGLSELDKAGFIKRQLVETRQITKHVAQILDSRMNTKYDENDKLIREVKVITLKSKLVSDFRKDFQFYKVREINNYHHAHDAYLNAVVGTALIKKYPKLESEFVYGDYKVYDVRKMIAKSEQEIGKATAKYFFYSNIMNFFKTEITLANGEIRKRPLIETNGETGEIVWDKGRDFATVRKVLSMPQVNIVKKTEVQTGGFSKESILPKRNSDKLIARKKDWDPKKYGGFDSPTVAYSVLVVAKVEKGKSKKLKSVKELLGITIMERSSFEKNPIDFLEAKGYKEVKKDLIIKLPKYSLFELENGRKRMLASAGELQKGNELALPSKYVNFLYLASHYEKLKGSPEDNEQKQLFVEQHKHYLDEIIEQISEFSKRVILADANLDKVLSAYNKHRDKPIREQAENIIHLFTLTNLGAPAAFKYFDTTIDRKRYTSTKEVLDATLIHQSITGLYETRIDLSQLGGDGGPAPGSSGGGGGVPWLTQQPLQLTILVPLQEYQEKILSKTALPEDQKQQLKTLFVKYDNLWQHWENQVGHRKIRPHNIATGDYPPRPQKQYPINPKAKPSIQIVIDDLLKQGVLTPQNSTMNTPVYPVPKPDGRWRMVLDYREVNKTIPLTAAQNQHSAGILATIVRQKYKTTLDLANGFWAHPITPESYWLTAFTWQGKQYCWTRLPQGFLNSPALFNADVVDLLKEIPNVQVYVDDIYLSHDDPKEHVQQLEKVFQILLQAGYVVSLKKSEIGQKTVEFLGFNITKEGRGLTDTFKTKLLNITPPKDLKQLQSILGKLNFARNFIPNFAELVQPLYNLIAPAKGKYIEWSEENTKQLNMVIEALNTASNLEERLPEQRLVIKVNTSPSAGYVRYYNETGKKPIMYLNYVFSKAELKFSMLEKLLTTMHKALIKAMDLAMGQEILVYSPIVSMTKIQKTPLPERKALPIRWITWMTYLEDPRIQFHYDKTLPELKHIPDVYTSSQSPVKHPSQYEGVFYTDGSAIKSPDPTKSNNAGMGIVHATYKPEYQVLNQWSIPLGNHTAQMAEIAAVEFACKKALKIPGPVLVITDSFYVAESANKELPYWKSNGFVNNKKKPLKHISKWKSIAECLSMKPDITIQHEKGISLQIPVFILKGNALADKLATQGSYVVNAGKRTADGSEFEKRTADGSEFESPKKKAKVE

SEQ ID NO: 1320 - protein, 2176 aa, synthetic construct
MPAAKRVKLDGGDKKYSIGLDIGTNSVGWAVITDEYKVPSKKFKVLGNTDRHSIKKNLIGALLFDSGETAEATRLKRTARRRYTRRKNRICYLQEIFSNEMAKVDDSFFHRLEESFLVEEDKKHERHPIFGNIVDEVAYHEKYPTIYHLRKKLVDSTDKADLRLIYLALAHMIKFRGHFLIEGDLNPDNSDVDKLFIQLVQTYNQLFEENPINASGVDAKAILSARLSKSRRLENLIAQLPGEKKNGLFGNLIALSLGLTPNFKSNFDLAEDAKLQLSKDTYDDDLDNLLAQIGDQYADLFLAAKNLSDAILLSDILRVNTEITKAPLSASMIKRYDEHHQDLTLLKALVRQQLPEKYKEIFFDQSKNGYAGYIDGGASQEEFYKFIKPILEKMDGTEELLVKLNREDLLRKQRTFDNGSIPHQIHLGELHAILRRQEDFYPFLKDNREKIEKILTFRIPYYVGPLARGNSRFAWMTRKSEETITPWNFEEVVDKGASAQSFIERMTNFDKNLPNEKVLPKHSLLYEYFTVYNELTKVKYVTEGMRKPAFLSGEQKKAIVDLLFKTNRKVTVKQLKEDYFKKIECFDSVEISGVEDRFNASLGTYHDLLKIIKDKDFLDNEENEDILEDIVLTLTLFEDREMIEERLKTYAHLFDDKVMKQLKRRRYTGWGRLSRKLINGIRDKQSGKTILDFLKSDGFANRNFMQLIHDDSLTFKEDIQKAQVSGQGDSLHEHIANLAGSPAIKKGILQTVKVVDELVKVMGRHKPENIVIEMARENQTTQKGQKNSRERMKRIEEGIKELGSQILKEHPVENTQLQNEKLYLYYLQNGRDMYVDQELDINRLSDYDVDHIVPQSFLKDDSIDNKVLTRSDKARGKSDNVPSEEVVKKMKNYWRQLLNAKLITQRKFDNLTKAERGGLSELDKAGFIKRQLVETRQITKHVAQILDSRMNTKYDENDKLIREVKVITLKSKLVSDFRKDFQFYKVREINNYHHAHDAYLNAVVGTALIKKYPKLESEFVYGDYKVYDVRKMIAKSEQEIGKATAKYFFYSNIMNFFKTEITLANGEIRKRPLIETNGETGEIVWDKGRDFATVRKVLSMPQVNIVKKTEVQTGGFSKESILPKRNSDKLIARKKDWDPKKYGGFDSPTVAYSVLVVAKVEKGKSKKLKSVKELLGITIMERSSFEKNPIDFLEAKGYKEVKKDLIIKLPKYSLFELENGRKRMLASAGELQKGNELALPSKYVNFLYLASHYEKLKGSPEDNEQKQLFVEQHKHYLDEIIEQISEFSKRVILADANLDKVLSAYNKHRDKPIREQAENIIHLFTLTNLGAPAAFKYFDTTIDRKRYTSTKEVLDATLIHQSITGLYETRIDLSQLGGDGGEAAAKPAPGSSGGMNPLQLLQPLPAEIKGTKLLAHWNSGATITCIPESFLEDEQPIKKTLIKTIHGEKQQNVYYVTFKVKGRKVEAEVIASPYEYILLSPTDVPWLTQQPLQLTILVPLQEYQEKILSKTALPEDQKQQLKTLFVKYDNLWQHWENQVGHRKIRPHNIATGDYPPRPQKQYPINPKAKPSIQIVIDDLLKQGVLTPQNSTMNTPVYPVPKPDGRWRMVLDYREVNKTIPLTAAQNQHSAGILATIVRQKYKTTLDLANGFWAHPITPESYWLTAFTWQGKQYCWTRLPQGFLNSPALFNADVVDLLKEIPNVQVYVDDIYLSHDDPKEHVQQLEKVFQILLQAGYVVSLKKSEIGQKTVEFLGFNITKEGRGLTDTFKTKLLNITPPKDLKQLQSILGLLNFARNFIPNFAELVQPLYNLIAPAKGKYIEWSEENTKQLNMVIEALNTASNLEERLPEQRLVIKVNTSPSAGYVRYYNETGKKPIMYLNYVFSKAELKFSMLEKLLTTMHKALIKAMDLAMGQEILVYSPIVSMTKIQKTPLPERKALPIRWITWMTYLEDPRIQFHYDKTLPELKHIPDVYTSSQSPVKHPSQYEGVFYTDGSAIKSPDPTKSNNAGMGIVHATYKPEYQVLNQWSIPLGNHTAQMAEIAAVEFACKKALKIPGPVLVITDSFYVAESANKELPYWKSNGFVNNKKKPLKHISKWKSIAECLSMKPDITIQHEKGISLQIPVFILKGNALADKLATQGSYVVNAGKRTADGSEFEKRTADGSEFESPKKKAKVE

SEQ ID NO: 1321 - protein, 2178 aa, synthetic construct
MPAAKRVKLDGGDKKYSIGLDIGTNSVGWAVITDEYKVPSKKFKVLGNTDRHSIKKNLIGALLFDSGETAEATRLKRTARRRYTRRKNRICYLQEIFSNEMAKVDDSFFHRLEESFLVEEDKKHERHPIFGNIVDEVAYHEKYPTIYHLRKKLVDSTDKADLRLIYLALAHMIKFRGHFLIEGDLNPDNSDVDKLFIQLVQTYNQLFEENPINASGVDAKAILSARLSKSRRLENLIAQLPGEKKNGLFGNLIALSLGLTPNFKSNFDLAEDAKLQLSKDTYDDDLDNLLAQIGDQYADLFLAAKNLSDAILLSDILRVNTEITKAPLSASMIKRYDEHHQDLTLLKALVRQQLPEKYKEIFFDQSKNGYAGYIDGGASQEEFYKFIKPILEKMDGTEELLVKLNREDLLRKQRTFDNGSIPHQIHLGELHAILRRQEDFYPFLKDNREKIEKILTFRIPYYVGPLARGNSRFAWMTRKSEETITPWNFEEVVDKGASAQSFIERMTNFDKNLPNEKVLPKHSLLYEYFTVYNELTKVKYVTEGMRKPAFLSGEQKKAIVDLLFKTNRKVTVKQLKEDYFKKIECFDSVEISGVEDRFNASLGTYHDLLKIIKDKDFLDNEENEDILEDIVLTLTLFEDREMIEERLKTYAHLFDDKVMKQLKRRRYTGWGRLSRKLINGIRDKQSGKTILDFLKSDGFANRNFMQLIHDDSLTFKEDIQKAQVSGQGDSLHEHIANLAGSPAIKKGILQTVKVVDELVKVMGRHKPENIVIEMARENQTTQKGQKNSRERMKRIEEGIKELGSQILKEHPVENTQLQNEKLYLYYLQNGRDMYVDQELDINRLSDYDVDHIVPQSFLKDDSIDNKVLTRSDKARGKSDNVPSEEVVKKMKNYWRQLLNAKLITQRKFDNLTKAERGGLSELDKAGFIKRQLVETRQITKHVAQILDSRMNTKYDENDKLIREVKVITLKSKLVSDFRKDFQFYKVREINNYHHAHDAYLNAVVGTALIKKYPKLESEFVYGDYKVYDVRKMIAKSEQEIGKATAKYFFYSNIMNFFKTEITLANGEIRKRPLIETNGETGEIVWDKGRDFATVRKVLSMPQVNIVKKTEVQTGGFSKESILPKRNSDKLIARKKDWDPKKYGGFDSPTVAYSVLVVAKVEKGKSKKLKSVKELLGITIMERSSFEKNPIDFLEAKGYKEVKKDLIIKLPKYSLFELENGRKRMLASAGELQKGNELALPSKYVNFLYLASHYEKLKGSPEDNEQKQLFVEQHKHYLDEIIEQISEFSKRVILADANLDKVLSAYNKHRDKPIREQAENIIHLFTLTNLGAPAAFKYFDTTIDRKRYTSTKEVLDATLIHQSITGLYETRIDLSQLGGDGGPAPAPAPAPAPAPGGMNPLQLLQPLPAEIKGTKLLAHWNSGATITCIPESFLEDEQPIKKTLIKTIHGEKQQNVYYVTFKVKGRKVEAEVIASPYEYILLSPTDVPWLTQQPLQLTILVPLQEYQEKILSKTALPEDQKQQLKTLFVKYDNLWQHWENQVGHRKIRPHNIATGDYPPRPQKQYPINPKAKPSIQIVIDDLLKQGVLTPQNSTMNTPVYPVPKPDGRWRMVLDYREVNKTIPLTAAQNQHSAGILATIVRQKYKTTLDLANGFWAHPITPESYWLTAFTWQGKQYCWTRLPQGFLNSPALFNADVVDLLKEIPNVQVYVDDIYLSHDDPKEHVQQLEKVFQILLQAGYVVSLKKSEIGQKTVEFLGFNITKEGRGLTDTFKTKLLNITPPKDLKQLQSILGLLNFARNFIPNFAELVQPLYNLIAPAKGKYIEWSEENTKQLNMVIEALNTASNLEERLPEQRLVIKVNTSPSAGYVRYYNETGKKPIMYLNYVFSKAELKFSMLEKLLTTMHKALIKAMDLAMGQEILVYSPIVSMTKIQKTPLPERKALPIRWITWMTYLEDPRIQFHYDKTLPELKHIPDVYTSSQSPVKHPSQYEGVFYTDGSAIKSPDPTKSNNAGMGIVHATYKPEYQVLNQWSIPLGNHTAQMAEIAAVEFACKKALKIPGPVLVITDSFYVAESANKELPYWKSNGFVNNKKKPLKHISKWKSIAECLSMKPDITIQHEKGISLQIPVFILKGNALADKLATQGSYVVNAGKRTADGSEFEKRTADGSEFESPKKKAKVE

SEQ ID NO: 1322 - protein, 2174 aa, synthetic construct
MPAAKRVKLDGGDKKYSIGLDIGTNSVGWAVITDEYKVPSKKFKVLGNTDRHSIKKNLIGALLFDSGETAEATRLKRTARRRYTRRKNRICYLQEIFSNEMAKVDDSFFHRLEESFLVEEDKKHERHPIFGNIVDEVAYHEKYPTIYHLRKKLVDSTDKADLRLIYLALAHMIKFRGHFLIEGDLNPDNSDVDKLFIQLVQTYNQLFEENPINASGVDAKAILSARLSKSRRLENLIAQLPGEKKNGLFGNLIALSLGLTPNFKSNFDLAEDAKLQLSKDTYDDDLDNLLAQIGDQYADLFLAAKNLSDAILLSDILRVNTEITKAPLSASMIKRYDEHHQDLTLLKALVRQQLPEKYKEIFFDQSKNGYAGYIDGGASQEEFYKFIKPILEKMDGTEELLVKLNREDLLRKQRTFDNGSIPHQIHLGELHAILRRQEDFYPFLKDNREKIEKILTFRIPYYVGPLARGNSRFAWMTRKSEETITPWNFEEVVDKGASAQSFIERMTNFDKNLPNEKVLPKHSLLYEYFTVYNELTKVKYVTEGMRKPAFLSGEQKKAIVDLLFKTNRKVTVKQLKEDYFKKIECFDSVEISGVEDRFNASLGTYHDLLKIIKDKDFLDNEENEDILEDIVLTLTLFEDREMIEERLKTYAHLFDDKVMKQLKRRRYTGWGRLSRKLINGIRDKQSGKTILDFLKSDGFANRNFMQLIHDDSLTFKEDIQKAQVSGQGDSLHEHIANLAGSPAIKKGILQTVKVVDELVKVMGRHKPENIVIEMARENQTTQKGQKNSRERMKRIEEGIKELGSQILKEHPVENTQLQNEKLYLYYLQNGRDMYVDQELDINRLSDYDVDHIVPQSFLKDDSIDNKVLTRSDKARGKSDNVPSEEVVKKMKNYWRQLLNAKLITQRKFDNLTKAERGGLSELDKAGFIKRQLVETRQITKHVAQILDSRMNTKYDENDKLIREVKVITLKSKLVSDFRKDFQFYKVREINNYHHAHDAYLNAVVGTALIKKYPKLESEFVYGDYKVYDVRKMIAKSEQEIGKATAKYFFYSNIMNFFKTEITLANGEIRKRPLIETNGETGEIVWDKGRDFATVRKVLSMPQVNIVKKTEVQTGGFSKESILPKRNSDKLIARKKDWDPKKYGGFDSPTVAYSVLVVAKVEKGKSKKLKSVKELLGITIMERSSFEKNPIDFLEAKGYKEVKKDLIIKLPKYSLFELENGRKRMLASAGELQKGNELALPSKYVNFLYLASHYEKLKGSPEDNEQKQLFVEQHKHYLDEIIEQISEFSKRVILADANLDKVLSAYNKHRDKPIREQAENIIHLFTLTNLGAPAAFKYFDTTIDRKRYTSTKEVLDATLIHQSITGLYETRIDLSQLGGDGGGGSGGGPAPGGMNPLQLLQPLPAEIKGTKLLAHWNSGATITCIPESFLEDEQPIKKTLIKTIHGEKQQNVYYVTFKVKGRKVEAEVIASPYEYILLSPTDVPWLTQQPLQLTILVPLQEYQEKILSKTALPEDQKQQLKTLFVKYDNLWQHWENQVGHRKIRPHNIATGDYPPRPQKQYPINPKAKPSIQIVIDDLLKQGVLTPQNSTMNTPVYPVPKPDGRWRMVLDYREVNKTIPLTAAQNQHSAGILATIVRQKYKTTLDLANGFWAHPITPESYWLTAFTWQGKQYCWTRLPQGFLNSPALFNADVVDLLKEIPNVQVYVDDIYLSHDDPKEHVQQLEKVFQILLQAGYVVSLKKSEIGQKTVEFLGFNITKEGRGLTDTFKTKLLNITPPKDLKQLQSILGLLNFARNFIPNFAELVQPLYNLIAPAKGKYIEWSEENTKQLNMVIEALNTASNLEERLPEQRLVIKVNTSPSAGYVRYYNETGKKPIMYLNYVFSKAELKFSMLEKLLTTMHKALIKAMDLAMGQEILVYSPIVSMTKIQKTPLPERKALPIRWITWMTYLEDPRIQFHYDKTLPELKHIPDVYTSSQSPVKHPSQYEGVFYTDGSAIKSPDPTKSNNAGMGIVHATYKPEYQVLNQWSIPLGNHTAQMAEIAAVEFACKKALKIPGPVLVITDSFYVAESANKELPYWKSNGFVNNKKKPLKHISKWKSIAECLSMKPDITIQHEKGISLQIPVFILKGNALADKLATQGSYVVNAGKRTADGSEFEKRTADGSEFESPKKKAKVE

SEQ ID NO: 1323 - protein, 2176 aa, synthetic construct
MPAAKRVKLDGGDKKYSIGLDIGTNSVGWAVITDEYKVPSKKFKVLGNTDRHSIKKNLIGALLFDSGETAEATRLKRTARRRYTRRKNRICYLQEIFSNEMAKVDDSFFHRLEESFLVEEDKKHERHPIFGNIVDEVAYHEKYPTIYHLRKKLVDSTDKADLRLIYLALAHMIKFRGHFLIEGDLNPDNSDVDKLFIQLVQTYNQLFEENPINASGVDAKAILSARLSKSRRLENLIAQLPGEKKNGLFGNLIALSLGLTPNFKSNFDLAEDAKLQLSKDTYDDDLDNLLAQIGDQYADLFLAAKNLSDAILLSDILRVNTEITKAPLSASMIKRYDEHHQDLTLLKALVRQQLPEKYKEIFFDQSKNGYAGYIDGGASQEEFYKFIKPILEKMDGTEELLVKLNREDLLRKQRTFDNGSIPHQIHLGELHAILRRQEDFYPFLKDNREKIEKILTFRIPYYVGPLARGNSRFAWMTRKSEETITPWNFEEVVDKGASAQSFIERMTNFDKNLPNEKVLPKHSLLYEYFTVYNELTKVKYVTEGMRKPAFLSGEQKKAIVDLLFKTNRKVTVKQLKEDYFKKIECFDSVEISGVEDRFNASLGTYHDLLKIIKDKDFLDNEENEDILEDIVLTLTLFEDREMIEERLKTYAHLFDDKVMKQLKRRRYTGWGRLSRKLINGIRDKQSGKTILDFLKSDGFANRNFMQLIHDDSLTFKEDIQKAQVSGQGDSLHEHIANLAGSPAIKKGILQTVKVVDELVKVMGRHKPENIVIEMARENQTTQKGQKNSRERMKRIEEGIKELGSQILKEHPVENTQLQNEKLYLYYLQNGRDMYVDQELDINRLSDYDVDHIVPQSFLKDDSIDNKVLTRSDKARGKSDNVPSEEVVKKMKNYWRQLLNAKLITQRKFDNLTKAERGGLSELDKAGFIKRQLVETRQITKHVAQILDSRMNTKYDENDKLIREVKVITLKSKLVSDFRKDFQFYKVREINNYHHAHDAYLNAVVGTALIKKYPKLESEFVYGDYKVYDVRKMIAKSEQEIGKATAKYFFYSNIMNFFKTEITLANGEIRKRPLIETNGETGEIVWDKGRDFATVRKVLSMPQVNIVKKTEVQTGGFSKESILPKRNSDKLIARKKDWDPKKYGGFDSPTVAYSVLVVAKVEKGKSKKLKSVKELLGITIMERSSFEKNPIDFLEAKGYKEVKKDLIIKLPKYSLFELENGRKRMLASAGELQKGNELALPSKYVNFLYLASHYEKLKGSPEDNEQKQLFVEQHKHYLDEIIEQISEFSKRVILADANLDKVLSAYNKHRDKPIREQAENIIHLFTLTNLGAPAAFKYFDTTIDRKRYTSTKEVLDATLIHQSITGLYETRIDLSQLGGDGGGGSEAAAKGGGGGMNPLQLLQPLPAEIKGTKLLAHWNSGATITCIPESFLEDEQPIKKTLIKTIHGEKQQNVYYVTFKVKGRKVEAEVIASPYEYILLSPTDVPWLTQQPLQLTILVPLQEYQEKILSKTALPEDQKQQLKTLFVKYDNLWQHWENQVGHRKIRPHNIATGDYPPRPQKQYPINPKAKPSIQIVIDDLLKQGVLTPQNSTMNTPVYPVPKPDGRWRMVLDYREVNKTIPLTAAQNQHSAGILATIVRQKYKTTLDLANGFWAHPITPESYWLTAFTWQGKQYCWTRLPQGFLNSPALFNADVVDLLKEIPNVQVYVDDIYLSHDDPKEHVQQLEKVFQILLQAGYVVSLKKSEIGQKTVEFLGFNITKEGRGLTDTFKTKLLNITPPKDLKQLQSILGLLNFARNFIPNFAELVQPLYNLIAPAKGKYIEWSEENTKQLNMVIEALNTASNLEERLPEQRLVIKVNTSPSAGYVRYYNETGKKPIMYLNYVFSKAELKFSMLEKLLTTMHKALIKAMDLAMGQEILVYSPIVSMTKIQKTPLPERKALPIRWITWMTYLEDPRIQFHYDKTLPELKHIPDVYTSSQSPVKHPSQYEGVFYTDGSAIKSPDPTKSNNAGMGIVHATYKPEYQVLNQWSIPLGNHTAQMAEIAAVEFACKKALKIPGPVLVITDSFYVAESANKELPYWKSNGFVNNKKKPLKHISKWKSIAECLSMKPDITIQHEKGISLQIPVFILKGNALADKLATQGSYVVNAGKRTADGSEFEKRTADGSEFESPKKKAKVE

SEQ ID NO: 1324 - protein, 2176 aa, synthetic construct
MPAAKRVKLDGGDKKYSIGLDIGTNSVGWAVITDEYKVPSKKFKVLGNTDRHSIKKNLIGALLFDSGETAEATRLKRTARRRYTRRKNRICYLQEIFSNEMAKVDDSFFHRLEESFLVEEDKKHERHPIFGNIVDEVAYHEKYPTIYHLRKKLVDSTDKADLRLIYLALAHMIKFRGHFLIEGDLNPDNSDVDKLFIQLVQTYNQLFEENPINASGVDAKAILSARLSKSRRLENLIAQLPGEKKNGLFGNLIALSLGLTPNFKSNFDLAEDAKLQLSKDTYDDDLDNLLAQIGDQYADLFLAAKNLSDAILLSDILRVNTEITKAPLSASMIKRYDEHHQDLTLLKALVRQQLPEKYKEIFFDQSKNGYAGYIDGGASQEEFYKFIKPILEKMDGTEELLVKLNREDLLRKQRTFDNGSIPHQIHLGELHAILRRQEDFYPFLKDNREKIEKILTFRIPYYVGPLARGNSRFAWMTRKSEETITPWNFEEVVDKGASAQSFIERMTNFDKNLPNEKVLPKHSLLYEYFTVYNELTKVKYVTEGMRKPAFLSGEQKKAIVDLLFKTNRKVTVKQLKEDYFKKIECFDSVEISGVEDRFNASLGTYHDLLKIIKDKDFLDNEENEDILEDIVLTLTLFEDREMIEERLKTYAHLFDDKVMKQLKRRRYTGWGRLSRKLINGIRDKQSGKTILDFLKSDGFANRNFMQLIHDDSLTFKEDIQKAQVSGQGDSLHEHIANLAGSPAIKKGILQTVKVVDELVKVMGRHKPENIVIEMARENQTTQKGQKNSRERMKRIEEGIKELGSQILKEHPVENTQLQNEKLYLYYLQNGRDMYVDQELDINRLSDYDVDHIVPQSFLKDDSIDNKVLTRSDKARGKSDNVPSEEVVKKMKNYWRQLLNAKLITQRKFDNLTKAERGGLSELDKAGFIKRQLVETRQITKHVAQILDSRMNTKYDENDKLIREVKVITLKSKLVSDFRKDFQFYKVREINNYHHAHDAYLNAVVGTALIKKYPKLESEFVYGDYKVYDVRKMIAKSEQEIGKATAKYFFYSNIMNFFKTEITLANGEIRKRPLIETNGETGEIVWDKGRDFATVRKVLSMPQVNIVKKTEVQTGGFSKESILPKRNSDKLIARKKDWDPKKYGGFDSPTVAYSVLVVAKVEKGKSKKLKSVKELLGITIMERSSFEKNPIDFLEAKGYKEVKKDLIIKLPKYSLFELENGRKRMLASAGELQKGNELALPSKYVNFLYLASHYEKLKGSPEDNEQKQLFVEQHKHYLDEIIEQISEFSKRVILADANLDKVLSAYNKHRDKPIREQAENIIHLFTLTNLGAPAAFKYFDTTIDRKRYTSTKEVLDATLIHQSITGLYETRIDLSQLGGDGGPAPEAAAKGGSGGMNPLQLLQPLPAEIKGTKLLAHWNSGATITCIPESFLEDEQPIKKTLIKTIHGEKQQNVYYVTFKVKGRKVEAEVIASPYEYILLSPTDVPWLTQQPLQLTILVPLQEYQEKILSKTALPEDQKQQLKTLFVKYDNLWQHWENQVGHRKIRPHNIATGDYPPRPQKQYPINPKAKPSIQIVIDDLLKQGVLTPQNSTMNTPVYPVPKPDGRWRMVLDYREVNKTIPLTAAQNQHSAGILATIVRQKYKTTLDLANGFWAHPITPESYWLTAFTWQGKQYCWTRLPQGFLNSPALFNADVVDLLKEIPNVQVYVDDIYLSHDDPKEHVQQLEKVFQILLQAGYVVSLKKSEIGQKTVEFLGFNITKEGRGLTDTFKTKLLNITPPKDLKQLQSILGLLNFARNFIPNFAELVQPLYNLIAPAKGKYIEWSEENTKQLNMVIEALNTASNLEERLPEQRLVIKVNTSPSAGYVRYYNETGKKPIMYLNYVFSKAELKFSMLEKLLTTMHKALIKAMDLAMGQEILVYSPIVSMTKIQKTPLPERKALPIRWITWMTYLEDPRIQFHYDKTLPELKHIPDVYTSSQSPVKHPSQYEGVFYTDGSAIKSPDPTKSNNAGMGIVHATYKPEYQVLNQWSIPLGNHTAQMAEIAAVEFACKKALKIPGPVLVITDSFYVAESANKELPYWKSNGFVNNKKKPLKHISKWKSIAECLSMKPDITIQHEKGISLQIPVFILKGNALADKLATQGSYVVNAGKRTADGSEFEKRTADGSEFESPKKKAKVE

SEQ ID NO: 1325 - protein, 2176 aa, synthetic construct
MPAAKRVKLDGGDKKYSIGLDIGTNSVGWAVITDEYKVPSKKFKVLGNTDRHSIKKNLIGALLFDSGETAEATRLKRTARRRYTRRKNRICYLQEIFSNEMAKVDDSFFHRLEESFLVEEDKKHERHPIFGNIVDEVAYHEKYPTIYHLRKKLVDSTDKADLRLIYLALAHMIKFRGHFLIEGDLNPDNSDVDKLFIQLVQTYNQLFEENPINASGVDAKAILSARLSKSRRLENLIAQLPGEKKNGLFGNLIALSLGLTPNFKSNFDLAEDAKLQLSKDTYDDDLDNLLAQIGDQYADLFLAAKNLSDAILLSDILRVNTEITKAPLSASMIKRYDEHHQDLTLLKALVRQQLPEKYKEIFFDQSKNGYAGYIDGGASQEEFYKFIKPILEKMDGTEELLVKLNREDLLRKQRTFDNGSIPHQIHLGELHAILRRQEDFYPFLKDNREKIEKILTFRIPYYVGPLARGNSRFAWMTRKSEETITPWNFEEVVDKGASAQSFIERMTNFDKNLPNEKVLPKHSLLYEYFTVYNELTKVKYVTEGMRKPAFLSGEQKKAIVDLLFKTNRKVTVKQLKEDYFKKIECFDSVEISGVEDRFNASLGTYHDLLKIIKDKDFLDNEENEDILEDIVLTLTLFEDREMIEERLKTYAHLFDDKVMKQLKRRRYTGWGRLSRKLINGIRDKQSGKTILDFLKSDGFANRNFMQLIHDDSLTFKEDIQKAQVSGQGDSLHEHIANLAGSPAIKKGILQTVKVVDELVKVMGRHKPENIVIEMARENQTTQKGQKNSRERMKRIEEGIKELGSQILKEHPVENTQLQNEKLYLYYLQNGRDMYVDQELDINRLSDYDVDHIVPQSFLKDDSIDNKVLTRSDKARGKSDNVPSEEVVKKMKNYWRQLLNAKLITQRKFDNLTKAERGGLSELDKAGFIKRQLVETRQITKHVAQILDSRMNTKYDENDKLIREVKVITLKSKLVSDFRKDFQFYKVREINNYHHAHDAYLNAVVGTALIKKYPKLESEFVYGDYKVYDVRKMIAKSEQEIGKATAKYFFYSNIMNFFKTEITLANGEIRKRPLIETNGETGEIVWDKGRDFATVRKVLSMPQVNIVKKTEVQTGGFSKESILPKRNSDKLIARKKDWDPKKYGGFDSPTVAYSVLVVAKVEKGKSKKLKSVKELLGITIMERSSFEKNPIDFLEAKGYKEVKKDLIIKLPKYSLFELENGRKRMLASAGELQKGNELALPSKYVNFLYLASHYEKLKGSPEDNEQKQLFVEQHKHYLDEIIEQISEFSKRVILADANLDKVLSAYNKHRDKPIREQAENIIHLFTLTNLGAPAAFKYFDTTIDRKRYTSTKEVLDATLIHQSITGLYETRIDLSQLGGDGGEAAAKGGSPAPGGMNPLQLLQPLPAEIKGTKLLAHWNSGATITCIPESFLEDEQPIKKTLIKTIHGEKQQNVYYVTFKVKGRKVEAEVIASPYEYILLSPTDVPWLTQQPLQLTILVPLQEYQEKILSKTALPEDQKQQLKTLFVKYDNLWQHWENQVGHRKIRPHNIATGDYPPRPQKQYPINPKAKPSIQIVIDDLLKQGVLTPQNSTMNTPVYPVPKPDGRWRMVLDYREVNKTIPLTAAQNQHSAGILATIVRQKYKTTLDLANGFWAHPITPESYWLTAFTWQGKQYCWTRLPQGFLNSPALFNADVVDLLKEIPNVQVYVDDIYLSHDDPKEHVQQLEKVFQILLQAGYVVSLKKSEIGQKTVEFLGFNITKEGRGLTDTFKTKLLNITPPKDLKQLQSILGLLNFARNFIPNFAELVQPLYNLIAPAKGKYIEWSEENTKQLNMVIEALNTASNLEERLPEQRLVIKVNTSPSAGYVRYYNETGKKPIMYLNYVFSKAELKFSMLEKLLTTMHKALIKAMDLAMGQEILVYSPIVSMTKIQKTPLPERKALPIRWITWMTYLEDPRIQFHYDKTLPELKHIPDVYTSSQSPVKHPSQYEGVFYTDGSAIKSPDPTKSNNAGMGIVHATYKPEYQVLNQWSIPLGNHTAQMAEIAAVEFACKKALKIPGPVLVITDSFYVAESANKELPYWKSNGFVNNKKKPLKHISKWKSIAECLSMKPDITIQHEKGISLQIPVFILKGNALADKLATQGSYVVNAGKRTADGSEFEKRTADGSEFESPKKKAKVE

SEQ ID NO: 1326 - protein, 2176 aa, synthetic construct
MPAAKRVKLDGGDKKYSIGLDIGTNSVGWAVITDEYKVPSKKFKVLGNTDRHSIKKNLIGALLFDSGETAEATRLKRTARRRYTRRKNRICYLQEIFSNEMAKVDDSFFHRLEESFLVEEDKKHERHPIFGNIVDEVAYHEKYPTIYHLRKKLVDSTDKADLRLIYLALAHMIKFRGHFLIEGDLNPDNSDVDKLFIQLVQTYNQLFEENPINASGVDAKAILSARLSKSRRLENLIAQLPGEKKNGLFGNLIALSLGLTPNFKSNFDLAEDAKLQLSKDTYDDDLDNLLAQIGDQYADLFLAAKNLSDAILLSDILRVNTEITKAPLSASMIKRYDEHHQDLTLLKALVRQQLPEKYKEIFFDQSKNGYAGYIDGGASQEEFYKFIKPILEKMDGTEELLVKLNREDLLRKQRTFDNGSIPHQIHLGELHAILRRQEDFYPFLKDNREKIEKILTFRIPYYVGPLARGNSRFAWMTRKSEETITPWNFEEVVDKGASAQSFIERMTNFDKNLPNEKVLPKHSLLYEYFTVYNELTKVKYVTEGMRKPAFLSGEQKKAIVDLLFKTNRKVTVKQLKEDYFKKIECFDSVEISGVEDRFNASLGTYHDLLKIIKDKDFLDNEENEDILEDIVLTLTLFEDREMIEERLKTYAHLFDDKVMKQLKRRRYTGWGRLSRKLINGIRDKQSGKTILDFLKSDGFANRNFMQLIHDDSLTFKEDIQKAQVSGQGDSLHEHIANLAGSPAIKKGILQTVKVVDELVKVMGRHKPENIVIEMARENQTTQKGQKNSRERMKRIEEGIKELGSQILKEHPVENTQLQNEKLYLYYLQNGRDMYVDQELDINRLSDYDVDHIVPQSFLKDDSIDNKVLTRSDKARGKSDNVPSEEVVKKMKNYWRQLLNAKLITQRKFDNLTKAERGGLSELDKAGFIKRQLVETRQITKHVAQILDSRMNTKYDENDKLIREVKVITLKSKLVSDFRKDFQFYKVREINNYHHAHDAYLNAVVGTALIKKYPKLESEFVYGDYKVYDVRKMIAKSEQEIGKATAKYFFYSNIMNFFKTEITLANGEIRKRPLIETNGETGEIVWDKGRDFATVRKVLSMPQVNIVKKTEVQTGGFSKESILPKRNSDKLIARKKDWDPKKYGGFDSPTVAYSVLVVAKVEKGKSKKLKSVKELLGITIMERSSFEKNPIDFLEAKGYKEVKKDLIIKLPKYSLFELENGRKRMLASAGELQKGNELALPSKYVNFLYLASHYEKLKGSPEDNEQKQLFVEQHKHYLDEIIEQISEFSKRVILADANLDKVLSAYNKHRDKPIREQAENIIHLFTLTNLGAPAAFKYFDTTIDRKRYTSTKEVLDATLIHQSITGLYETRIDLSQLGGDGGGGGGGSEAAAKGGMNPLQLLQPLPAEIKGTKLLAHWNSGATITCIPESFLEDEQPIKKTLIKTIHGEKQQNVYYVTFKVKGRKVEAEVIASPYEYILLSPTDVPWLTQQPLQLTILVPLQEYQEKILSKTALPEDQKQQLKTLFVKYDNLWQHWENQVGHRKIRPHNIATGDYPPRPQKQYPINPKAKPSIQIVIDDLLKQGVLTPQNSTMNTPVYPVPKPDGRWRMVLDYREVNKTIPLTAAQNQHSAGILATIVRQKYKTTLDLANGFWAHPITPESYWLTAFTWQGKQYCWTRLPQGFLNSPALFNADVVDLLKEIPNVQVYVDDIYLSHDDPKEHVQQLEKVFQILLQAGYVVSLKKSEIGQKTVEFLGFNITKEGRGLTDTFKTKLLNITPPKDLKQLQSILGLLNFARNFIPNFAELVQPLYNLIAPAKGKYIEWSEENTKQLNMVIEALNTASNLEERLPEQRLVIKVNTSPSAGYVRYYNETGKKPIMYLNYVFSKAELKFSMLEKLLTTMHKALIKAMDLAMGQEILVYSPIVSMTKIQKTPLPERKALPIRWITWMTYLEDPRIQFHYDKTLPELKHIPDVYTSSQSPVKHPSQYEGVFYTDGSAIKSPDPTKSNNAGMGIVHATYKPEYQVLNQWSIPLGNHTAQMAEIAAVEFACKKALKIPGPVLVITDSFYVAESANKELPYWKSNGFVNNKKKPLKHISKWKSIAECLSMKPDITIQHEKGISLQIPVFILKGNALADKLATQGSYVVNAGKRTADGSEFEKRTADGSEFESPKKKAKVE

SEQ ID NO: 1327 - protein, 2176 aa, synthetic construct
MPAAKRVKLDGGDKKYSIGLDIGTNSVGWAVITDEYKVPSKKFKVLGNTDRHSIKKNLIGALLFDSGETAEATRLKRTARRRYTRRKNRICYLQEIFSNEMAKVDDSFFHRLEESFLVEEDKKHERHPIFGNIVDEVAYHEKYPTIYHLRKKLVDSTDKADLRLIYLALAHMIKFRGHFLIEGDLNPDNSDVDKLFIQLVQTYNQLFEENPINASGVDAKAILSARLSKSRRLENLIAQLPGEKKNGLFGNLIALSLGLTPNFKSNFDLAEDAKLQLSKDTYDDDLDNLLAQIGDQYADLFLAAKNLSDAILLSDILRVNTEITKAPLSASMIKRYDEHHQDLTLLKALVRQQLPEKYKEIFFDQSKNGYAGYIDGGASQEEFYKFIKPILEKMDGTEELLVKLNREDLLRKQRTFDNGSIPHQIHLGELHAILRRQEDFYPFLKDNREKIEKILTFRIPYYVGPLARGNSRFAWMTRKSEETITPWNFEEVVDKGASAQSFIERMTNFDKNLPNEKVLPKHSLLYEYFTVYNELTKVKYVTEGMRKPAFLSGEQKKAIVDLLFKTNRKVTVKQLKEDYFKKIECFDSVEISGVEDRFNASLGTYHDLLKIIKDKDFLDNEENEDILEDIVLTLTLFEDREMIEERLKTYAHLFDDKVMKQLKRRRYTGWGRLSRKLINGIRDKQSGKTILDFLKSDGFANRNFMQLIHDDSLTFKEDIQKAQVSGQGDSLHEHIANLAGSPAIKKGILQTVKVVDELVKVMGRHKPENIVIEMARENQTTQKGQKNSRERMKRIEEGIKELGSQILKEHPVENTQLQNEKLYLYYLQNGRDMYVDQELDINRLSDYDVDHIVPQSFLKDDSIDNKVLTRSDKARGKSDNVPSEEVVKKMKNYWRQLLNAKLITQRKFDNLTKAERGGLSELDKAGFIKRQLVETRQITKHVAQILDSRMNTKYDENDKLIREVKVITLKSKLVSDFRKDFQFYKVREINNYHHAHDAYLNAVVGTALIKKYPKLESEFVYGDYKVYDVRKMIAKSEQEIGKATAKYFFYSNIMNFFKTEITLANGEIRKRPLIETNGETGEIVWDKGRDFATVRKVLSMPQVNIVKKTEVQTGGFSKESILPKRNSDKLIARKKDWDPKKYGGFDSPTVAYSVLVVAKVEKGKSKKLKSVKELLGITIMERSSFEKNPIDFLEAKGYKEVKKDLIIKLPKYSLFELENGRKRMLASAGELQKGNELALPSKYVNFLYLASHYEKLKGSPEDNEQKQLFVEQHKHYLDEIIEQISEFSKRVILADANLDKVLSAYNKHRDKPIREQAENIIHLFTLTNLGAPAAFKYFDTTIDRKRYTSTKEVLDATLIHQSITGLYETRIDLSQLGGDGGEAAAKGSSPAPGGMNPLQLLQPLPAEIKGTKLLAHWNSGATITCIPESFLEDEQPIKKTLIKTIHGEKQQNVYYVTFKVKGRKVEAEVIASPYEYILLSPTDVPWLTQQPLQLTILVPLQEYQEKILSKTALPEDQKQQLKTLFVKYDNLWQHWENQVGHRKIRPHNIATGDYPPRPQKQYPINPKAKPSIQIVIDDLLKQGVLTPQNSTMNTPVYPVPKPDGRWRMVLDYREVNKTIPLTAAQNQHSAGILATIVRQKYKTTLDLANGFWAHPITPESYWLTAFTWQGKQYCWTRLPQGFLNSPALFNADVVDLLKEIPNVQVYVDDIYLSHDDPKEHVQQLEKVFQILLQAGYVVSLKKSEIGQKTVEFLGFNITKEGRGLTDTFKTKLLNITPPKDLKQLQSILGLLNFARNFIPNFAELVQPLYNLIAPAKGKYIEWSEENTKQLNMVIEALNTASNLEERLPEQRLVIKVNTSPSAGYVRYYNETGKKPIMYLNYVFSKAELKFSMLEKLLTTMHKALIKAMDLAMGQEILVYSPIVSMTKIQKTPLPERKALPIRWITWMTYLEDPRIQFHYDKTLPELKHIPDVYTSSQSPVKHPSQYEGVFYTDGSAIKSPDPTKSNNAGMGIVHATYKPEYQVLNQWSIPLGNHTAQMAEIAAVEFACKKALKIPGPVLVITDSFYVAESANKELPYWKSNGFVNNKKKPLKHISKWKSIAECLSMKPDITIQHEKGISLQIPVFILKGNALADKLATQGSYVVNAGKRTADGSEFEKRTADGSEFESPKKKAKVE

SEQ ID NO: 1328 - protein, 2176 aa, synthetic construct
MPAAKRVKLDGGDKKYSIGLDIGTNSVGWAVITDEYKVPSKKFKVLGNTDRHSIKKNLIGALLFDSGETAEATRLKRTARRRYTRRKNRICYLQEIFSNEMAKVDDSFFHRLEESFLVEEDKKHERHPIFGNIVDEVAYHEKYPTIYHLRKKLVDSTDKADLRLIYLALAHMIKFRGHFLIEGDLNPDNSDVDKLFIQLVQTYNQLFEENPINASGVDAKAILSARLSKSRRLENLIAQLPGEKKNGLFGNLIALSLGLTPNFKSNFDLAEDAKLQLSKDTYDDDLDNLLAQIGDQYADLFLAAKNLSDAILLSDILRVNTEITKAPLSASMIKRYDEHHQDLTLLKALVRQQLPEKYKEIFFDQSKNGYAGYIDGGASQEEFYKFIKPILEKMDGTEELLVKLNREDLLRKQRTFDNGSIPHQIHLGELHAILRRQEDFYPFLKDNREKIEKILTFRIPYYVGPLARGNSRFAWMTRKSEETITPWNFEEVVDKGASAQSFIERMTNFDKNLPNEKVLPKHSLLYEYFTVYNELTKVKYVTEGMRKPAFLSGEQKKAIVDLLFKTNRKVTVKQLKEDYFKKIECFDSVEISGVEDRFNASLGTYHDLLKIIKDKDFLDNEENEDILEDIVLTLTLFEDREMIEERLKTYAHLFDDKVMKQLKRRRYTGWGRLSRKLINGIRDKQSGKTILDFLKSDGFANRNFMQLIHDDSLTFKEDIQKAQVSGQGDSLHEHIANLAGSPAIKKGILQTVKVVDELVKVMGRHKPENIVIEMARENQTTQKGQKNSRERMKRIEEGIKELGSQILKEHPVENTQLQNEKLYLYYLQNGRDMYVDQELDINRLSDYDVDHIVPQSFLKDDSIDNKVLTRSDKARGKSDNVPSEEVVKKMKNYWRQLLNAKLITQRKFDNLTKAERGGLSELDKAGFIKRQLVETRQITKHVAQILDSRMNTKYDENDKLIREVKVITLKSKLVSDFRKDFQFYKVREINNYHHAHDAYLNAVVGTALIKKYPKLESEFVYGDYKVYDVRKMIAKSEQEIGKATAKYFFYSNIMNFFKTEITLANGEIRKRPLIETNGETGEIVWDKGRDFATVRKVLSMPQVNIVKKTEVQTGGFSKESILPKRNSDKLIARKKDWDPKKYGGFDSPTVAYSVLVVAKVEKGKSKKLKSVKELLGITIMERSSFEKNPIDFLEAKGYKEVKKDLIIKLPKYSLFELENGRKRMLASAGELQKGNELALPSKYVNFLYLASHYEKLKGSPEDNEQKQLFVEQHKHYLDEIIEQISEFSKRVILADANLDKVLSAYNKHRDKPIREQAENIIHLFTLTNLGAPAAFKYFDTTIDRKRYTSTKEVLDATLIHQSITGLYETRIDLSQLGGDGGGGSPAPEAAAKGGMNPLQLLQPLPAEIKGTKLLAHWNSGATITCIPESFLEDEQPIKKTLIKTIHGEKQQNVYYVTFKVKGRKVEAEVIASPYEYILLSPTDVPWLTQQPLQLTILVPLQEYQEKILSKTALPEDQKQQLKTLFVKYDNLWQHWENQVGHRKIRPHNIATGDYPPRPQKQYPINPKAKPSIQIVIDDLLKQGVLTPQNSTMNTPVYPVPKPDGRWRMVLDYREVNKTIPLTAAQNQHSAGILATIVRQKYKTTLDLANGFWAHPITPESYWLTAFTWQGKQYCWTRLPQGFLNSPALFNADVVDLLKEIPNVQVYVDDIYLSHDDPKEHVQQLEKVFQILLQAGYVVSLKKSEIGQKTVEFLGFNITKEGRGLTDTFKTKLLNITPPKDLKQLQSILGLLNFARNFIPNFAELVQPLYNLIAPAKGKYIEWSEENTKQLNMVIEALNTASNLEERLPEQRLVIKVNTSPSAGYVRYYNETGKKPIMYLNYVFSKAELKFSMLEKLLTTMHKALIKAMDLAMGQEILVYSPIVSMTKIQKTPLPERKALPIRWITWMTYLEDPRIQFHYDKTLPELKHIPDVYTSSQSPVKHPSQYEGVFYTDGSAIKSPDPTKSNNAGMGIVHATYKPEYQVLNQWSIPLGNHTAQMAEIAAVEFACKKALKIPGPVLVITDSFYVAESANKELPYWKSNGFVNNKKKPLKHISKWKSIAECLSMKPDITIQHEKGISLQIPVFILKGNALADKLATQGSYVVNAGKRTADGSEFEKRTADGSEFESPKKKAKVE

SEQ ID NO: 1329 - protein, 2176 aa, synthetic construct
MPAAKRVKLDGGDKKYSIGLDIGTNSVGWAVITDEYKVPSKKFKVLGNTDRHSIKKNLIGALLFDSGETAEATRLKRTARRRYTRRKNRICYLQEIFSNEMAKVDDSFFHRLEESFLVEEDKKHERHPIFGNIVDEVAYHEKYPTIYHLRKKLVDSTDKADLRLIYLALAHMIKFRGHFLIEGDLNPDNSDVDKLFIQLVQTYNQLFEENPINASGVDAKAILSARLSKSRRLENLIAQLPGEKKNGLFGNLIALSLGLTPNFKSNFDLAEDAKLQLSKDTYDDDLDNLLAQIGDQYADLFLAAKNLSDAILLSDILRVNTEITKAPLSASMIKRYDEHHQDLTLLKALVRQQLPEKYKEIFFDQSKNGYAGYIDGGASQEEFYKFIKPILEKMDGTEELLVKLNREDLLRKQRTFDNGSIPHQIHLGELHAILRRQEDFYPFLKDNREKIEKILTFRIPYYVGPLARGNSRFAWMTRKSEETITPWNFEEVVDKGASAQSFIERMTNFDKNLPNEKVLPKHSLLYEYFTVYNELTKVKYVTEGMRKPAFLSGEQKKAIVDLLFKTNRKVTVKQLKEDYFKKIECFDSVEISGVEDRFNASLGTYHDLLKIIKDKDFLDNEENEDILEDIVLTLTLFEDREMIEERLKTYAHLFDDKVMKQLKRRRYTGWGRLSRKLINGIRDKQSGKTILDFLKSDGFANRNFMQLIHDDSLTFKEDIQKAQVSGQGDSLHEHIANLAGSPAIKKGILQTVKVVDELVKVMGRHKPENIVIEMARENQTTQKGQKNSRERMKRIEEGIKELGSQILKEHPVENTQLQNEKLYLYYLQNGRDMYVDQELDINRLSDYDVDHIVPQSFLKDDSIDNKVLTRSDKARGKSDNVPSEEVVKKMKNYWRQLLNAKLITQRKFDNLTKAERGGLSELDKAGFIKRQLVETRQITKHVAQILDSRMNTKYDENDKLIREVKVITLKSKLVSDFRKDFQFYKVREINNYHHAHDAYLNAVVGTALIKKYPKLESEFVYGDYKVYDVRKMIAKSEQEIGKATAKYFFYSNIMNFFKTEITLANGEIRKRPLIETNGETGEIVWDKGRDFATVRKVLSMPQVNIVKKTEVQTGGFSKESILPKRNSDKLIARKKDWDPKKYGGFDSPTVAYSVLVVAKVEKGKSKKLKSVKELLGITIMERSSFEKNPIDFLEAKGYKEVKKDLIIKLPKYSLFELENGRKRMLASAGELQKGNELALPSKYVNFLYLASHYEKLKGSPEDNEQKQLFVEQHKHYLDEIIEQISEFSKRVILADANLDKVLSAYNKHRDKPIREQAENIIHLFTLTNLGAPAAFKYFDTTIDRKRYTSTKEVLDATLIHQSITGLYETRIDLSQLGGDGGEAAAKGGSGGGGGMNPLQLLQPLPAEIKGTKLLAHWNSGATITCIPESFLEDEQPIKKTLIKTIHGEKQQNVYYVTFKVKGRKVEAEVIASPYEYILLSPTDVPWLTQQPLQLTILVPLQEYQEKILSKTALPEDQKQQLKTLFVKYDNLWQHWENQVGHRKIRPHNIATGDYPPRPQKQYPINPKAKPSIQIVIDDLLKQGVLTPQNSTMNTPVYPVPKPDGRWRMVLDYREVNKTIPLTAAQNQHSAGILATIVRQKYKTTLDLANGFWAHPITPESYWLTAFTWQGKQYCWTRLPQGFLNSPALFNADVVDLLKEIPNVQVYVDDIYLSHDDPKEHVQQLEKVFQILLQAGYVVSLKKSEIGQKTVEFLGFNITKEGRGLTDTFKTKLLNITPPKDLKQLQSILGLLNFARNFIPNFAELVQPLYNLIAPAKGKYIEWSEENTKQLNMVIEALNTASNLEERLPEQRLVIKVNTSPSAGYVRYYNETGKKPIMYLNYVFSKAELKFSMLEKLLTTMHKALIKAMDLAMGQEILVYSPIVSMTKIQKTPLPERKALPIRWITWMTYLEDPRIQFHYDKTLPELKHIPDVYTSSQSPVKHPSQYEGVFYTDGSAIKSPDPTKSNNAGMGIVHATYKPEYQVLNQWSIPLGNHTAQMAEIAAVEFACKKALKIPGPVLVITDSFYVAESANKELPYWKSNGFVNNKKKPLKHISKWKSIAECLSMKPDITIQHEKGISLQIPVFILKGNALADKLATQGSYVVNAGKRTADGSEFEKRTADGSEFESPKKKAKVE

SEQ ID NO: 1330 - protein, 2180 aa, synthetic construct
MPAAKRVKLDGGDKKYSIGLDIGTNSVGWAVITDEYKVPSKKFKVLGNTDRHSIKKNLIGALLFDSGETAEATRLKRTARRRYTRRKNRICYLQEIFSNEMAKVDDSFFHRLEESFLVEEDKKHERHPIFGNIVDEVAYHEKYPTIYHLRKKLVDSTDKADLRLIYLALAHMIKFRGHFLIEGDLNPDNSDVDKLFIQLVQTYNQLFEENPINASGVDAKAILSARLSKSRRLENLIAQLPGEKKNGLFGNLIALSLGLTPNFKSNFDLAEDAKLQLSKDTYDDDLDNLLAQIGDQYADLFLAAKNLSDAILLSDILRVNTEITKAPLSASMIKRYDEHHQDLTLLKALVRQQLPEKYKEIFFDQSKNGYAGYIDGGASQEEFYKFIKPILEKMDGTEELLVKLNREDLLRKQRTFDNGSIPHQIHLGELHAILRRQEDFYPFLKDNREKIEKILTFRIPYYVGPLARGNSRFAWMTRKSEETITPWNFEEVVDKGASAQSFIERMTNFDKNLPNEKVLPKHSLLYEYFTVYNELTKVKYVTEGMRKPAFLSGEQKKAIVDLLFKTNRKVTVKQLKEDYFKKIECFDSVEISGVEDRFNASLGTYHDLLKIIKDKDFLDNEENEDILEDIVLTLTLFEDREMIEERLKTYAHLFDDKVMKQLKRRRYTGWGRLSRKLINGIRDKQSGKTILDFLKSDGFANRNFMQLIHDDSLTFKEDIQKAQVSGQGDSLHEHIANLAGSPAIKKGILQTVKVVDELVKVMGRHKPENIVIEMARENQTTQKGQKNSRERMKRIEEGIKELGSQILKEHPVENTQLQNEKLYLYYLQNGRDMYVDQELDINRLSDYDVDHIVPQSFLKDDSIDNKVLTRSDKARGKSDNVPSEEVVKKMKNYWRQLLNAKLITQRKFDNLTKAERGGLSELDKAGFIKRQLVETRQITKHVAQILDSRMNTKYDENDKLIREVKVITLKSKLVSDFRKDFQFYKVREINNYHHAHDAYLNAVVGTALIKKYPKLESEFVYGDYKVYDVRKMIAKSEQEIGKATAKYFFYSNIMNFFKTEITLANGEIRKRPLIETNGETGEIVWDKGRDFATVRKVLSMPQVNIVKKTEVQTGGFSKESILPKRNSDKLIARKKDWDPKKYGGFDSPTVAYSVLVVAKVEKGKSKKLKSVKELLGITIMERSSFEKNPIDFLEAKGYKEVKKDLIIKLPKYSLFELENGRKRMLASAGELQKGNELALPSKYVNFLYLASHYEKLKGSPEDNEQKQLFVEQHKHYLDEIIEQISEFSKRVILADANLDKVLSAYNKHRDKPIREQAENIIHLFTLTNLGAPAAFKYFDTTIDRKRYTSTKEVLDATLIHQSITGLYETRIDLSQLGGDGGGGGGSEAAAKGGGGSGGMNPLQLLQPLPAEIKGTKLLAHWNSGATITCIPESFLEDEQPIKKTLIKTIHGEKQQNVYYVTFKVKGRKVEAEVIASPYEYILLSPTDVPWLTQQPLQLTILVPLQEYQEKILSKTALPEDQKQQLKTLFVKYDNLWQHWENQVGHRKIRPHNIATGDYPPRPQKQYPINPKAKPSIQIVIDDLLKQGVLTPQNSTMNTPVYPVPKPDGRWRMVLDYREVNKTIPLTAAQNQHSAGILATIVRQKYKTTLDLANGFWAHPITPESYWLTAFTWQGKQYCWTRLPQGFLNSPALFNADVVDLLKEIPNVQVYVDDIYLSHDDPKEHVQQLEKVFQILLQAGYVVSLKKSEIGQKTVEFLGFNITKEGRGLTDTFKTKLLNITPPKDLKQLQSILGLLNFARNFIPNFAELVQPLYNLIAPAKGKYIEWSEENTKQLNMVIEALNTASNLEERLPEQRLVIKVNTSPSAGYVRYYNETGKKPIMYLNYVFSKAELKFSMLEKLLTTMHKALIKAMDLAMGQEILVYSPIVSMTKIQKTPLPERKALPIRWITWMTYLEDPRIQFHYDKTLPELKHIPDVYTSSQSPVKHPSQYEGVFYTDGSAIKSPDPTKSNNAGMGIVHATYKPEYQVLNQWSIPLGNHTAQMAEIAAVEFACKKALKIPGPVLVITDSFYVAESANKELPYWKSNGFVNNKKKPLKHISKWKSIAECLSMKPDITIQHEKGISLQIPVFILKGNALADKLATQGSYVVNAGKRTADGSEFEKRTADGSEFESPKKKAKVE

SEQ ID NO: 1331 - protein, 2174 aa, synthetic construct
MPAAKRVKLDGGDKKYSIGLDIGTNSVGWAVITDEYKVPSKKFKVLGNTDRHSIKKNLIGALLFDSGETAEATRLKRTARRRYTRRKNRICYLQEIFSNEMAKVDDSFFHRLEESFLVEEDKKHERHPIFGNIVDEVAYHEKYPTIYHLRKKLVDSTDKADLRLIYLALAHMIKFRGHFLIEGDLNPDNSDVDKLFIQLVQTYNQLFEENPINASGVDAKAILSARLSKSRRLENLIAQLPGEKKNGLFGNLIALSLGLTPNFKSNFDLAEDAKLQLSKDTYDDDLDNLLAQIGDQYADLFLAAKNLSDAILLSDILRVNTEITKAPLSASMIKRYDEHHQDLTLLKALVRQQLPEKYKEIFFDQSKNGYAGYIDGGASQEEFYKFIKPILEKMDGTEELLVKLNREDLLRKQRTFDNGSIPHQIHLGELHAILRRQEDFYPFLKDNREKIEKILTFRIPYYVGPLARGNSRFAWMTRKSEETITPWNFEEVVDKGASAQSFIERMTNFDKNLPNEKVLPKHSLLYEYFTVYNELTKVKYVTEGMRKPAFLSGEQKKAIVDLLFKTNRKVTVKQLKEDYFKKIECFDSVEISGVEDRFNASLGTYHDLLKIIKDKDFLDNEENEDILEDIVLTLTLFEDREMIEERLKTYAHLFDDKVMKQLKRRRYTGWGRLSRKLINGIRDKQSGKTILDFLKSDGFANRNFMQLIHDDSLTFKEDIQKAQVSGQGDSLHEHIANLAGSPAIKKGILQTVKVVDELVKVMGRHKPENIVIEMARENQTTQKGQKNSRERMKRIEEGIKELGSQILKEHPVENTQLQNEKLYLYYLQNGRDMYVDQELDINRLSDYDVDHIVPQSFLKDDSIDNKVLTRSDKARGKSDNVPSEEVVKKMKNYWRQLLNAKLITQRKFDNLTKAERGGLSELDKAGFIKRQLVETRQITKHVAQILDSRMNTKYDENDKLIREVKVITLKSKLVSDFRKDFQFYKVREINNYHHAHDAYLNAVVGTALIKKYPKLESEFVYGDYKVYDVRKMIAKSEQEIGKATAKYFFYSNIMNFFKTEITLANGEIRKRPLIETNGETGEIVWDKGRDFATVRKVLSMPQVNIVKKTEVQTGGFSKESILPKRNSDKLIARKKDWDPKKYGGFDSPTVAYSVLVVAKVEKGKSKKLKSVKELLGITIMERSSFEKNPIDFLEAKGYKEVKKDLIIKLPKYSLFELENGRKRMLASAGELQKGNELALPSKYVNFLYLASHYEKLKGSPEDNEQKQLFVEQHKHYLDEIIEQISEFSKRVILADANLDKVLSAYNKHRDKPIREQAENIIHLFTLTNLGAPAAFKYFDTTIDRKRYTSTKEVLDATLIHQSITGLYETRIDLSQLGGDGGGGSPAPGSSGGMNPLQLLQPLPAEIKGTKLLAHWNSGATITCIPESFLEDEQPIKKTLIKTIHGEKQQNVYYVTFKVKGRKVEAEVIASPYEYILLSPTDVPWLTQQPLQLTILVPLQEYQEKILSKTALPEDQKQQLKTLFVKYDNLWQHWENQVGHRKIRPHNIATGDYPPRPQKQYPINPKAKPSIQIVIDDLLKQGVLTPQNSTMNTPVYPVPKPDGRWRMVLDYREVNKTIPLTAAQNQHSAGILATIVRQKYKTTLDLANGFWAHPITPESYWLTAFTWQGKQYCWTRLPQGFLNSPALFNADVVDLLKEIPNVQVYVDDIYLSHDDPKEHVQQLEKVFQILLQAGYVVSLKKSEIGQKTVEFLGFNITKEGRGLTDTFKTKLLNITPPKDLKQLQSILGLLNFARNFIPNFAELVQPLYNLIAPAKGKYIEWSEENTKQLNMVIEALNTASNLEERLPEQRLVIKVNTSPSAGYVRYYNETGKKPIMYLNYVFSKAELKFSMLEKLLTTMHKALIKAMDLAMGQEILVYSPIVSMTKIQKTPLPERKALPIRWITWMTYLEDPRIQFHYDKTLPELKHIPDVYTSSQSPVKHPSQYEGVFYTDGSAIKSPDPTKSNNAGMGIVHATYKPEYQVLNQWSIPLGNHTAQMAEIAAVEFACKKALKIPGPVLVITDSFYVAESANKELPYWKSNGFVNNKKKPLKHISKWKSIAECLSMKPDITIQHEKGISLQIPVFILKGNALADKLATQGSYVVNAGKRTADGSEFEKRTADGSEFESPKKKAKVE

SEQ ID NO: 1332 - protein, 2177 aa, synthetic construct
MPAAKRVKLDGGDKKYSIGLDIGTNSVGWAVITDEYKVPSKKFKVLGNTDRHSIKKNLIGALLFDSGETAEATRLKRTARRRYTRRKNRICYLQEIFSNEMAKVDDSFFHRLEESFLVEEDKKHERHPIFGNIVDEVAYHEKYPTIYHLRKKLVDSTDKADLRLIYLALAHMIKFRGHFLIEGDLNPDNSDVDKLFIQLVQTYNQLFEENPINASGVDAKAILSARLSKSRRLENLIAQLPGEKKNGLFGNLIALSLGLTPNFKSNFDLAEDAKLQLSKDTYDDDLDNLLAQIGDQYADLFLAAKNLSDAILLSDILRVNTEITKAPLSASMIKRYDEHHQDLTLLKALVRQQLPEKYKEIFFDQSKNGYAGYIDGGASQEEFYKFIKPILEKMDGTEELLVKLNREDLLRKQRTFDNGSIPHQIHLGELHAILRRQEDFYPFLKDNREKIEKILTFRIPYYVGPLARGNSRFAWMTRKSEETITPWNFEEVVDKGASAQSFIERMTNFDKNLPNEKVLPKHSLLYEYFTVYNELTKVKYVTEGMRKPAFLSGEQKKAIVDLLFKTNRKVTVKQLKEDYFKKIECFDSVEISGVEDRFNASLGTYHDLLKIIKDKDFLDNEENEDILEDIVLTLTLFEDREMIEERLKTYAHLFDDKVMKQLKRRRYTGWGRLSRKLINGIRDKQSGKTILDFLKSDGFANRNFMQLIHDDSLTFKEDIQKAQVSGQGDSLHEHIANLAGSPAIKKGILQTVKVVDELVKVMGRHKPENIVIEMARENQTTQKGQKNSRERMKRIEEGIKELGSQILKEHPVENTQLQNEKLYLYYLQNGRDMYVDQELDINRLSDYDVDHIVPQSFLKDDSIDNKVLTRSDKARGKSDNVPSEEVVKKMKNYWRQLLNAKLITQRKFDNLTKAERGGLSELDKAGFIKRQLVETRQITKHVAQILDSRMNTKYDENDKLIREVKVITLKSKLVSDFRKDFQFYKVREINNYHHAHDAYLNAVVGTALIKKYPKLESEFVYGDYKVYDVRKMIAKSEQEIGKATAKYFFYSNIMNFFKTEITLANGEIRKRPLIETNGETGEIVWDKGRDFATVRKVLSMPQVNIVKKTEVQTGGFSKESILPKRNSDKLIARKKDWDPKKYGGFDSPTVAYSVLVVAKVEKGKSKKLKSVKELLGITIMERSSFEKNPIDFLEAKGYKEVKKDLIIKLPKYSLFELENGRKRMLASAGELQKGNELALPSKYVNFLYLASHYEKLKGSPEDNEQKQLFVEQHKHYLDEIIEQISEFSKRVILADANLDKVLSAYNKHRDKPIREQAENIIHLFTLTNLGAPAAFKYFDTTIDRKRYTSTKEVLDATLIHQSITGLYETRIDLSQLGGDGGGSSGSSGSSGSSGGMNPLQLLQPLPAEIKGTKLLAHWNSGATITCIPESFLEDEQPIKKTLIKTIHGEKQQNVYYVTFKVKGRKVEAEVIASPYEYILLSPTDVPWLTQQPLQLTILVPLQEYQEKILSKTALPEDQKQQLKTLFVKYDNLWQHWENQVGHRKIRPHNIATGDYPPRPQKQYPINPKAKPSIQIVIDDLLKQGVLTPQNSTMNTPVYPVPKPDGRWRMVLDYREVNKTIPLTAAQNQHSAGILATIVRQKYKTTLDLANGFWAHPITPESYWLTAFTWQGKQYCWTRLPQGFLNSPALFNADVVDLLKEIPNVQVYVDDIYLSHDDPKEHVQQLEKVFQILLQAGYVVSLKKSEIGQKTVEFLGFNITKEGRGLTDTFKTKLLNITPPKDLKQLQSILGLLNFARNFIPNFAELVQPLYNLIAPAKGKYIEWSEENTKQLNMVIEALNTASNLEERLPEQRLVIKVNTSPSAGYVRYYNETGKKPIMYLNYVFSKAELKFSMLEKLLTTMHKALIKAMDLAMGQEILVYSPIVSMTKIQKTPLPERKALPIRWITWMTYLEDPRIQFHYDKTLPELKHIPDVYTSSQSPVKHPSQYEGVFYTDGSAIKSPDPTKSNNAGMGIVHATYKPEYQVLNQWSIPLGNHTAQMAEIAAVEFACKKALKIPGPVLVITDSFYVAESANKELPYWKSNGFVNNKKKPLKHISKWKSIAECLSMKPDITIQHEKGISLQIPVFILKGNALADKLATQGSYVVNAGKRTADGSEFEKRTADGSEFESPKKKAKVE

SEQ ID NO: 1333 - protein, 2174 aa, synthetic construct
MPAAKRVKLDGGDKKYSIGLDIGTNSVGWAVITDEYKVPSKKFKVLGNTDRHSIKKNLIGALLFDSGETAEATRLKRTARRRYTRRKNRICYLQEIFSNEMAKVDDSFFHRLEESFLVEEDKKHERHPIFGNIVDEVAYHEKYPTIYHLRKKLVDSTDKADLRLIYLALAHMIKFRGHFLIEGDLNPDNSDVDKLFIQLVQTYNQLFEENPINASGVDAKAILSARLSKSRRLENLIAQLPGEKKNGLFGNLIALSLGLTPNFKSNFDLAEDAKLQLSKDTYDDDLDNLLAQIGDQYADLFLAAKNLSDAILLSDILRVNTEITKAPLSASMIKRYDEHHQDLTLLKALVRQQLPEKYKEIFFDQSKNGYAGYIDGGASQEEFYKFIKPILEKMDGTEELLVKLNREDLLRKQRTFDNGSIPHQIHLGELHAILRRQEDFYPFLKDNREKIEKILTFRIPYYVGPLARGNSRFAWMTRKSEETITPWNFEEVVDKGASAQSFIERMTNFDKNLPNEKVLPKHSLLYEYFTVYNELTKVKYVTEGMRKPAFLSGEQKKAIVDLLFKTNRKVTVKQLKEDYFKKIECFDSVEISGVEDRFNASLGTYHDLLKIIKDKDFLDNEENEDILEDIVLTLTLFEDREMIEERLKTYAHLFDDKVMKQLKRRRYTGWGRLSRKLINGIRDKQSGKTILDFLKSDGFANRNFMQLIHDDSLTFKEDIQKAQVSGQGDSLHEHIANLAGSPAIKKGILQTVKVVDELVKVMGRHKPENIVIEMARENQTTQKGQKNSRERMKRIEEGIKELGSQILKEHPVENTQLQNEKLYLYYLQNGRDMYVDQELDINRLSDYDVDHIVPQSFLKDDSIDNKVLTRSDKARGKSDNVPSEEVVKKMKNYWRQLLNAKLITQRKFDNLTKAERGGLSELDKAGFIKRQLVETRQITKHVAQILDSRMNTKYDENDKLIREVKVITLKSKLVSDFRKDFQFYKVREINNYHHAHDAYLNAVVGTALIKKYPKLESEFVYGDYKVYDVRKMIAKSEQEIGKATAKYFFYSNIMNFFKTEITLANGEIRKRPLIETNGETGEIVWDKGRDFATVRKVLSMPQVNIVKKTEVQTGGFSKESILPKRNSDKLIARKKDWDPKKYGGFDSPTVAYSVLVVAKVEKGKSKKLKSVKELLGITIMERSSFEKNPIDFLEAKGYKEVKKDLIIKLPKYSLFELENGRKRMLASAGELQKGNELALPSKYVNFLYLASHYEKLKGSPEDNEQKQLFVEQHKHYLDEIIEQISEFSKRVILADANLDKVLSAYNKHRDKPIREQAENIIHLFTLTNLGAPAAFKYFDTTIDRKRYTSTKEVLDATLIHQSITGLYETRIDLSQLGGDGGPAPGSSGGSGGMNPLQLLQPLPAEIKGTKLLAHWNSGATITCIPESFLEDEQPIKKTLIKTIHGEKQQNVYYVTFKVKGRKVEAEVIASPYEYILLSPTDVPWLTQQPLQLTILVPLQEYQEKILSKTALPEDQKQQLKTLFVKYDNLWQHWENQVGHRKIRPHNIATGDYPPRPQKQYPINPKAKPSIQIVIDDLLKQGVLTPQNSTMNTPVYPVPKPDGRWRMVLDYREVNKTIPLTAAQNQHSAGILATIVRQKYKTTLDLANGFWAHPITPESYWLTAFTWQGKQYCWTRLPQGFLNSPALFNADVVDLLKEIPNVQVYVDDIYLSHDDPKEHVQQLEKVFQILLQAGYVVSLKKSEIGQKTVEFLGFNITKEGRGLTDTFKTKLLNITPPKDLKQLQSILGLLNFARNFIPNFAELVQPLYNLIAPAKGKYIEWSEENTKQLNMVIEALNTASNLEERLPEQRLVIKVNTSPSAGYVRYYNETGKKPIMYLNYVFSKAELKFSMLEKLLTTMHKALIKAMDLAMGQEILVYSPIVSMTKIQKTPLPERKALPIRWITWMTYLEDPRIQFHYDKTLPELKHIPDVYTSSQSPVKHPSQYEGVFYTDGSAIKSPDPTKSNNAGMGIVHATYKPEYQVLNQWSIPLGNHTAQMAEIAAVEFACKKALKIPGPVLVITDSFYVAESANKELPYWKSNGFVNNKKKPLKHISKWKSIAECLSMKPDITIQHEKGISLQIPVFILKGNALADKLATQGSYVVNAGKRTADGSEFEKRTADGSEFESPKKKAKVE

SEQ ID NO: 1334 - protein, 2176 aa, synthetic construct
MPAAKRVKLDGGDKKYSIGLDIGTNSVGWAVITDEYKVPSKKFKVLGNTDRHSIKKNLIGALLFDSGETAEATRLKRTARRRYTRRKNRICYLQEIFSNEMAKVDDSFFHRLEESFLVEEDKKHERHPIFGNIVDEVAYHEKYPTIYHLRKKLVDSTDKADLRLIYLALAHMIKFRGHFLIEGDLNPDNSDVDKLFIQLVQTYNQLFEENPINASGVDAKAILSARLSKSRRLENLIAQLPGEKKNGLFGNLIALSLGLTPNFKSNFDLAEDAKLQLSKDTYDDDLDNLLAQIGDQYADLFLAAKNLSDAILLSDILRVNTEITKAPLSASMIKRYDEHHQDLTLLKALVRQQLPEKYKEIFFDQSKNGYAGYIDGGASQEEFYKFIKPILEKMDGTEELLVKLNREDLLRKQRTFDNGSIPHQIHLGELHAILRRQEDFYPFLKDNREKIEKILTFRIPYYVGPLARGNSRFAWMTRKSEETITPWNFEEVVDKGASAQSFIERMTNFDKNLPNEKVLPKHSLLYEYFTVYNELTKVKYVTEGMRKPAFLSGEQKKAIVDLLFKTNRKVTVKQLKEDYFKKIECFDSVEISGVEDRFNASLGTYHDLLKIIKDKDFLDNEENEDILEDIVLTLTLFEDREMIEERLKTYAHLFDDKVMKQLKRRRYTGWGRLSRKLINGIRDKQSGKTILDFLKSDGFANRNFMQLIHDDSLTFKEDIQKAQVSGQGDSLHEHIANLAGSPAIKKGILQTVKVVDELVKVMGRHKPENIVIEMARENQTTQKGQKNSRERMKRIEEGIKELGSQILKEHPVENTQLQNEKLYLYYLQNGRDMYVDQELDINRLSDYDVDHIVPQSFLKDDSIDNKVLTRSDKARGKSDNVPSEEVVKKMKNYWRQLLNAKLITQRKFDNLTKAERGGLSELDKAGFIKRQLVETRQITKHVAQILDSRMNTKYDENDKLIREVKVITLKSKLVSDFRKDFQFYKVREINNYHHAHDAYLNAVVGTALIKKYPKLESEFVYGDYKVYDVRKMIAKSEQEIGKATAKYFFYSNIMNFFKTEITLANGEIRKRPLIETNGETGEIVWDKGRDFATVRKVLSMPQVNIVKKTEVQTGGFSKESILPKRNSDKLIARKKDWDPKKYGGFDSPTVAYSVLVVAKVEKGKSKKLKSVKELLGITIMERSSFEKNPIDFLEAKGYKEVKKDLIIKLPKYSLFELENGRKRMLASAGELQKGNELALPSKYVNFLYLASHYEKLKGSPEDNEQKQLFVEQHKHYLDEIIEQISEFSKRVILADANLDKVLSAYNKHRDKPIREQAENIIHLFTLTNLGAPAAFKYFDTTIDRKRYTSTKEVLDATLIHQSITGLYETRIDLSQLGGDGGEAAAKGGGGGSGGMNPLQLLQPLPAEIKGTKLLAHWNSGATITCIPESFLEDEQPIKKTLIKTIHGEKQQNVYYVTFKVKGRKVEAEVIASPYEYILLSPTDVPWLTQQPLQLTILVPLQEYQEKILSKTALPEDQKQQLKTLFVKYDNLWQHWENQVGHRKIRPHNIATGDYPPRPQKQYPINPKAKPSIQIVIDDLLKQGVLTPQNSTMNTPVYPVPKPDGRWRMVLDYREVNKTIPLTAAQNQHSAGILATIVRQKYKTTLDLANGFWAHPITPESYWLTAFTWQGKQYCWTRLPQGFLNSPALFNADVVDLLKEIPNVQVYVDDIYLSHDDPKEHVQQLEKVFQILLQAGYVVSLKKSEIGQKTVEFLGFNITKEGRGLTDTFKTKLLNITPPKDLKQLQSILGLLNFARNFIPNFAELVQPLYNLIAPAKGKYIEWSEENTKQLNMVIEALNTASNLEERLPEQRLVIKVNTSPSAGYVRYYNETGKKPIMYLNYVFSKAELKFSMLEKLLTTMHKALIKAMDLAMGQEILVYSPIVSMTKIQKTPLPERKALPIRWITWMTYLEDPRIQFHYDKTLPELKHIPDVYTSSQSPVKHPSQYEGVFYTDGSAIKSPDPTKSNNAGMGIVHATYKPEYQVLNQWSIPLGNHTAQMAEIAAVEFACKKALKIPGPVLVITDSFYVAESANKELPYWKSNGFVNNKKKPLKHISKWKSIAECLSMKPDITIQHEKGISLQIPVFILKGNALADKLATQGSYVVNAGKRTADGSEFEKRTADGSEFESPKKKAKVE

SEQ ID NO: 1335 - protein, 2176 aa, synthetic construct
MPAAKRVKLDGGDKKYSIGLDIGTNSVGWAVITDEYKVPSKKFKVLGNTDRHSIKKNLIGALLFDSGETAEATRLKRTARRRYTRRKNRICYLQEIFSNEMAKVDDSFFHRLEESFLVEEDKKHERHPIFGNIVDEVAYHEKYPTIYHLRKKLVDSTDKADLRLIYLALAHMIKFRGHFLIEGDLNPDNSDVDKLFIQLVQTYNQLFEENPINASGVDAKAILSARLSKSRRLENLIAQLPGEKKNGLFGNLIALSLGLTPNFKSNFDLAEDAKLQLSKDTYDDDLDNLLAQIGDQYADLFLAAKNLSDAILLSDILRVNTEITKAPLSASMIKRYDEHHQDLTLLKALVRQQLPEKYKEIFFDQSKNGYAGYIDGGASQEEFYKFIKPILEKMDGTEELLVKLNREDLLRKQRTFDNGSIPHQIHLGELHAILRRQEDFYPFLKDNREKIEKILTFRIPYYVGPLARGNSRFAWMTRKSEETITPWNFEEVVDKGASAQSFIERMTNFDKNLPNEKVLPKHSLLYEYFTVYNELTKVKYVTEGMRKPAFLSGEQKKAIVDLLFKTNRKVTVKQLKEDYFKKIECFDSVEISGVEDRFNASLGTYHDLLKIIKDKDFLDNEENEDILEDIVLTLTLFEDREMIEERLKTYAHLFDDKVMKQLKRRRYTGWGRLSRKLINGIRDKQSGKTILDFLKSDGFANRNFMQLIHDDSLTFKEDIQKAQVSGQGDSLHEHIANLAGSPAIKKGILQTVKVVDELVKVMGRHKPENIVIEMARENQTTQKGQKNSRERMKRIEEGIKELGSQILKEHPVENTQLQNEKLYLYYLQNGRDMYVDQELDINRLSDYDVDHIVPQSFLKDDSIDNKVLTRSDKARGKSDNVPSEEVVKKMKNYWRQLLNAKLITQRKFDNLTKAERGGLSELDKAGFIKRQLVETRQITKHVAQILDSRMNTKYDENDKLIREVKVITLKSKLVSDFRKDFQFYKVREINNYHHAHDAYLNAVVGTALIKKYPKLESEFVYGDYKVYDVRKMIAKSEQEIGKATAKYFFYSNIMNFFKTEITLANGEIRKRPLIETNGETGEIVWDKGRDFATVRKVLSMPQVNIVKKTEVQTGGFSKESILPKRNSDKLIARKKDWDPKKYGGFDSPTVAYSVLVVAKVEKGKSKKLKSVKELLGITIMERSSFEKNPIDFLEAKGYKEVKKDLIIKLPKYSLFELENGRKRMLASAGELQKGNELALPSKYVNFLYLASHYEKLKGSPEDNEQKQLFVEQHKHYLDEIIEQISEFSKRVILADANLDKVLSAYNKHRDKPIREQAENIIHLFTLTNLGAPAAFKYFDTTIDRKRYTSTKEVLDATLIHQSITGLYETRIDLSQLGGDGGEAAAKGGGGSSGGMNPLQLLQPLPAEIKGTKLLAHWNSGATITCIPESFLEDEQPIKKTLIKTIHGEKQQNVYYVTFKVKGRKVEAEVIASPYEYILLSPTDVPWLTQQPLQLTILVPLQEYQEKILSKTALPEDQKQQLKTLFVKYDNLWQHWENQVGHRKIRPHNIATGDYPPRPQKQYPINPKAKPSIQIVIDDLLKQGVLTPQNSTMNTPVYPVPKPDGRWRMVLDYREVNKTIPLTAAQNQHSAGILATIVRQKYKTTLDLANGFWAHPITPESYWLTAFTWQGKQYCWTRLPQGFLNSPALFNADVVDLLKEIPNVQVYVDDIYLSHDDPKEHVQQLEKVFQILLQAGYVVSLKKSEIGQKTVEFLGFNITKEGRGLTDTFKTKLLNITPPKDLKQLQSILGLLNFARNFIPNFAELVQPLYNLIAPAKGKYIEWSEENTKQLNMVIEALNTASNLEERLPEQRLVIKVNTSPSAGYVRYYNETGKKPIMYLNYVFSKAELKFSMLEKLLTTMHKALIKAMDLAMGQEILVYSPIVSMTKIQKTPLPERKALPIRWITWMTYLEDPRIQFHYDKTLPELKHIPDVYTSSQSPVKHPSQYEGVFYTDGSAIKSPDPTKSNNAGMGIVHATYKPEYQVLNQWSIPLGNHTAQMAEIAAVEFACKKALKIPGPVLVITDSFYVAESANKELPYWKSNGFVNNKKKPLKHISKWKSIAECLSMKPDITIQHEKGISLQIPVFILKGNALADKLATQGSYVVNAGKRTADGSEFEKRTADGSEFESPKKKAKVE

SEQ ID NO: 1336 - protein, 2174 aa, synthetic construct
MPAAKRVKLDGGDKKYSIGLDIGTNSVGWAVITDEYKVPSKKFKVLGNTDRHSIKKNLIGALLFDSGETAEATRLKRTARRRYTRRKNRICYLQEIFSNEMAKVDDSFFHRLEESFLVEEDKKHERHPIFGNIVDEVAYHEKYPTIYHLRKKLVDSTDKADLRLIYLALAHMIKFRGHFLIEGDLNPDNSDVDKLFIQLVQTYNQLFEENPINASGVDAKAILSARLSKSRRLENLIAQLPGEKKNGLFGNLIALSLGLTPNFKSNFDLAEDAKLQLSKDTYDDDLDNLLAQIGDQYADLFLAAKNLSDAILLSDILRVNTEITKAPLSASMIKRYDEHHQDLTLLKALVRQQLPEKYKEIFFDQSKNGYAGYIDGGASQEEFYKFIKPILEKMDGTEELLVKLNREDLLRKQRTFDNGSIPHQIHLGELHAILRRQEDFYPFLKDNREKIEKILTFRIPYYVGPLARGNSRFAWMTRKSEETITPWNFEEVVDKGASAQSFIERMTNFDKNLPNEKVLPKHSLLYEYFTVYNELTKVKYVTEGMRKPAFLSGEQKKAIVDLLFKTNRKVTVKQLKEDYFKKIECFDSVEISGVEDRFNASLGTYHDLLKIIKDKDFLDNEENEDILEDIVLTLTLFEDREMIEERLKTYAHLFDDKVMKQLKRRRYTGWGRLSRKLINGIRDKQSGKTILDFLKSDGFANRNFMQLIHDDSLTFKEDIQKAQVSGQGDSLHEHIANLAGSPAIKKGILQTVKVVDELVKVMGRHKPENIVIEMARENQTTQKGQKNSRERMKRIEEGIKELGSQILKEHPVENTQLQNEKLYLYYLQNGRDMYVDQELDINRLSDYDVDHIVPQSFLKDDSIDNKVLTRSDKARGKSDNVPSEEVVKKMKNYWRQLLNAKLITQRKFDNLTKAERGGLSELDKAGFIKRQLVETRQITKHVAQILDSRMNTKYDENDKLIREVKVITLKSKLVSDFRKDFQFYKVREINNYHHAHDAYLNAVVGTALIKKYPKLESEFVYGDYKVYDVRKMIAKSEQEIGKATAKYFFYSNIMNFFKTEITLANGEIRKRPLIETNGETGEIVWDKGRDFATVRKVLSMPQVNIVKKTEVQTGGFSKESILPKRNSDKLIARKKDWDPKKYGGFDSPTVAYSVLVVAKVEKGKSKKLKSVKELLGITIMERSSFEKNPIDFLEAKGYKEVKKDLIIKLPKYSLFELENGRKRMLASAGELQKGNELALPSKYVNFLYLASHYEKLKGSPEDNEQKQLFVEQHKHYLDEIIEQISEFSKRVILADANLDKVLSAYNKHRDKPIREQAENIIHLFTLTNLGAPAAFKYFDTTIDRKRYTSTKEVLDATLIHQSITGLYETRIDLSQLGGDGGGGGGSSPAPGGMNPLQLLQPLPAEIKGTKLLAHWNSGATITCIPESFLEDEQPIKKTLIKTIHGEKQQNVYYVTFKVKGRKVEAEVIASPYEYILLSPTDVPWLTQQPLQLTILVPLQEYQEKILSKTALPEDQKQQLKTLFVKYDNLWQHWENQVGHRKIRPHNIATGDYPPRPQKQYPINPKAKPSIQIVIDDLLKQGVLTPQNSTMNTPVYPVPKPDGRWRMVLDYREVNKTIPLTAAQNQHSAGILATIVRQKYKTTLDLANGFWAHPITPESYWLTAFTWQGKQYCWTRLPQGFLNSPALFNADVVDLLKEIPNVQVYVDDIYLSHDDPKEHVQQLEKVFQILLQAGYVVSLKKSEIGQKTVEFLGFNITKEGRGLTDTFKTKLLNITPPKDLKQLQSILGLLNFARNFIPNFAELVQPLYNLIAPAKGKYIEWSEENTKQLNMVIEALNTASNLEERLPEQRLVIKVNTSPSAGYVRYYNETGKKPIMYLNYVFSKAELKFSMLEKLLTTMHKALIKAMDLAMGQEILVYSPIVSMTKIQKTPLPERKALPIRWITWMTYLEDPRIQFHYDKTLPELKHIPDVYTSSQSPVKHPSQYEGVFYTDGSAIKSPDPTKSNNAGMGIVHATYKPEYQVLNQWSIPLGNHTAQMAEIAAVEFACKKALKIPGPVLVITDSFYVAESANKELPYWKSNGFVNNKKKPLKHISKWKSIAECLSMKPDITIQHEKGISLQIPVFILKGNALADKLATQGSYVVNAGKRTADGSEFEKRTADGSEFESPKKKAKVE

SEQ ID NO: 1337 - protein, 2176 aa, synthetic construct
MPAAKRVKLDGGDKKYSIGLDIGTNSVGWAVITDEYKVPSKKFKVLGNTDRHSIKKNLIGALLFDSGETAEATRLKRTARRRYTRRKNRICYLQEIFSNEMAKVDDSFFHRLEESFLVEEDKKHERHPIFGNIVDEVAYHEKYPTIYHLRKKLVDSTDKADLRLIYLALAHMIKFRGHFLIEGDLNPDNSDVDKLFIQLVQTYNQLFEENPINASGVDAKAILSARLSKSRRLENLIAQLPGEKKNGLFGNLIALSLGLTPNFKSNFDLAEDAKLQLSKDTYDDDLDNLLAQIGDQYADLFLAAKNLSDAILLSDILRVNTEITKAPLSASMIKRYDEHHQDLTLLKALVRQQLPEKYKEIFFDQSKNGYAGYIDGGASQEEFYKFIKPILEKMDGTEELLVKLNREDLLRKQRTFDNGSIPHQIHLGELHAILRRQEDFYPFLKDNREKIEKILTFRIPYYVGPLARGNSRFAWMTRKSEETITPWNFEEVVDKGASAQSFIERMTNFDKNLPNEKVLPKHSLLYEYFTVYNELTKVKYVTEGMRKPAFLSGEQKKAIVDLLFKTNRKVTVKQLKEDYFKKIECFDSVEISGVEDRFNASLGTYHDLLKIIKDKDFLDNEENEDILEDIVLTLTLFEDREMIEERLKTYAHLFDDKVMKQLKRRRYTGWGRLSRKLINGIRDKQSGKTILDFLKSDGFANRNFMQLIHDDSLTFKEDIQKAQVSGQGDSLHEHIANLAGSPAIKKGILQTVKVVDELVKVMGRHKPENIVIEMARENQTTQKGQKNSRERMKRIEEGIKELGSQILKEHPVENTQLQNEKLYLYYLQNGRDMYVDQELDINRLSDYDVDHIVPQSFLKDDSIDNKVLTRSDKARGKSDNVPSEEVVKKMKNYWRQLLNAKLITQRKFDNLTKAERGGLSELDKAGFIKRQLVETRQITKHVAQILDSRMNTKYDENDKLIREVKVITLKSKLVSDFRKDFQFYKVREINNYHHAHDAYLNAVVGTALIKKYPKLESEFVYGDYKVYDVRKMIAKSEQEIGKATAKYFFYSNIMNFFKTEITLANGEIRKRPLIETNGETGEIVWDKGRDFATVRKVLSMPQVNIVKKTEVQTGGFSKESILPKRNSDKLIARKKDWDPKKYGGFDSPTVAYSVLVVAKVEKGKSKKLKSVKELLGITIMERSSFEKNPIDFLEAKGYKEVKKDLIIKLPKYSLFELENGRKRMLASAGELQKGNELALPSKYVNFLYLASHYEKLKGSPEDNEQKQLFVEQHKHYLDEIIEQISEFSKRVILADANLDKVLSAYNKHRDKPIREQAENIIHLFTLTNLGAPAAFKYFDTTIDRKRYTSTKEVLDATLIHQSITGLYETRIDLSQLGGDGGGGGGSSEAAAKGGMNPLQLLQPLPAEIKGTKLLAHWNSGATITCIPESFLEDEQPIKKTLIKTIHGEKQQNVYYVTFKVKGRKVEAEVIASPYEYILLSPTDVPWLTQQPLQLTILVPLQEYQEKILSKTALPEDQKQQLKTLFVKYDNLWQHWENQVGHRKIRPHNIATGDYPPRPQKQYPINPKAKPSIQIVIDDLLKQGVLTPQNSTMNTPVYPVPKPDGRWRMVLDYREVNKTIPLTAAQNQHSAGILATIVRQKYKTTLDLANGFWAHPITPESYWLTAFTWQGKQYCWTRLPQGFLNSPALFNADVVDLLKEIPNVQVYVDDIYLSHDDPKEHVQQLEKVFQILLQAGYVVSLKKSEIGQKTVEFLGFNITKEGRGLTDTFKTKLLNITPPKDLKQLQSILGLLNFARNFIPNFAELVQPLYNLIAPAKGKYIEWSEENTKQLNMVIEALNTASNLEERLPEQRLVIKVNTSPSAGYVRYYNETGKKPIMYLNYVFSKAELKFSMLEKLLTTMHKALIKAMDLAMGQEILVYSPIVSMTKIQKTPLPERKALPIRWITWMTYLEDPRIQFHYDKTLPELKHIPDVYTSSQSPVKHPSQYEGVFYTDGSAIKSPDPTKSNNAGMGIVHATYKPEYQVLNQWSIPLGNHTAQMAEIAAVEFACKKALKIPGPVLVITDSFYVAESANKELPYWKSNGFVNNKKKPLKHISKWKSIAECLSMKPDITIQHEKGISLQIPVFILKGNALADKLATQGSYVVNAGKRTADGSEFEKRTADGSEFESPKKKAKVE

SEQ ID NO: 1338 - protein, 2174 aa, synthetic construct
MPAAKRVKLDGGDKKYSIGLDIGTNSVGWAVITDEYKVPSKKFKVLGNTDRHSIKKNLIGALLFDSGETAEATRLKRTARRRYTRRKNRICYLQEIFSNEMAKVDDSFFHRLEESFLVEEDKKHERHPIFGNIVDEVAYHEKYPTIYHLRKKLVDSTDKADLRLIYLALAHMIKFRGHFLIEGDLNPDNSDVDKLFIQLVQTYNQLFEENPINASGVDAKAILSARLSKSRRLENLIAQLPGEKKNGLFGNLIALSLGLTPNFKSNFDLAEDAKLQLSKDTYDDDLDNLLAQIGDQYADLFLAAKNLSDAILLSDILRVNTEITKAPLSASMIKRYDEHHQDLTLLKALVRQQLPEKYKEIFFDQSKNGYAGYIDGGASQEEFYKFIKPILEKMDGTEELLVKLNREDLLRKQRTFDNGSIPHQIHLGELHAILRRQEDFYPFLKDNREKIEKILTFRIPYYVGPLARGNSRFAWMTRKSEETITPWNFEEVVDKGASAQSFIERMTNFDKNLPNEKVLPKHSLLYEYFTVYNELTKVKYVTEGMRKPAFLSGEQKKAIVDLLFKTNRKVTVKQLKEDYFKKIECFDSVEISGVEDRFNASLGTYHDLLKIIKDKDFLDNEENEDILEDIVLTLTLFEDREMIEERLKTYAHLFDDKVMKQLKRRRYTGWGRLSRKLINGIRDKQSGKTILDFLKSDGFANRNFMQLIHDDSLTFKEDIQKAQVSGQGDSLHEHIANLAGSPAIKKGILQTVKVVDELVKVMGRHKPENIVIEMARENQTTQKGQKNSRERMKRIEEGIKELGSQILKEHPVENTQLQNEKLYLYYLQNGRDMYVDQELDINRLSDYDVDHIVPQSFLKDDSIDNKVLTRSDKARGKSDNVPSEEVVKKMKNYWRQLLNAKLITQRKFDNLTKAERGGLSELDKAGFIKRQLVETRQITKHVAQILDSRMNTKYDENDKLIREVKVITLKSKLVSDFRKDFQFYKVREINNYHHAHDAYLNAVVGTALIKKYPKLESEFVYGDYKVYDVRKMIAKSEQEIGKATAKYFFYSNIMNFFKTEITLANGEIRKRPLIETNGETGEIVWDKGRDFATVRKVLSMPQVNIVKKTEVQTGGFSKESILPKRNSDKLIARKKDWDPKKYGGFDSPTVAYSVLVVAKVEKGKSKKLKSVKELLGITIMERSSFEKNPIDFLEAKGYKEVKKDLIIKLPKYSLFELENGRKRMLASAGELQKGNELALPSKYVNFLYLASHYEKLKGSPEDNEQKQLFVEQHKHYLDEIIEQISEFSKRVILADANLDKVLSAYNKHRDKPIREQAENIIHLFTLTNLGAPAAFKYFDTTIDRKRYTSTKEVLDATLIHQSITGLYETRIDLSQLGGDGGGGGGGSGSSGGMNPLQLLQPLPAEIKGTKLLAHWNSGATITCIPESFLEDEQPIKKTLIKTIHGEKQQNVYYVTFKVKGRKVEAEVIASPYEYILLSPTDVPWLTQQPLQLTILVPLQEYQEKILSKTALPEDQKQQLKTLFVKYDNLWQHWENQVGHRKIRPHNIATGDYPPRPQKQYPINPKAKPSIQIVIDDLLKQGVLTPQNSTMNTPVYPVPKPDGRWRMVLDYREVNKTIPLTAAQNQHSAGILATIVRQKYKTTLDLANGFWAHPITPESYWLTAFTWQGKQYCWTRLPQGFLNSPALFNADVVDLLKEIPNVQVYVDDIYLSHDDPKEHVQQLEKVFQILLQAGYVVSLKKSEIGQKTVEFLGFNITKEGRGLTDTFKTKLLNITPPKDLKQLQSILGLLNFARNFIPNFAELVQPLYNLIAPAKGKYIEWSEENTKQLNMVIEALNTASNLEERLPEQRLVIKVNTSPSAGYVRYYNETGKKPIMYLNYVFSKAELKFSMLEKLLTTMHKALIKAMDLAMGQEILVYSPIVSMTKIQKTPLPERKALPIRWITWMTYLEDPRIQFHYDKTLPELKHIPDVYTSSQSPVKHPSQYEGVFYTDGSAIKSPDPTKSNNAGMGIVHATYKPEYQVLNQWSIPLGNHTAQMAEIAAVEFACKKALKIPGPVLVITDSFYVAESANKELPYWKSNGFVNNKKKPLKHISKWKSIAECLSMKPDITIQHEKGISLQIPVFILKGNALADKLATQGSYVVNAGKRTADGSEFEKRTADGSEFESPKKKAKVE

SEQ ID NO: 1339 - protein, 2176 aa, synthetic construct
MPAAKRVKLDGGDKKYSIGLDIGTNSVGWAVITDEYKVPSKKFKVLGNTDRHSIKKNLIGALLFDSGETAEATRLKRTARRRYTRRKNRICYLQEIFSNEMAKVDDSFFHRLEESFLVEEDKKHERHPIFGNIVDEVAYHEKYPTIYHLRKKLVDSTDKADLRLIYLALAHMIKFRGHFLIEGDLNPDNSDVDKLFIQLVQTYNQLFEENPINASGVDAKAILSARLSKSRRLENLIAQLPGEKKNGLFGNLIALSLGLTPNFKSNFDLAEDAKLQLSKDTYDDDLDNLLAQIGDQYADLFLAAKNLSDAILLSDILRVNTEITKAPLSASMIKRYDEHHQDLTLLKALVRQQLPEKYKEIFFDQSKNGYAGYIDGGASQEEFYKFIKPILEKMDGTEELLVKLNREDLLRKQRTFDNGSIPHQIHLGELHAILRRQEDFYPFLKDNREKIEKILTFRIPYYVGPLARGNSRFAWMTRKSEETITPWNFEEVVDKGASAQSFIERMTNFDKNLPNEKVLPKHSLLYEYFTVYNELTKVKYVTEGMRKPAFLSGEQKKAIVDLLFKTNRKVTVKQLKEDYFKKIECFDSVEISGVEDRFNASLGTYHDLLKIIKDKDFLDNEENEDILEDIVLTLTLFEDREMIEERLKTYAHLFDDKVMKQLKRRRYTGWGRLSRKLINGIRDKQSGKTILDFLKSDGFANRNFMQLIHDDSLTFKEDIQKAQVSGQGDSLHEHIANLAGSPAIKKGILQTVKVVDELVKVMGRHKPENIVIEMARENQTTQKGQKNSRERMKRIEEGIKELGSQILKEHPVENTQLQNEKLYLYYLQNGRDMYVDQELDINRLSDYDVDHIVPQSFLKDDSIDNKVLTRSDKARGKSDNVPSEEVVKKMKNYWRQLLNAKLITQRKFDNLTKAERGGLSELDKAGFIKRQLVETRQITKHVAQILDSRMNTKYDENDKLIREVKVITLKSKLVSDFRKDFQFYKVREINNYHHAHDAYLNAVVGTALIKKYPKLESEFVYGDYKVYDVRKMIAKSEQEIGKATAKYFFYSNIMNFFKTEITLANGEIRKRPLIETNGETGEIVWDKGRDFATVRKVLSMPQVNIVKKTEVQTGGFSKESILPKRNSDKLIARKKDWDPKKYGGFDSPTVAYSVLVVAKVEKGKSKKLKSVKELLGITIMERSSFEKNPIDFLEAKGYKEVKKDLIIKLPKYSLFELENGRKRMLASAGELQKGNELALPSKYVNFLYLASHYEKLKGSPEDNEQKQLFVEQHKHYLDEIIEQISEFSKRVILADANLDKVLSAYNKHRDKPIREQAENIIHLFTLTNLGAPAAFKYFDTTIDRKRYTSTKEVLDATLIHQSITGLYETRIDLSQLGGDGGGGGEAAAKGSSGGMNPLQLLQPLPAEIKGTKLLAHWNSGATITCIPESFLEDEQPIKKTLIKTIHGEKQQNVYYVTFKVKGRKVEAEVIASPYEYILLSPTDVPWLTQQPLQLTILVPLQEYQEKILSKTALPEDQKQQLKTLFVKYDNLWQHWENQVGHRKIRPHNIATGDYPPRPQKQYPINPKAKPSIQIVIDDLLKQGVLTPQNSTMNTPVYPVPKPDGRWRMVLDYREVNKTIPLTAAQNQHSAGILATIVRQKYKTTLDLANGFWAHPITPESYWLTAFTWQGKQYCWTRLPQGFLNSPALFNADVVDLLKEIPNVQVYVDDIYLSHDDPKEHVQQLEKVFQILLQAGYVVSLKKSEIGQKTVEFLGFNITKEGRGLTDTFKTKLLNITPPKDLKQLQSILGLLNFARNFIPNFAELVQPLYNLIAPAKGKYIEWSEENTKQLNMVIEALNTASNLEERLPEQRLVIKVNTSPSAGYVRYYNETGKKPIMYLNYVFSKAELKFSMLEKLLTTMHKALIKAMDLAMGQEILVYSPIVSMTKIQKTPLPERKALPIRWITWMTYLEDPRIQFHYDKTLPELKHIPDVYTSSQSPVKHPSQYEGVFYTDGSAIKSPDPTKSNNAGMGIVHATYKPEYQVLNQWSIPLGNHTAQMAEIAAVEFACKKALKIPGPVLVITDSFYVAESANKELPYWKSNGFVNNKKKPLKHISKWKSIAECLSMKPDITIQHEKGISLQIPVFILKGNALADKLATQGSYVVNAGKRTADGSEFEKRTADGSEFESPKKKAKVE

SEQ ID NO: 1340 - protein, 2171 aa, synthetic construct
MPAAKRVKLDGGDKKYSIGLDIGTNSVGWAVITDEYKVPSKKFKVLGNTDRHSIKKNLIGALLFDSGETAEATRLKRTARRRYTRRKNRICYLQEIFSNEMAKVDDSFFHRLEESFLVEEDKKHERHPIFGNIVDEVAYHEKYPTIYHLRKKLVDSTDKADLRLIYLALAHMIKFRGHFLIEGDLNPDNSDVDKLFIQLVQTYNQLFEENPINASGVDAKAILSARLSKSRRLENLIAQLPGEKKNGLFGNLIALSLGLTPNFKSNFDLAEDAKLQLSKDTYDDDLDNLLAQIGDQYADLFLAAKNLSDAILLSDILRVNTEITKAPLSASMIKRYDEHHQDLTLLKALVRQQLPEKYKEIFFDQSKNGYAGYIDGGASQEEFYKFIKPILEKMDGTEELLVKLNREDLLRKQRTFDNGSIPHQIHLGELHAILRRQEDFYPFLKDNREKIEKILTFRIPYYVGPLARGNSRFAWMTRKSEETITPWNFEEVVDKGASAQSFIERMTNFDKNLPNEKVLPKHSLLYEYFTVYNELTKVKYVTEGMRKPAFLSGEQKKAIVDLLFKTNRKVTVKQLKEDYFKKIECFDSVEISGVEDRFNASLGTYHDLLKIIKDKDFLDNEENEDILEDIVLTLTLFEDREMIEERLKTYAHLFDDKVMKQLKRRRYTGWGRLSRKLINGIRDKQSGKTILDFLKSDGFANRNFMQLIHDDSLTFKEDIQKAQVSGQGDSLHEHIANLAGSPAIKKGILQTVKVVDELVKVMGRHKPENIVIEMARENQTTQKGQKNSRERMKRIEEGIKELGSQILKEHPVENTQLQNEKLYLYYLQNGRDMYVDQELDINRLSDYDVDHIVPQSFLKDDSIDNKVLTRSDKARGKSDNVPSEEVVKKMKNYWRQLLNAKLITQRKFDNLTKAERGGLSELDKAGFIKRQLVETRQITKHVAQILDSRMNTKYDENDKLIREVKVITLKSKLVSDFRKDFQFYKVREINNYHHAHDAYLNAVVGTALIKKYPKLESEFVYGDYKVYDVRKMIAKSEQEIGKATAKYFFYSNIMNFFKTEITLANGEIRKRPLIETNGETGEIVWDKGRDFATVRKVLSMPQVNIVKKTEVQTGGFSKESILPKRNSDKLIARKKDWDPKKYGGFDSPTVAYSVLVVAKVEKGKSKKLKSVKELLGITIMERSSFEKNPIDFLEAKGYKEVKKDLIIKLPKYSLFELENGRKRMLASAGELQKGNELALPSKYVNFLYLASHYEKLKGSPEDNEQKQLFVEQHKHYLDEIIEQISEFSKRVILADANLDKVLSAYNKHRDKPIREQAENIIHLFTLTNLGAPAAFKYFDTTIDRKRYTSTKEVLDATLIHQSITGLYETRIDLSQLGGDGGGSSGGGGGMNPLQLLQPLPAEIKGTKLLAHWNSGATITCIPESFLEDEQPIKKTLIKTIHGEKQQNVYYVTFKVKGRKVEAEVIASPYEYILLSPTDVPWLTQQPLQLTILVPLQEYQEKILSKTALPEDQKQQLKTLFVKYDNLWQHWENQVGHRKIRPHNIATGDYPPRPQKQYPINPKAKPSIQIVIDDLLKQGVLTPQNSTMNTPVYPVPKPDGRWRMVLDYREVNKTIPLTAAQNQHSAGILATIVRQKYKTTLDLANGFWAHPITPESYWLTAFTWQGKQYCWTRLPQGFLNSPALFNADVVDLLKEIPNVQVYVDDIYLSHDDPKEHVQQLEKVFQILLQAGYVVSLKKSEIGQKTVEFLGFNITKEGRGLTDTFKTKLLNITPPKDLKQLQSILGLLNFARNFIPNFAELVQPLYNLIAPAKGKYIEWSEENTKQLNMVIEALNTASNLEERLPEQRLVIKVNTSPSAGYVRYYNETGKKPIMYLNYVFSKAELKFSMLEKLLTTMHKALIKAMDLAMGQEILVYSPIVSMTKIQKTPLPERKALPIRWITWMTYLEDPRIQFHYDKTLPELKHIPDVYTSSQSPVKHPSQYEGVFYTDGSAIKSPDPTKSNNAGMGIVHATYKPEYQVLNQWSIPLGNHTAQMAEIAAVEFACKKALKIPGPVLVITDSFYVAESANKELPYWKSNGFVNNKKKPLKHISKWKSIAECLSMKPDITIQHEKGISLQIPVFILKGNALADKLATQGSYVVNAGKRTADGSEFEKRTADGSEFESPKKKAKVE

SEQ ID NO: 1341 - protein, 2171 aa, synthetic construct
MPAAKRVKLDGGDKKYSIGLDIGTNSVGWAVITDEYKVPSKKFKVLGNTDRHSIKKNLIGALLFDSGETAEATRLKRTARRRYTRRKNRICYLQEIFSNEMAKVDDSFFHRLEESFLVEEDKKHERHPIFGNIVDEVAYHEKYPTIYHLRKKLVDSTDKADLRLIYLALAHMIKFRGHFLIEGDLNPDNSDVDKLFIQLVQTYNQLFEENPINASGVDAKAILSARLSKSRRLENLIAQLPGEKKNGLFGNLIALSLGLTPNFKSNFDLAEDAKLQLSKDTYDDDLDNLLAQIGDQYADLFLAAKNLSDAILLSDILRVNTEITKAPLSASMIKRYDEHHQDLTLLKALVRQQLPEKYKEIFFDQSKNGYAGYIDGGASQEEFYKFIKPILEKMDGTEELLVKLNREDLLRKQRTFDNGSIPHQIHLGELHAILRRQEDFYPFLKDNREKIEKILTFRIPYYVGPLARGNSRFAWMTRKSEETITPWNFEEVVDKGASAQSFIERMTNFDKNLPNEKVLPKHSLLYEYFTVYNELTKVKYVTEGMRKPAFLSGEQKKAIVDLLFKTNRKVTVKQLKEDYFKKIECFDSVEISGVEDRFNASLGTYHDLLKIIKDKDFLDNEENEDILEDIVLTLTLFEDREMIEERLKTYAHLFDDKVMKQLKRRRYTGWGRLSRKLINGIRDKQSGKTILDFLKSDGFANRNFMQLIHDDSLTFKEDIQKAQVSGQGDSLHEHIANLAGSPAIKKGILQTVKVVDELVKVMGRHKPENIVIEMARENQTTQKGQKNSRERMKRIEEGIKELGSQILKEHPVENTQLQNEKLYLYYLQNGRDMYVDQELDINRLSDYDVDHIVPQSFLKDDSIDNKVLTRSDKARGKSDNVPSEEVVKKMKNYWRQLLNAKLITQRKFDNLTKAERGGLSELDKAGFIKRQLVETRQITKHVAQILDSRMNTKYDENDKLIREVKVITLKSKLVSDFRKDFQFYKVREINNYHHAHDAYLNAVVGTALIKKYPKLESEFVYGDYKVYDVRKMIAKSEQEIGKATAKYFFYSNIMNFFKTEITLANGEIRKRPLIETNGETGEIVWDKGRDFATVRKVLSMPQVNIVKKTEVQTGGFSKESILPKRNSDKLIARKKDWDPKKYGGFDSPTVAYSVLVVAKVEKGKSKKLKSVKELLGITIMERSSFEKNPIDFLEAKGYKEVKKDLIIKLPKYSLFELENGRKRMLASAGELQKGNELALPSKYVNFLYLASHYEKLKGSPEDNEQKQLFVEQHKHYLDEIIEQISEFSKRVILADANLDKVLSAYNKHRDKPIREQAENIIHLFTLTNLGAPAAFKYFDTTIDRKRYTSTKEVLDATLIHQSITGLYETRIDLSQLGGDGGGGGGGSGGMNPLQLLQPLPAEIKGTKLLAHWNSGATITCIPESFLEDEQPIKKTLIKTIHGEKQQNVYYVTFKVKGRKVEAEVIASPYEYILLSPTDVPWLTQQPLQLTILVPLQEYQEKILSKTALPEDQKQQLKTLFVKYDNLWQHWENQVGHRKIRPHNIATGDYPPRPQKQYPINPKAKPSIQIVIDDLLKQGVLTPQNSTMNTPVYPVPKPDGRWRMVLDYREVNKTIPLTAAQNQHSAGILATIVRQKYKTTLDLANGFWAHPITPESYWLTAFTWQGKQYCWTRLPQGFLNSPALFNADVVDLLKEIPNVQVYVDDIYLSHDDPKEHVQQLEKVFQILLQAGYVVSLKKSEIGQKTVEFLGFNITKEGRGLTDTFKTKLLNITPPKDLKQLQSILGLLNFARNFIPNFAELVQPLYNLIAPAKGKYIEWSEENTKQLNMVIEALNTASNLEERLPEQRLVIKVNTSPSAGYVRYYNETGKKPIMYLNYVFSKAELKFSMLEKLLTTMHKALIKAMDLAMGQEILVYSPIVSMTKIQKTPLPERKALPIRWITWMTYLEDPRIQFHYDKTLPELKHIPDVYTSSQSPVKHPSQYEGVFYTDGSAIKSPDPTKSNNAGMGIVHATYKPEYQVLNQWSIPLGNHTAQMAEIAAVEFACKKALKIPGPVLVITDSFYVAESANKELPYWKSNGFVNNKKKPLKHISKWKSIAECLSMKPDITIQHEKGISLQIPVFILKGNALADKLATQGSYVVNAGKRTADGSEFEKRTADGSEFESPKKKAKVE

SEQ ID NO: 1342 - protein, 2176 aa, synthetic construct
MPAAKRVKLDGGDKKYSIGLDIGTNSVGWAVITDEYKVPSKKFKVLGNTDRHSIKKNLIGALLFDSGETAEATRLKRTARRRYTRRKNRICYLQEIFSNEMAKVDDSFFHRLEESFLVEEDKKHERHPIFGNIVDEVAYHEKYPTIYHLRKKLVDSTDKADLRLIYLALAHMIKFRGHFLIEGDLNPDNSDVDKLFIQLVQTYNQLFEENPINASGVDAKAILSARLSKSRRLENLIAQLPGEKKNGLFGNLIALSLGLTPNFKSNFDLAEDAKLQLSKDTYDDDLDNLLAQIGDQYADLFLAAKNLSDAILLSDILRVNTEITKAPLSASMIKRYDEHHQDLTLLKALVRQQLPEKYKEIFFDQSKNGYAGYIDGGASQEEFYKFIKPILEKMDGTEELLVKLNREDLLRKQRTFDNGSIPHQIHLGELHAILRRQEDFYPFLKDNREKIEKILTFRIPYYVGPLARGNSRFAWMTRKSEETITPWNFEEVVDKGASAQSFIERMTNFDKNLPNEKVLPKHSLLYEYFTVYNELTKVKYVTEGMRKPAFLSGEQKKAIVDLLFKTNRKVTVKQLKEDYFKKIECFDSVEISGVEDRFNASLGTYHDLLKIIKDKDFLDNEENEDILEDIVLTLTLFEDREMIEERLKTYAHLFDDKVMKQLKRRRYTGWGRLSRKLINGIRDKQSGKTILDFLKSDGFANRNFMQLIHDDSLTFKEDIQKAQVSGQGDSLHEHIANLAGSPAIKKGILQTVKVVDELVKVMGRHKPENIVIEMARENQTTQKGQKNSRERMKRIEEGIKELGSQILKEHPVENTQLQNEKLYLYYLQNGRDMYVDQELDINRLSDYDVDHIVPQSFLKDDSIDNKVLTRSDKARGKSDNVPSEEVVKKMKNYWRQLLNAKLITQRKFDNLTKAERGGLSELDKAGFIKRQLVETRQITKHVAQILDSRMNTKYDENDKLIREVKVITLKSKLVSDFRKDFQFYKVREINNYHHAHDAYLNAVVGTALIKKYPKLESEFVYGDYKVYDVRKMIAKSEQEIGKATAKYFFYSNIMNFFKTEITLANGEIRKRPLIETNGETGEIVWDKGRDFATVRKVLSMPQVNIVKKTEVQTGGFSKESILPKRNSDKLIARKKDWDPKKYGGFDSPTVAYSVLVVAKVEKGKSKKLKSVKELLGITIMERSSFEKNPIDFLEAKGYKEVKKDLIIKLPKYSLFELENGRKRMLASAGELQKGNELALPSKYVNFLYLASHYEKLKGSPEDNEQKQLFVEQHKHYLDEIIEQISEFSKRVILADANLDKVLSAYNKHRDKPIREQAENIIHLFTLTNLGAPAAFKYFDTTIDRKRYTSTKEVLDATLIHQSITGLYETRIDLSQLGGDGGEAAAKGGGPAPGGMNPLQLLQPLPAEIKGTKLLAHWNSGATITCIPESFLEDEQPIKKTLIKTIHGEKQQNVYYVTFKVKGRKVEAEVIASPYEYILLSPTDVPWLTQQPLQLTILVPLQEYQEKILSKTALPEDQKQQLKTLFVKYDNLWQHWENQVGHRKIRPHNIATGDYPPRPQKQYPINPKAKPSIQIVIDDLLKQGVLTPQNSTMNTPVYPVPKPDGRWRMVLDYREVNKTIPLTAAQNQHSAGILATIVRQKYKTTLDLANGFWAHPITPESYWLTAFTWQGKQYCWTRLPQGFLNSPALFNADVVDLLKEIPNVQVYVDDIYLSHDDPKEHVQQLEKVFQILLQAGYVVSLKKSEIGQKTVEFLGFNITKEGRGLTDTFKTKLLNITPPKDLKQLQSILGLLNFARNFIPNFAELVQPLYNLIAPAKGKYIEWSEENTKQLNMVIEALNTASNLEERLPEQRLVIKVNTSPSAGYVRYYNETGKKPIMYLNYVFSKAELKFSMLEKLLTTMHKALIKAMDLAMGQEILVYSPIVSMTKIQKTPLPERKALPIRWITWMTYLEDPRIQFHYDKTLPELKHIPDVYTSSQSPVKHPSQYEGVFYTDGSAIKSPDPTKSNNAGMGIVHATYKPEYQVLNQWSIPLGNHTAQMAEIAAVEFACKKALKIPGPVLVITDSFYVAESANKELPYWKSNGFVNNKKKPLKHISKWKSIAECLSMKPDITIQHEKGISLQIPVFILKGNALADKLATQGSYVVNAGKRTADGSEFEKRTADGSEFESPKKKAKVE

SEQ ID NO: 1343 - protein, 2171 aa, synthetic construct
MPAAKRVKLDGGDKKYSIGLDIGTNSVGWAVITDEYKVPSKKFKVLGNTDRHSIKKNLIGALLFDSGETAEATRLKRTARRRYTRRKNRICYLQEIFSNEMAKVDDSFFHRLEESFLVEEDKKHERHPIFGNIVDEVAYHEKYPTIYHLRKKLVDSTDKADLRLIYLALAHMIKFRGHFLIEGDLNPDNSDVDKLFIQLVQTYNQLFEENPINASGVDAKAILSARLSKSRRLENLIAQLPGEKKNGLFGNLIALSLGLTPNFKSNFDLAEDAKLQLSKDTYDDDLDNLLAQIGDQYADLFLAAKNLSDAILLSDILRVNTEITKAPLSASMIKRYDEHHQDLTLLKALVRQQLPEKYKEIFFDQSKNGYAGYIDGGASQEEFYKFIKPILEKMDGTEELLVKLNREDLLRKQRTFDNGSIPHQIHLGELHAILRRQEDFYPFLKDNREKIEKILTFRIPYYVGPLARGNSRFAWMTRKSEETITPWNFEEVVDKGASAQSFIERMTNFDKNLPNEKVLPKHSLLYEYFTVYNELTKVKYVTEGMRKPAFLSGEQKKAIVDLLFKTNRKVTVKQLKEDYFKKIECFDSVEISGVEDRFNASLGTYHDLLKIIKDKDFLDNEENEDILEDIVLTLTLFEDREMIEERLKTYAHLFDDKVMKQLKRRRYTGWGRLSRKLINGIRDKQSGKTILDFLKSDGFANRNFMQLIHDDSLTFKEDIQKAQVSGQGDSLHEHIANLAGSPAIKKGILQTVKVVDELVKVMGRHKPENIVIEMARENQTTQKGQKNSRERMKRIEEGIKELGSQILKEHPVENTQLQNEKLYLYYLQNGRDMYVDQELDINRLSDYDVDHIVPQSFLKDDSIDNKVLTRSDKARGKSDNVPSEEVVKKMKNYWRQLLNAKLITQRKFDNLTKAERGGLSELDKAGFIKRQLVETRQITKHVAQILDSRMNTKYDENDKLIREVKVITLKSKLVSDFRKDFQFYKVREINNYHHAHDAYLNAVVGTALIKKYPKLESEFVYGDYKVYDVRKMIAKSEQEIGKATAKYFFYSNIMNFFKTEITLANGEIRKRPLIETNGETGEIVWDKGRDFATVRKVLSMPQVNIVKKTEVQTGGFSKESILPKRNSDKLIARKKDWDPKKYGGFDSPTVAYSVLVVAKVEKGKSKKLKSVKELLGITIMERSSFEKNPIDFLEAKGYKEVKKDLIIKLPKYSLFELENGRKRMLASAGELQKGNELALPSKYVNFLYLASHYEKLKGSPEDNEQKQLFVEQHKHYLDEIIEQISEFSKRVILADANLDKVLSAYNKHRDKPIREQAENIIHLFTLTNLGAPAAFKYFDTTIDRKRYTSTKEVLDATLIHQSITGLYETRIDLSQLGGDGGGGGGSSGGMNPLQLLQPLPAEIKGTKLLAHWNSGATITCIPESFLEDEQPIKKTLIKTIHGEKQQNVYYVTFKVKGRKVEAEVIASPYEYILLSPTDVPWLTQQPLQLTILVPLQEYQEKILSKTALPEDQKQQLKTLFVKYDNLWQHWENQVGHRKIRPHNIATGDYPPRPQKQYPINPKAKPSIQIVIDDLLKQGVLTPQNSTMNTPVYPVPKPDGRWRMVLDYREVNKTIPLTAAQNQHSAGILATIVRQKYKTTLDLANGFWAHPITPESYWLTAFTWQGKQYCWTRLPQGFLNSPALFNADVVDLLKEIPNVQVYVDDIYLSHDDPKEHVQQLEKVFQILLQAGYVVSLKKSEIGQKTVEFLGFNITKEGRGLTDTFKTKLLNITPPKDLKQLQSILGLLNFARNFIPNFAELVQPLYNLIAPAKGKYIEWSEENTKQLNMVIEALNTASNLEERLPEQRLVIKVNTSPSAGYVRYYNETGKKPIMYLNYVFSKAELKFSMLEKLLTTMHKALIKAMDLAMGQEILVYSPIVSMTKIQKTPLPERKALPIRWITWMTYLEDPRIQFHYDKTLPELKHIPDVYTSSQSPVKHPSQYEGVFYTDGSAIKSPDPTKSNNAGMGIVHATYKPEYQVLNQWSIPLGNHTAQMAEIAAVEFACKKALKIPGPVLVITDSFYVAESANKELPYWKSNGFVNNKKKPLKHISKWKSIAECLSMKPDITIQHEKGISLQIPVFILKGNALADKLATQGSYVVNAGKRTADGSEFEKRTADGSEFESPKKKAKVE

SEQ ID NO: 1344 - protein, 2174 aa, synthetic construct
MPAAKRVKLDGGDKKYSIGLDIGTNSVGWAVITDEYKVPSKKFKVLGNTDRHSIKKNLIGALLFDSGETAEATRLKRTARRRYTRRKNRICYLQEIFSNEMAKVDDSFFHRLEESFLVEEDKKHERHPIFGNIVDEVAYHEKYPTIYHLRKKLVDSTDKADLRLIYLALAHMIKFRGHFLIEGDLNPDNSDVDKLFIQLVQTYNQLFEENPINASGVDAKAILSARLSKSRRLENLIAQLPGEKKNGLFGNLIALSLGLTPNFKSNFDLAEDAKLQLSKDTYDDDLDNLLAQIGDQYADLFLAAKNLSDAILLSDILRVNTEITKAPLSASMIKRYDEHHQDLTLLKALVRQQLPEKYKEIFFDQSKNGYAGYIDGGASQEEFYKFIKPILEKMDGTEELLVKLNREDLLRKQRTFDNGSIPHQIHLGELHAILRRQEDFYPFLKDNREKIEKILTFRIPYYVGPLARGNSRFAWMTRKSEETITPWNFEEVVDKGASAQSFIERMTNFDKNLPNEKVLPKHSLLYEYFTVYNELTKVKYVTEGMRKPAFLSGEQKKAIVDLLFKTNRKVTVKQLKEDYFKKIECFDSVEISGVEDRFNASLGTYHDLLKIIKDKDFLDNEENEDILEDIVLTLTLFEDREMIEERLKTYAHLFDDKVMKQLKRRRYTGWGRLSRKLINGIRDKQSGKTILDFLKSDGFANRNFMQLIHDDSLTFKEDIQKAQVSGQGDSLHEHIANLAGSPAIKKGILQTVKVVDELVKVMGRHKPENIVIEMARENQTTQKGQKNSRERMKRIEEGIKELGSQILKEHPVENTQLQNEKLYLYYLQNGRDMYVDQELDINRLSDYDVDHIVPQSFLKDDSIDNKVLTRSDKARGKSDNVPSEEVVKKMKNYWRQLLNAKLITQRKFDNLTKAERGGLSELDKAGFIKRQLVETRQITKHVAQILDSRMNTKYDENDKLIREVKVITLKSKLVSDFRKDFQFYKVREINNYHHAHDAYLNAVVGTALIKKYPKLESEFVYGDYKVYDVRKMIAKSEQEIGKATAKYFFYSNIMNFFKTEITLANGEIRKRPLIETNGETGEIVWDKGRDFATVRKVLSMPQVNIVKKTEVQTGGFSKESILPKRNSDKLIARKKDWDPKKYGGFDSPTVAYSVLVVAKVEKGKSKKLKSVKELLGITIMERSSFEKNPIDFLEAKGYKEVKKDLIIKLPKYSLFELENGRKRMLASAGELQKGNELALPSKYVNFLYLASHYEKLKGSPEDNEQKQLFVEQHKHYLDEIIEQISEFSKRVILADANLDKVLSAYNKHRDKPIREQAENIIHLFTLTNLGAPAAFKYFDTTIDRKRYTSTKEVLDATLIHQSITGLYETRIDLSQLGGDGGGSSGSSGSSGGMNPLQLLQPLPAEIKGTKLLAHWNSGATITCIPESFLEDEQPIKKTLIKTIHGEKQQNVYYVTFKVKGRKVEAEVIASPYEYILLSPTDVPWLTQQPLQLTILVPLQEYQEKILSKTALPEDQKQQLKTLFVKYDNLWQHWENQVGHRKIRPHNIATGDYPPRPQKQYPINPKAKPSIQIVIDDLLKQGVLTPQNSTMNTPVYPVPKPDGRWRMVLDYREVNKTIPLTAAQNQHSAGILATIVRQKYKTTLDLANGFWAHPITPESYWLTAFTWQGKQYCWTRLPQGFLNSPALFNADVVDLLKEIPNVQVYVDDIYLSHDDPKEHVQQLEKVFQILLQAGYVVSLKKSEIGQKTVEFLGFNITKEGRGLTDTFKTKLLNITPPKDLKQLQSILGLLNFARNFIPNFAELVQPLYNLIAPAKGKYIEWSEENTKQLNMVIEALNTASNLEERLPEQRLVIKVNTSPSAGYVRYYNETGKKPIMYLNYVFSKAELKFSMLEKLLTTMHKALIKAMDLAMGQEILVYSPIVSMTKIQKTPLPERKALPIRWITWMTYLEDPRIQFHYDKTLPELKHIPDVYTSSQSPVKHPSQYEGVFYTDGSAIKSPDPTKSNNAGMGIVHATYKPEYQVLNQWSIPLGNHTAQMAEIAAVEFACKKALKIPGPVLVITDSFYVAESANKELPYWKSNGFVNNKKKPLKHISKWKSIAECLSMKPDITIQHEKGISLQIPVFILKGNALADKLATQGSYVVNAGKRTADGSEFEKRTADGSEFESPKKKAKVE

SEQ ID NO: 1345 - protein, 2171 aa, synthetic construct
MPAAKRVKLDGGDKKYSIGLDIGTNSVGWAVITDEYKVPSKKFKVLGNTDRHSIKKNLIGALLFDSGETAEATRLKRTARRRYTRRKNRICYLQEIFSNEMAKVDDSFFHRLEESFLVEEDKKHERHPIFGNIVDEVAYHEKYPTIYHLRKKLVDSTDKADLRLIYLALAHMIKFRGHFLIEGDLNPDNSDVDKLFIQLVQTYNQLFEENPINASGVDAKAILSARLSKSRRLENLIAQLPGEKKNGLFGNLIALSLGLTPNFKSNFDLAEDAKLQLSKDTYDDDLDNLLAQIGDQYADLFLAAKNLSDAILLSDILRVNTEITKAPLSASMIKRYDEHHQDLTLLKALVRQQLPEKYKEIFFDQSKNGYAGYIDGGASQEEFYKFIKPILEKMDGTEELLVKLNREDLLRKQRTFDNGSIPHQIHLGELHAILRRQEDFYPFLKDNREKIEKILTFRIPYYVGPLARGNSRFAWMTRKSEETITPWNFEEVVDKGASAQSFIERMTNFDKNLPNEKVLPKHSLLYEYFTVYNELTKVKYVTEGMRKPAFLSGEQKKAIVDLLFKTNRKVTVKQLKEDYFKKIECFDSVEISGVEDRFNASLGTYHDLLKIIKDKDFLDNEENEDILEDIVLTLTLFEDREMIEERLKTYAHLFDDKVMKQLKRRRYTGWGRLSRKLINGIRDKQSGKTILDFLKSDGFANRNFMQLIHDDSLTFKEDIQKAQVSGQGDSLHEHIANLAGSPAIKKGILQTVKVVDELVKVMGRHKPENIVIEMARENQTTQKGQKNSRERMKRIEEGIKELGSQILKEHPVENTQLQNEKLYLYYLQNGRDMYVDQELDINRLSDYDVDHIVPQSFLKDDSIDNKVLTRSDKARGKSDNVPSEEVVKKMKNYWRQLLNAKLITQRKFDNLTKAERGGLSELDKAGFIKRQLVETRQITKHVAQILDSRMNTKYDENDKLIREVKVITLKSKLVSDFRKDFQFYKVREINNYHHAHDAYLNAVVGTALIKKYPKLESEFVYGDYKVYDVRKMIAKSEQEIGKATAKYFFYSNIMNFFKTEITLANGEIRKRPLIETNGETGEIVWDKGRDFATVRKVLSMPQVNIVKKTEVQTGGFSKESILPKRNSDKLIARKKDWDPKKYGGFDSPTVAYSVLVVAKVEKGKSKKLKSVKELLGITIMERSSFEKNPIDFLEAKGYKEVKKDLIIKLPKYSLFELENGRKRMLASAGELQKGNELALPSKYVNFLYLASHYEKLKGSPEDNEQKQLFVEQHKHYLDEIIEQISEFSKRVILADANLDKVLSAYNKHRDKPIREQAENIIHLFTLTNLGAPAAFKYFDTTIDRKRYTSTKEVLDATLIHQSITGLYETRIDLSQLGGDGGPAPGGGGGMNPLQLLQPLPAEIKGTKLLAHWNSGATITCIPESFLEDEQPIKKTLIKTIHGEKQQNVYYVTFKVKGRKVEAEVIASPYEYILLSPTDVPWLTQQPLQLTILVPLQEYQEKILSKTALPEDQKQQLKTLFVKYDNLWQHWENQVGHRKIRPHNIATGDYPPRPQKQYPINPKAKPSIQIVIDDLLKQGVLTPQNSTMNTPVYPVPKPDGRWRMVLDYREVNKTIPLTAAQNQHSAGILATIVRQKYKTTLDLANGFWAHPITPESYWLTAFTWQGKQYCWTRLPQGFLNSPALFNADVVDLLKEIPNVQVYVDDIYLSHDDPKEHVQQLEKVFQILLQAGYVVSLKKSEIGQKTVEFLGFNITKEGRGLTDTFKTKLLNITPPKDLKQLQSILGLLNFARNFIPNFAELVQPLYNLIAPAKGKYIEWSEENTKQLNMVIEALNTASNLEERLPEQRLVIKVNTSPSAGYVRYYNETGKKPIMYLNYVFSKAELKFSMLEKLLTTMHKALIKAMDLAMGQEILVYSPIVSMTKIQKTPLPERKALPIRWITWMTYLEDPRIQFHYDKTLPELKHIPDVYTSSQSPVKHPSQYEGVFYTDGSAIKSPDPTKSNNAGMGIVHATYKPEYQVLNQWSIPLGNHTAQMAEIAAVEFACKKALKIPGPVLVITDSFYVAESANKELPYWKSNGFVNNKKKPLKHISKWKSIAECLSMKPDITIQHEKGISLQIPVFILKGNALADKLATQGSYVVNAGKRTADGSEFEKRTADGSEFESPKKKAKVE

SEQ ID NO: 1346 - protein, 2195 aa, synthetic construct
MPAAKRVKLDGGDKKYSIGLDIGTNSVGWAVITDEYKVPSKKFKVLGNTDRHSIKKNLIGALLFDSGETAEATRLKRTARRRYTRRKNRICYLQEIFSNEMAKVDDSFFHRLEESFLVEEDKKHERHPIFGNIVDEVAYHEKYPTIYHLRKKLVDSTDKADLRLIYLALAHMIKFRGHFLIEGDLNPDNSDVDKLFIQLVQTYNQLFEENPINASGVDAKAILSARLSKSRRLENLIAQLPGEKKNGLFGNLIALSLGLTPNFKSNFDLAEDAKLQLSKDTYDDDLDNLLAQIGDQYADLFLAAKNLSDAILLSDILRVNTEITKAPLSASMIKRYDEHHQDLTLLKALVRQQLPEKYKEIFFDQSKNGYAGYIDGGASQEEFYKFIKPILEKMDGTEELLVKLNREDLLRKQRTFDNGSIPHQIHLGELHAILRRQEDFYPFLKDNREKIEKILTFRIPYYVGPLARGNSRFAWMTRKSEETITPWNFEEVVDKGASAQSFIERMTNFDKNLPNEKVLPKHSLLYEYFTVYNELTKVKYVTEGMRKPAFLSGEQKKAIVDLLFKTNRKVTVKQLKEDYFKKIECFDSVEISGVEDRFNASLGTYHDLLKIIKDKDFLDNEENEDILEDIVLTLTLFEDREMIEERLKTYAHLFDDKVMKQLKRRRYTGWGRLSRKLINGIRDKQSGKTILDFLKSDGFANRNFMQLIHDDSLTFKEDIQKAQVSGQGDSLHEHIANLAGSPAIKKGILQTVKVVDELVKVMGRHKPENIVIEMARENQTTQKGQKNSRERMKRIEEGIKELGSQILKEHPVENTQLQNEKLYLYYLQNGRDMYVDQELDINRLSDYDVDHIVPQSFLKDDSIDNKVLTRSDKARGKSDNVPSEEVVKKMKNYWRQLLNAKLITQRKFDNLTKAERGGLSELDKAGFIKRQLVETRQITKHVAQILDSRMNTKYDENDKLIREVKVITLKSKLVSDFRKDFQFYKVREINNYHHAHDAYLNAVVGTALIKKYPKLESEFVYGDYKVYDVRKMIAKSEQEIGKATAKYFFYSNIMNFFKTEITLANGEIRKRPLIETNGETGEIVWDKGRDFATVRKVLSMPQVNIVKKTEVQTGGFSKESILPKRNSDKLIARKKDWDPKKYGGFDSPTVAYSVLVVAKVEKGKSKKLKSVKELLGITIMERSSFEKNPIDFLEAKGYKEVKKDLIIKLPKYSLFELENGRKRMLASAGELQKGNELALPSKYVNFLYLASHYEKLKGSPEDNEQKQLFVEQHKHYLDEIIEQISEFSKRVILADANLDKVLSAYNKHRDKPIREQAENIIHLFTLTNLGAPAAFKYFDTTIDRKRYTSTKEVLDATLIHQSITGLYETRIDLSQLGGDGGEAAAKEAAAKEAAAKEAAAKEAAAKEAAAKGGMNPLQLLQPLPAEIKGTKLLAHWNSGATITCIPESFLEDEQPIKKTLIKTIHGEKQQNVYYVTFKVKGRKVEAEVIASPYEYILLSPTDVPWLTQQPLQLTILVPLQEYQEKILSKTALPEDQKQQLKTLFVKYDNLWQHWENQVGHRKIRPHNIATGDYPPRPQKQYPINPKAKPSIQIVIDDLLKQGVLTPQNSTMNTPVYPVPKPDGRWRMVLDYREVNKTIPLTAAQNQHSAGILATIVRQKYKTTLDLANGFWAHPITPESYWLTAFTWQGKQYCWTRLPQGFLNSPALFNADVVDLLKEIPNVQVYVDDIYLSHDDPKEHVQQLEKVFQILLQAGYVVSLKKSEIGQKTVEFLGFNITKEGRGLTDTFKTKLLNITPPKDLKQLQSILGKLNFARNFIPNFAELVQPLYNLIAPAKGKYIEWSEENTKQLNMVIEALNTASNLEERLPEQRLVIKVNTSPSAGYVRYYNETGKKPIMYLNYVFSKAELKFSMLEKLLTTMHKALIKAMDLAMGQEILVYSPIVSMTKIQKTPLPERKALPIRWITWMTYLEDPRIQFHYDKTLPELKHIPDVYTSSQSPVKHPSQYEGVFYTDGSAIKSPDPTKSNNAGMGIVHATYKPEYQVLNQWSIPLGNHTAQMAEIAAVEFACKKALKIPGPVLVITDSFYVAESANKELPYWKSNGFVNNKKKPLKHISKWKSIAECLSMKPDITIQHEKGISLQIPVFILKGNALADKLATQGSYVVNAGKRTADGSEFEKRTADGSEFESPKKKAKVE

SEQ ID NO: 1347 - protein, 2185 aa, synthetic construct
MPAAKRVKLDGGDKKYSIGLDIGTNSVGWAVITDEYKVPSKKFKVLGNTDRHSIKKNLIGALLFDSGETAEATRLKRTARRRYTRRKNRICYLQEIFSNEMAKVDDSFFHRLEESFLVEEDKKHERHPIFGNIVDEVAYHEKYPTIYHLRKKLVDSTDKADLRLIYLALAHMIKFRGHFLIEGDLNPDNSDVDKLFIQLVQTYNQLFEENPINASGVDAKAILSARLSKSRRLENLIAQLPGEKKNGLFGNLIALSLGLTPNFKSNFDLAEDAKLQLSKDTYDDDLDNLLAQIGDQYADLFLAAKNLSDAILLSDILRVNTEITKAPLSASMIKRYDEHHQDLTLLKALVRQQLPEKYKEIFFDQSKNGYAGYIDGGASQEEFYKFIKPILEKMDGTEELLVKLNREDLLRKQRTFDNGSIPHQIHLGELHAILRRQEDFYPFLKDNREKIEKILTFRIPYYVGPLARGNSRFAWMTRKSEETITPWNFEEVVDKGASAQSFIERMTNFDKNLPNEKVLPKHSLLYEYFTVYNELTKVKYVTEGMRKPAFLSGEQKKAIVDLLFKTNRKVTVKQLKEDYFKKIECFDSVEISGVEDRFNASLGTYHDLLKIIKDKDFLDNEENEDILEDIVLTLTLFEDREMIEERLKTYAHLFDDKVMKQLKRRRYTGWGRLSRKLINGIRDKQSGKTILDFLKSDGFANRNFMQLIHDDSLTFKEDIQKAQVSGQGDSLHEHIANLAGSPAIKKGILQTVKVVDELVKVMGRHKPENIVIEMARENQTTQKGQKNSRERMKRIEEGIKELGSQILKEHPVENTQLQNEKLYLYYLQNGRDMYVDQELDINRLSDYDVDHIVPQSFLKDDSIDNKVLTRSDKARGKSDNVPSEEVVKKMKNYWRQLLNAKLITQRKFDNLTKAERGGLSELDKAGFIKRQLVETRQITKHVAQILDSRMNTKYDENDKLIREVKVITLKSKLVSDFRKDFQFYKVREINNYHHAHDAYLNAVVGTALIKKYPKLESEFVYGDYKVYDVRKMIAKSEQEIGKATAKYFFYSNIMNFFKTEITLANGEIRKRPLIETNGETGEIVWDKGRDFATVRKVLSMPQVNIVKKTEVQTGGFSKESILPKRNSDKLIARKKDWDPKKYGGFDSPTVAYSVLVVAKVEKGKSKKLKSVKELLGITIMERSSFEKNPIDFLEAKGYKEVKKDLIIKLPKYSLFELENGRKRMLASAGELQKGNELALPSKYVNFLYLASHYEKLKGSPEDNEQKQLFVEQHKHYLDEIIEQISEFSKRVILADANLDKVLSAYNKHRDKPIREQAENIIHLFTLTNLGAPAAFKYFDTTIDRKRYTSTKEVLDATLIHQSITGLYETRIDLSQLGGDGGEAAAKEAAAKEAAAKEAAAKGGMNPLQLLQPLPAEIKGTKLLAHWNSGATITCIPESFLEDEQPIKKTLIKTIHGEKQQNVYYVTFKVKGRKVEAEVIASPYEYILLSPTDVPWLTQQPLQLTILVPLQEYQEKILSKTALPEDQKQQLKTLFVKYDNLWQHWENQVGHRKIRPHNIATGDYPPRPQKQYPINPKAKPSIQIVIDDLLKQGVLTPQNSTMNTPVYPVPKPDGRWRMVLDYREVNKTIPLTAAQNQHSAGILATIVRQKYKTTLDLANGFWAHPITPESYWLTAFTWQGKQYCWTRLPQGFLNSPALFNADVVDLLKEIPNVQVYVDDIYLSHDDPKEHVQQLEKVFQILLQAGYVVSLKKSEIGQKTVEFLGFNITKEGRGLTDTFKTKLLNITPPKDLKQLQSILGKLNFARNFIPNFAELVQPLYNLIAPAKGKYIEWSEENTKQLNMVIEALNTASNLEERLPEQRLVIKVNTSPSAGYVRYYNETGKKPIMYLNYVFSKAELKFSMLEKLLTTMHKALIKAMDLAMGQEILVYSPIVSMTKIQKTPLPERKALPIRWITWMTYLEDPRIQFHYDKTLPELKHIPDVYTSSQSPVKHPSQYEGVFYTDGSAIKSPDPTKSNNAGMGIVHATYKPEYQVLNQWSIPLGNHTAQMAEIAAVEFACKKALKIPGPVLVITDSFYVAESANKELPYWKSNGFVNNKKKPLKHISKWKSIAECLSMKPDITIQHEKGISLQIPVFILKGNALADKLATQGSYVVNAGKRTADGSEFEKRTADGSEFESPKKKAKVE

SEQ ID NO: 1348 - protein, 2176 aa, synthetic construct
MPAAKRVKLDGGDKKYSIGLDIGTNSVGWAVITDEYKVPSKKFKVLGNTDRHSIKKNLIGALLFDSGETAEATRLKRTARRRYTRRKNRICYLQEIFSNEMAKVDDSFFHRLEESFLVEEDKKHERHPIFGNIVDEVAYHEKYPTIYHLRKKLVDSTDKADLRLIYLALAHMIKFRGHFLIEGDLNPDNSDVDKLFIQLVQTYNQLFEENPINASGVDAKAILSARLSKSRRLENLIAQLPGEKKNGLFGNLIALSLGLTPNFKSNFDLAEDAKLQLSKDTYDDDLDNLLAQIGDQYADLFLAAKNLSDAILLSDILRVNTEITKAPLSASMIKRYDEHHQDLTLLKALVRQQLPEKYKEIFFDQSKNGYAGYIDGGASQEEFYKFIKPILEKMDGTEELLVKLNREDLLRKQRTFDNGSIPHQIHLGELHAILRRQEDFYPFLKDNREKIEKILTFRIPYYVGPLARGNSRFAWMTRKSEETITPWNFEEVVDKGASAQSFIERMTNFDKNLPNEKVLPKHSLLYEYFTVYNELTKVKYVTEGMRKPAFLSGEQKKAIVDLLFKTNRKVTVKQLKEDYFKKIECFDSVEISGVEDRFNASLGTYHDLLKIIKDKDFLDNEENEDILEDIVLTLTLFEDREMIEERLKTYAHLFDDKVMKQLKRRRYTGWGRLSRKLINGIRDKQSGKTILDFLKSDGFANRNFMQLIHDDSLTFKEDIQKAQVSGQGDSLHEHIANLAGSPAIKKGILQTVKVVDELVKVMGRHKPENIVIEMARENQTTQKGQKNSRERMKRIEEGIKELGSQILKEHPVENTQLQNEKLYLYYLQNGRDMYVDQELDINRLSDYDVDHIVPQSFLKDDSIDNKVLTRSDKARGKSDNVPSEEVVKKMKNYWRQLLNAKLITQRKFDNLTKAERGGLSELDKAGFIKRQLVETRQITKHVAQILDSRMNTKYDENDKLIREVKVITLKSKLVSDFRKDFQFYKVREINNYHHAHDAYLNAVVGTALIKKYPKLESEFVYGDYKVYDVRKMIAKSEQEIGKATAKYFFYSNIMNFFKTEITLANGEIRKRPLIETNGETGEIVWDKGRDFATVRKVLSMPQVNIVKKTEVQTGGFSKESILPKRNSDKLIARKKDWDPKKYGGFDSPTVAYSVLVVAKVEKGKSKKLKSVKELLGITIMERSSFEKNPIDFLEAKGYKEVKKDLIIKLPKYSLFELENGRKRMLASAGELQKGNELALPSKYVNFLYLASHYEKLKGSPEDNEQKQLFVEQHKHYLDEIIEQISEFSKRVILADANLDKVLSAYNKHRDKPIREQAENIIHLFTLTNLGAPAAFKYFDTTIDRKRYTSTKEVLDATLIHQSITGLYETRIDLSQLGGDGGGGSPAPEAAAKGGMNPLQLLQPLPAEIKGTKLLAHWNSGATITCIPESFLEDEQPIKKTLIKTIHGEKQQNVYYVTFKVKGRKVEAEVIASPYEYILLSPTDVPWLTQQPLQLTILVPLQEYQEKILSKTALPEDQKQQLKTLFVKYDNLWQHWENQVGHRKIRPHNIATGDYPPRPQKQYPINPKAKPSIQIVIDDLLKQGVLTPQNSTMNTPVYPVPKPDGRWRMVLDYREVNKTIPLTAAQNQHSAGILATIVRQKYKTTLDLANGFWAHPITPESYWLTAFTWQGKQYCWTRLPQGFLNSPALFNADVVDLLKEIPNVQVYVDDIYLSHDDPKEHVQQLEKVFQILLQAGYVVSLKKSEIGQKTVEFLGFNITKEGRGLTDTFKTKLLNITPPKDLKQLQSILGKLNFARNFIPNFAELVQPLYNLIAPAKGKYIEWSEENTKQLNMVIEALNTASNLEERLPEQRLVIKVNTSPSAGYVRYYNETGKKPIMYLNYVFSKAELKFSMLEKLLTTMHKALIKAMDLAMGQEILVYSPIVSMTKIQKTPLPERKALPIRWITWMTYLEDPRIQFHYDKTLPELKHIPDVYTSSQSPVKHPSQYEGVFYTDGSAIKSPDPTKSNNAGMGIVHATYKPEYQVLNQWSIPLGNHTAQMAEIAAVEFACKKALKIPGPVLVITDSFYVAESANKELPYWKSNGFVNNKKKPLKHISKWKSIAECLSMKPDITIQHEKGISLQIPVFILKGNALADKLATQGSYVVNAGKRTADGSEFEKRTADGSEFESPKKKAKVE

SEQ ID NO: 1349 - protein, 2177 aa, synthetic construct
MPAAKRVKLDGGDKKYSIGLDIGTNSVGWAVITDEYKVPSKKFKVLGNTDRHSIKKNLIGALLFDSGETAEATRLKRTARRRYTRRKNRICYLQEIFSNEMAKVDDSFFHRLEESFLVEEDKKHERHPIFGNIVDEVAYHEKYPTIYHLRKKLVDSTDKADLRLIYLALAHMIKFRGHFLIEGDLNPDNSDVDKLFIQLVQTYNQLFEENPINASGVDAKAILSARLSKSRRLENLIAQLPGEKKNGLFGNLIALSLGLTPNFKSNFDLAEDAKLQLSKDTYDDDLDNLLAQIGDQYADLFLAAKNLSDAILLSDILRVNTEITKAPLSASMIKRYDEHHQDLTLLKALVRQQLPEKYKEIFFDQSKNGYAGYIDGGASQEEFYKFIKPILEKMDGTEELLVKLNREDLLRKQRTFDNGSIPHQIHLGELHAILRRQEDFYPFLKDNREKIEKILTFRIPYYVGPLARGNSRFAWMTRKSEETITPWNFEEVVDKGASAQSFIERMTNFDKNLPNEKVLPKHSLLYEYFTVYNELTKVKYVTEGMRKPAFLSGEQKKAIVDLLFKTNRKVTVKQLKEDYFKKIECFDSVEISGVEDRFNASLGTYHDLLKIIKDKDFLDNEENEDILEDIVLTLTLFEDREMIEERLKTYAHLFDDKVMKQLKRRRYTGWGRLSRKLINGIRDKQSGKTILDFLKSDGFANRNFMQLIHDDSLTFKEDIQKAQVSGQGDSLHEHIANLAGSPAIKKGILQTVKVVDELVKVMGRHKPENIVIEMARENQTTQKGQKNSRERMKRIEEGIKELGSQILKEHPVENTQLQNEKLYLYYLQNGRDMYVDQELDINRLSDYDVDHIVPQSFLKDDSIDNKVLTRSDKARGKSDNVPSEEVVKKMKNYWRQLLNAKLITQRKFDNLTKAERGGLSELDKAGFIKRQLVETRQITKHVAQILDSRMNTKYDENDKLIREVKVITLKSKLVSDFRKDFQFYKVREINNYHHAHDAYLNAVVGTALIKKYPKLESEFVYGDYKVYDVRKMIAKSEQEIGKATAKYFFYSNIMNFFKTEITLANGEIRKRPLIETNGETGEIVWDKGRDFATVRKVLSMPQVNIVKKTEVQTGGFSKESILPKRNSDKLIARKKDWDPKKYGGFDSPTVAYSVLVVAKVEKGKSKKLKSVKELLGITIMERSSFEKNPIDFLEAKGYKEVKKDLIIKLPKYSLFELENGRKRMLASAGELQKGNELALPSKYVNFLYLASHYEKLKGSPEDNEQKQLFVEQHKHYLDEIIEQISEFSKRVILADANLDKVLSAYNKHRDKPIREQAENIIHLFTLTNLGAPAAFKYFDTTIDRKRYTSTKEVLDATLIHQSITGLYETRIDLSQLGGDGGGSAGSAAGSGEFGGMNPLQLLQPLPAEIKGTKLLAHWNSGATITCIPESFLEDEQPIKKTLIKTIHGEKQQNVYYVTFKVKGRKVEAEVIASPYEYILLSPTDVPWLTQQPLQLTILVPLQEYQEKILSKTALPEDQKQQLKTLFVKYDNLWQHWENQVGHRKIRPHNIATGDYPPRPQKQYPINPKAKPSIQIVIDDLLKQGVLTPQNSTMNTPVYPVPKPDGRWRMVLDYREVNKTIPLTAAQNQHSAGILATIVRQKYKTTLDLANGFWAHPITPESYWLTAFTWQGKQYCWTRLPQGFLNSPALFNADVVDLLKEIPNVQVYVDDIYLSHDDPKEHVQQLEKVFQILLQAGYVVSLKKSEIGQKTVEFLGFNITKEGRGLTDTFKTKLLNITPPKDLKQLQSILGKLNFARNFIPNFAELVQPLYNLIAPAKGKYIEWSEENTKQLNMVIEALNTASNLEERLPEQRLVIKVNTSPSAGYVRYYNETGKKPIMYLNYVFSKAELKFSMLEKLLTTMHKALIKAMDLAMGQEILVYSPIVSMTKIQKTPLPERKALPIRWITWMTYLEDPRIQFHYDKTLPELKHIPDVYTSSQSPVKHPSQYEGVFYTDGSAIKSPDPTKSNNAGMGIVHATYKPEYQVLNQWSIPLGNHTAQMAEIAAVEFACKKALKIPGPVLVITDSFYVAESANKELPYWKSNGFVNNKKKPLKHISKWKSIAECLSMKPDITIQHEKGISLQIPVFILKGNALADKLATQGSYVVNAGKRTADGSEFEKRTADGSEFESPKKKAKVE

SEQ ID NO: 1350 - protein, 2173 aa, synthetic construct
MPAAKRVKLDGGDKKYSIGLDIGTNSVGWAVITDEYKVPSKKFKVLGNTDRHSIKKNLIGALLFDSGETAEATRLKRTARRRYTRRKNRICYLQEIFSNEMAKVDDSFFHRLEESFLVEEDKKHERHPIFGNIVDEVAYHEKYPTIYHLRKKLVDSTDKADLRLIYLALAHMIKFRGHFLIEGDLNPDNSDVDKLFIQLVQTYNQLFEENPINASGVDAKAILSARLSKSRRLENLIAQLPGEKKNGLFGNLIALSLGLTPNFKSNFDLAEDAKLQLSKDTYDDDLDNLLAQIGDQYADLFLAAKNLSDAILLSDILRVNTEITKAPLSASMIKRYDEHHQDLTLLKALVRQQLPEKYKEIFFDQSKNGYAGYIDGGASQEEFYKFIKPILEKMDGTEELLVKLNREDLLRKQRTFDNGSIPHQIHLGELHAILRRQEDFYPFLKDNREKIEKILTFRIPYYVGPLARGNSRFAWMTRKSEETITPWNFEEVVDKGASAQSFIERMTNFDKNLPNEKVLPKHSLLYEYFTVYNELTKVKYVTEGMRKPAFLSGEQKKAIVDLLFKTNRKVTVKQLKEDYFKKIECFDSVEISGVEDRFNASLGTYHDLLKIIKDKDFLDNEENEDILEDIVLTLTLFEDREMIEERLKTYAHLFDDKVMKQLKRRRYTGWGRLSRKLINGIRDKQSGKTILDFLKSDGFANRNFMQLIHDDSLTFKEDIQKAQVSGQGDSLHEHIANLAGSPAIKKGILQTVKVVDELVKVMGRHKPENIVIEMARENQTTQKGQKNSRERMKRIEEGIKELGSQILKEHPVENTQLQNEKLYLYYLQNGRDMYVDQELDINRLSDYDVDHIVPQSFLKDDSIDNKVLTRSDKARGKSDNVPSEEVVKKMKNYWRQLLNAKLITQRKFDNLTKAERGGLSELDKAGFIKRQLVETRQITKHVAQILDSRMNTKYDENDKLIREVKVITLKSKLVSDFRKDFQFYKVREINNYHHAHDAYLNAVVGTALIKKYPKLESEFVYGDYKVYDVRKMIAKSEQEIGKATAKYFFYSNIMNFFKTEITLANGEIRKRPLIETNGETGEIVWDKGRDFATVRKVLSMPQVNIVKKTEVQTGGFSKESILPKRNSDKLIARKKDWDPKKYGGFDSPTVAYSVLVVAKVEKGKSKKLKSVKELLGITIMERSSFEKNPIDFLEAKGYKEVKKDLIIKLPKYSLFELENGRKRMLASAGELQKGNELALPSKYVNFLYLASHYEKLKGSPEDNEQKQLFVEQHKHYLDEIIEQISEFSKRVILADANLDKVLSAYNKHRDKPIREQAENIIHLFTLTNLGAPAAFKYFDTTIDRKRYTSTKEVLDATLIHQSITGLYETRIDLSQLGGDGGGGGEAAAKGGMNPLQLLQPLPAEIKGTKLLAHWNSGATITCIPESFLEDEQPIKKTLIKTIHGEKQQNVYYVTFKVKGRKVEAEVIASPYEYILLSPTDVPWLTQQPLQLTILVPLQEYQEKILSKTALPEDQKQQLKTLFVKYDNLWQHWENQVGHRKIRPHNIATGDYPPRPQKQYPINPKAKPSIQIVIDDLLKQGVLTPQNSTMNTPVYPVPKPDGRWRMVLDYREVNKTIPLTAAQNQHSAGILATIVRQKYKTTLDLANGFWAHPITPESYWLTAFTWQGKQYCWTRLPQGFLNSPALFNADVVDLLKEIPNVQVYVDDIYLSHDDPKEHVQQLEKVFQILLQAGYVVSLKKSEIGQKTVEFLGFNITKEGRGLTDTFKTKLLNITPPKDLKQLQSILGKLNFARNFIPNFAELVQPLYNLIAPAKGKYIEWSEENTKQLNMVIEALNTASNLEERLPEQRLVIKVNTSPSAGYVRYYNETGKKPIMYLNYVFSKAELKFSMLEKLLTTMHKALIKAMDLAMGQEILVYSPIVSMTKIQKTPLPERKALPIRWITWMTYLEDPRIQFHYDKTLPELKHIPDVYTSSQSPVKHPSQYEGVFYTDGSAIKSPDPTKSNNAGMGIVHATYKPEYQVLNQWSIPLGNHTAQMAEIAAVEFACKKALKIPGPVLVITDSFYVAESANKELPYWKSNGFVNNKKKPLKHISKWKSIAECLSMKPDITIQHEKGISLQIPVFILKGNALADKLATQGSYVVNAGKRTADGSEFEKRTADGSEFESPKKKAKVE

SEQ ID NO: 1351 - protein, 2176 aa, synthetic construct
MPAAKRVKLDGGDKKYSIGLDIGTNSVGWAVITDEYKVPSKKFKVLGNTDRHSIKKNLIGALLFDSGETAEATRLKRTARRRYTRRKNRICYLQEIFSNEMAKVDDSFFHRLEESFLVEEDKKHERHPIFGNIVDEVAYHEKYPTIYHLRKKLVDSTDKADLRLIYLALAHMIKFRGHFLIEGDLNPDNSDVDKLFIQLVQTYNQLFEENPINASGVDAKAILSARLSKSRRLENLIAQLPGEKKNGLFGNLIALSLGLTPNFKSNFDLAEDAKLQLSKDTYDDDLDNLLAQIGDQYADLFLAAKNLSDAILLSDILRVNTEITKAPLSASMIKRYDEHHQDLTLLKALVRQQLPEKYKEIFFDQSKNGYAGYIDGGASQEEFYKFIKPILEKMDGTEELLVKLNREDLLRKQRTFDNGSIPHQIHLGELHAILRRQEDFYPFLKDNREKIEKILTFRIPYYVGPLARGNSRFAWMTRKSEETITPWNFEEVVDKGASAQSFIERMTNFDKNLPNEKVLPKHSLLYEYFTVYNELTKVKYVTEGMRKPAFLSGEQKKAIVDLLFKTNRKVTVKQLKEDYFKKIECFDSVEISGVEDRFNASLGTYHDLLKIIKDKDFLDNEENEDILEDIVLTLTLFEDREMIEERLKTYAHLFDDKVMKQLKRRRYTGWGRLSRKLINGIRDKQSGKTILDFLKSDGFANRNFMQLIHDDSLTFKEDIQKAQVSGQGDSLHEHIANLAGSPAIKKGILQTVKVVDELVKVMGRHKPENIVIEMARENQTTQKGQKNSRERMKRIEEGIKELGSQILKEHPVENTQLQNEKLYLYYLQNGRDMYVDQELDINRLSDYDVDHIVPQSFLKDDSIDNKVLTRSDKARGKSDNVPSEEVVKKMKNYWRQLLNAKLITQRKFDNLTKAERGGLSELDKAGFIKRQLVETRQITKHVAQILDSRMNTKYDENDKLIREVKVITLKSKLVSDFRKDFQFYKVREINNYHHAHDAYLNAVVGTALIKKYPKLESEFVYGDYKVYDVRKMIAKSEQEIGKATAKYFFYSNIMNFFKTEITLANGEIRKRPLIETNGETGEIVWDKGRDFATVRKVLSMPQVNIVKKTEVQTGGFSKESILPKRNSDKLIARKKDWDPKKYGGFDSPTVAYSVLVVAKVEKGKSKKLKSVKELLGITIMERSSFEKNPIDFLEAKGYKEVKKDLIIKLPKYSLFELENGRKRMLASAGELQKGNELALPSKYVNFLYLASHYEKLKGSPEDNEQKQLFVEQHKHYLDEIIEQISEFSKRVILADANLDKVLSAYNKHRDKPIREQAENIIHLFTLTNLGAPAAFKYFDTTIDRKRYTSTKEVLDATLIHQSITGLYETRIDLSQLGGDGGGSSGGSEAAAKGGMNPLQLLQPLPAEIKGTKLLAHWNSGATITCIPESFLEDEQPIKKTLIKTIHGEKQQNVYYVTFKVKGRKVEAEVIASPYEYILLSPTDVPWLTQQPLQLTILVPLQEYQEKILSKTALPEDQKQQLKTLFVKYDNLWQHWENQVGHRKIRPHNIATGDYPPRPQKQYPINPKAKPSIQIVIDDLLKQGVLTPQNSTMNTPVYPVPKPDGRWRMVLDYREVNKTIPLTAAQNQHSAGILATIVRQKYKTTLDLANGFWAHPITPESYWLTAFTWQGKQYCWTRLPQGFLNSPALFNADVVDLLKEIPNVQVYVDDIYLSHDDPKEHVQQLEKVFQILLQAGYVVSLKKSEIGQKTVEFLGFNITKEGRGLTDTFKTKLLNITPPKDLKQLQSILGKLNFARNFIPNFAELVQPLYNLIAPAKGKYIEWSEENTKQLNMVIEALNTASNLEERLPEQRLVIKVNTSPSAGYVRYYNETGKKPIMYLNYVFSKAELKFSMLEKLLTTMHKALIKAMDLAMGQEILVYSPIVSMTKIQKTPLPERKALPIRWITWMTYLEDPRIQFHYDKTLPELKHIPDVYTSSQSPVKHPSQYEGVFYTDGSAIKSPDPTKSNNAGMGIVHATYKPEYQVLNQWSIPLGNHTAQMAEIAAVEFACKKALKIPGPVLVITDSFYVAESANKELPYWKSNGFVNNKKKPLKHISKWKSIAECLSMKPDITIQHEKGISLQIPVFILKGNALADKLATQGSYVVNAGKRTADGSEFEKRTADGSEFESPKKKAKVE

SEQ ID NO: 1352 - protein, 2174 aa, synthetic construct
MPAAKRVKLDGGDKKYSIGLDIGTNSVGWAVITDEYKVPSKKFKVLGNTDRHSIKKNLIGALLFDSGETAEATRLKRTARRRYTRRKNRICYLQEIFSNEMAKVDDSFFHRLEESFLVEEDKKHERHPIFGNIVDEVAYHEKYPTIYHLRKKLVDSTDKADLRLIYLALAHMIKFRGHFLIEGDLNPDNSDVDKLFIQLVQTYNQLFEENPINASGVDAKAILSARLSKSRRLENLIAQLPGEKKNGLFGNLIALSLGLTPNFKSNFDLAEDAKLQLSKDTYDDDLDNLLAQIGDQYADLFLAAKNLSDAILLSDILRVNTEITKAPLSASMIKRYDEHHQDLTLLKALVRQQLPEKYKEIFFDQSKNGYAGYIDGGASQEEFYKFIKPILEKMDGTEELLVKLNREDLLRKQRTFDNGSIPHQIHLGELHAILRRQEDFYPFLKDNREKIEKILTFRIPYYVGPLARGNSRFAWMTRKSEETITPWNFEEVVDKGASAQSFIERMTNFDKNLPNEKVLPKHSLLYEYFTVYNELTKVKYVTEGMRKPAFLSGEQKKAIVDLLFKTNRKVTVKQLKEDYFKKIECFDSVEISGVEDRFNASLGTYHDLLKIIKDKDFLDNEENEDILEDIVLTLTLFEDREMIEERLKTYAHLFDDKVMKQLKRRRYTGWGRLSRKLINGIRDKQSGKTILDFLKSDGFANRNFMQLIHDDSLTFKEDIQKAQVSGQGDSLHEHIANLAGSPAIKKGILQTVKVVDELVKVMGRHKPENIVIEMARENQTTQKGQKNSRERMKRIEEGIKELGSQILKEHPVENTQLQNEKLYLYYLQNGRDMYVDQELDINRLSDYDVDHIVPQSFLKDDSIDNKVLTRSDKARGKSDNVPSEEVVKKMKNYWRQLLNAKLITQRKFDNLTKAERGGLSELDKAGFIKRQLVETRQITKHVAQILDSRMNTKYDENDKLIREVKVITLKSKLVSDFRKDFQFYKVREINNYHHAHDAYLNAVVGTALIKKYPKLESEFVYGDYKVYDVRKMIAKSEQEIGKATAKYFFYSNIMNFFKTEITLANGEIRKRPLIETNGETGEIVWDKGRDFATVRKVLSMPQVNIVKKTEVQTGGFSKESILPKRNSDKLIARKKDWDPKKYGGFDSPTVAYSVLVVAKVEKGKSKKLKSVKELLGITIMERSSFEKNPIDFLEAKGYKEVKKDLIIKLPKYSLFELENGRKRMLASAGELQKGNELALPSKYVNFLYLASHYEKLKGSPEDNEQKQLFVEQHKHYLDEIIEQISEFSKRVILADANLDKVLSAYNKHRDKPIREQAENIIHLFTLTNLGAPAAFKYFDTTIDRKRYTSTKEVLDATLIHQSITGLYETRIDLSQLGGDGGGSSPAPGGSGGMNPLQLLQPLPAEIKGTKLLAHWNSGATITCIPESFLEDEQPIKKTLIKTIHGEKQQNVYYVTFKVKGRKVEAEVIASPYEYILLSPTDVPWLTQQPLQLTILVPLQEYQEKILSKTALPEDQKQQLKTLFVKYDNLWQHWENQVGHRKIRPHNIATGDYPPRPQKQYPINPKAKPSIQIVIDDLLKQGVLTPQNSTMNTPVYPVPKPDGRWRMVLDYREVNKTIPLTAAQNQHSAGILATIVRQKYKTTLDLANGFWAHPITPESYWLTAFTWQGKQYCWTRLPQGFLNSPALFNADVVDLLKEIPNVQVYVDDIYLSHDDPKEHVQQLEKVFQILLQAGYVVSLKKSEIGQKTVEFLGFNITKEGRGLTDTFKTKLLNITPPKDLKQLQSILGKLNFARNFIPNFAELVQPLYNLIAPAKGKYIEWSEENTKQLNMVIEALNTASNLEERLPEQRLVIKVNTSPSAGYVRYYNETGKKPIMYLNYVFSKAELKFSMLEKLLTTMHKALIKAMDLAMGQEILVYSPIVSMTKIQKTPLPERKALPIRWITWMTYLEDPRIQFHYDKTLPELKHIPDVYTSSQSPVKHPSQYEGVFYTDGSAIKSPDPTKSNNAGMGIVHATYKPEYQVLNQWSIPLGNHTAQMAEIAAVEFACKKALKIPGPVLVITDSFYVAESANKELPYWKSNGFVNNKKKPLKHISKWKSIAECLSMKPDITIQHEKGISLQIPVFILKGNALADKLATQGSYVVNAGKRTADGSEFEKRTADGSEFESPKKKAKVE

SEQ ID NO: 1353 - protein, 2176 aa, synthetic construct
MPAAKRVKLDGGDKKYSIGLDIGTNSVGWAVITDEYKVPSKKFKVLGNTDRHSIKKNLIGALLFDSGETAEATRLKRTARRRYTRRKNRICYLQEIFSNEMAKVDDSFFHRLEESFLVEEDKKHERHPIFGNIVDEVAYHEKYPTIYHLRKKLVDSTDKADLRLIYLALAHMIKFRGHFLIEGDLNPDNSDVDKLFIQLVQTYNQLFEENPINASGVDAKAILSARLSKSRRLENLIAQLPGEKKNGLFGNLIALSLGLTPNFKSNFDLAEDAKLQLSKDTYDDDLDNLLAQIGDQYADLFLAAKNLSDAILLSDILRVNTEITKAPLSASMIKRYDEHHQDLTLLKALVRQQLPEKYKEIFFDQSKNGYAGYIDGGASQEEFYKFIKPILEKMDGTEELLVKLNREDLLRKQRTFDNGSIPHQIHLGELHAILRRQEDFYPFLKDNREKIEKILTFRIPYYVGPLARGNSRFAWMTRKSEETITPWNFEEVVDKGASAQSFIERMTNFDKNLPNEKVLPKHSLLYEYFTVYNELTKVKYVTEGMRKPAFLSGEQKKAIVDLLFKTNRKVTVKQLKEDYFKKIECFDSVEISGVEDRFNASLGTYHDLLKIIKDKDFLDNEENEDILEDIVLTLTLFEDREMIEERLKTYAHLFDDKVMKQLKRRRYTGWGRLSRKLINGIRDKQSGKTILDFLKSDGFANRNFMQLIHDDSLTFKEDIQKAQVSGQGDSLHEHIANLAGSPAIKKGILQTVKVVDELVKVMGRHKPENIVIEMARENQTTQKGQKNSRERMKRIEEGIKELGSQILKEHPVENTQLQNEKLYLYYLQNGRDMYVDQELDINRLSDYDVDHIVPQSFLKDDSIDNKVLTRSDKARGKSDNVPSEEVVKKMKNYWRQLLNAKLITQRKFDNLTKAERGGLSELDKAGFIKRQLVETRQITKHVAQILDSRMNTKYDENDKLIREVKVITLKSKLVSDFRKDFQFYKVREINNYHHAHDAYLNAVVGTALIKKYPKLESEFVYGDYKVYDVRKMIAKSEQEIGKATAKYFFYSNIMNFFKTEITLANGEIRKRPLIETNGETGEIVWDKGRDFATVRKVLSMPQVNIVKKTEVQTGGFSKESILPKRNSDKLIARKKDWDPKKYGGFDSPTVAYSVLVVAKVEKGKSKKLKSVKELLGITIMERSSFEKNPIDFLEAKGYKEVKKDLIIKLPKYSLFELENGRKRMLASAGELQKGNELALPSKYVNFLYLASHYEKLKGSPEDNEQKQLFVEQHKHYLDEIIEQISEFSKRVILADANLDKVLSAYNKHRDKPIREQAENIIHLFTLTNLGAPAAFKYFDTTIDRKRYTSTKEVLDATLIHQSITGLYETRIDLSQLGGDGGGSSPAPEAAAKGGMNPLQLLQPLPAEIKGTKLLAHWNSGATITCIPESFLEDEQPIKKTLIKTIHGEKQQNVYYVTFKVKGRKVEAEVIASPYEYILLSPTDVPWLTQQPLQLTILVPLQEYQEKILSKTALPEDQKQQLKTLFVKYDNLWQHWENQVGHRKIRPHNIATGDYPPRPQKQYPINPKAKPSIQIVIDDLLKQGVLTPQNSTMNTPVYPVPKPDGRWRMVLDYREVNKTIPLTAAQNQHSAGILATIVRQKYKTTLDLANGFWAHPITPESYWLTAFTWQGKQYCWTRLPQGFLNSPALFNADVVDLLKEIPNVQVYVDDIYLSHDDPKEHVQQLEKVFQILLQAGYVVSLKKSEIGQKTVEFLGFNITKEGRGLTDTFKTKLLNITPPKDLKQLQSILGKLNFARNFIPNFAELVQPLYNLIAPAKGKYIEWSEENTKQLNMVIEALNTASNLEERLPEQRLVIKVNTSPSAGYVRYYNETGKKPIMYLNYVFSKAELKFSMLEKLLTTMHKALIKAMDLAMGQEILVYSPIVSMTKIQKTPLPERKALPIRWITWMTYLEDPRIQFHYDKTLPELKHIPDVYTSSQSPVKHPSQYEGVFYTDGSAIKSPDPTKSNNAGMGIVHATYKPEYQVLNQWSIPLGNHTAQMAEIAAVEFACKKALKIPGPVLVITDSFYVAESANKELPYWKSNGFVNNKKKPLKHISKWKSIAECLSMKPDITIQHEKGISLQIPVFILKGNALADKLATQGSYVVNAGKRTADGSEFEKRTADGSEFESPKKKAKVE

SEQ ID NO: 1354 - protein, 2174 aa, synthetic construct
MPAAKRVKLDGGDKKYSIGLDIGTNSVGWAVITDEYKVPSKKFKVLGNTDRHSIKKNLIGALLFDSGETAEATRLKRTARRRYTRRKNRICYLQEIFSNEMAKVDDSFFHRLEESFLVEEDKKHERHPIFGNIVDEVAYHEKYPTIYHLRKKLVDSTDKADLRLIYLALAHMIKFRGHFLIEGDLNPDNSDVDKLFIQLVQTYNQLFEENPINASGVDAKAILSARLSKSRRLENLIAQLPGEKKNGLFGNLIALSLGLTPNFKSNFDLAEDAKLQLSKDTYDDDLDNLLAQIGDQYADLFLAAKNLSDAILLSDILRVNTEITKAPLSASMIKRYDEHHQDLTLLKALVRQQLPEKYKEIFFDQSKNGYAGYIDGGASQEEFYKFIKPILEKMDGTEELLVKLNREDLLRKQRTFDNGSIPHQIHLGELHAILRRQEDFYPFLKDNREKIEKILTFRIPYYVGPLARGNSRFAWMTRKSEETITPWNFEEVVDKGASAQSFIERMTNFDKNLPNEKVLPKHSLLYEYFTVYNELTKVKYVTEGMRKPAFLSGEQKKAIVDLLFKTNRKVTVKQLKEDYFKKIECFDSVEISGVEDRFNASLGTYHDLLKIIKDKDFLDNEENEDILEDIVLTLTLFEDREMIEERLKTYAHLFDDKVMKQLKRRRYTGWGRLSRKLINGIRDKQSGKTILDFLKSDGFANRNFMQLIHDDSLTFKEDIQKAQVSGQGDSLHEHIANLAGSPAIKKGILQTVKVVDELVKVMGRHKPENIVIEMARENQTTQKGQKNSRERMKRIEEGIKELGSQILKEHPVENTQLQNEKLYLYYLQNGRDMYVDQELDINRLSDYDVDHIVPQSFLKDDSIDNKVLTRSDKARGKSDNVPSEEVVKKMKNYWRQLLNAKLITQRKFDNLTKAERGGLSELDKAGFIKRQLVETRQITKHVAQILDSRMNTKYDENDKLIREVKVITLKSKLVSDFRKDFQFYKVREINNYHHAHDAYLNAVVGTALIKKYPKLESEFVYGDYKVYDVRKMIAKSEQEIGKATAKYFFYSNIMNFFKTEITLANGEIRKRPLIETNGETGEIVWDKGRDFATVRKVLSMPQVNIVKKTEVQTGGFSKESILPKRNSDKLIARKKDWDPKKYGGFDSPTVAYSVLVVAKVEKGKSKKLKSVKELLGITIMERSSFEKNPIDFLEAKGYKEVKKDLIIKLPKYSLFELENGRKRMLASAGELQKGNELALPSKYVNFLYLASHYEKLKGSPEDNEQKQLFVEQHKHYLDEIIEQISEFSKRVILADANLDKVLSAYNKHRDKPIREQAENIIHLFTLTNLGAPAAFKYFDTTIDRKRYTSTKEVLDATLIHQSITGLYETRIDLSQLGGDGGGGSGGGPAPGGMNPLQLLQPLPAEIKGTKLLAHWNSGATITCIPESFLEDEQPIKKTLIKTIHGEKQQNVYYVTFKVKGRKVEAEVIASPYEYILLSPTDVPWLTQQPLQLTILVPLQEYQEKILSKTALPEDQKQQLKTLFVKYDNLWQHWENQVGHRKIRPHNIATGDYPPRPQKQYPINPKAKPSIQIVIDDLLKQGVLTPQNSTMNTPVYPVPKPDGRWRMVLDYREVNKTIPLTAAQNQHSAGILATIVRQKYKTTLDLANGFWAHPITPESYWLTAFTWQGKQYCWTRLPQGFLNSPALFNADVVDLLKEIPNVQVYVDDIYLSHDDPKEHVQQLEKVFQILLQAGYVVSLKKSEIGQKTVEFLGFNITKEGRGLTDTFKTKLLNITPPKDLKQLQSILGKLNFARNFIPNFAELVQPLYNLIAPAKGKYIEWSEENTKQLNMVIEALNTASNLEERLPEQRLVIKVNTSPSAGYVRYYNETGKKPIMYLNYVFSKAELKFSMLEKLLTTMHKALIKAMDLAMGQEILVYSPIVSMTKIQKTPLPERKALPIRWITWMTYLEDPRIQFHYDKTLPELKHIPDVYTSSQSPVKHPSQYEGVFYTDGSAIKSPDPTKSNNAGMGIVHATYKPEYQVLNQWSIPLGNHTAQMAEIAAVEFACKKALKIPGPVLVITDSFYVAESANKELPYWKSNGFVNNKKKPLKHISKWKSIAECLSMKPDITIQHEKGISLQIPVFILKGNALADKLATQGSYVVNAGKRTADGSEFEKRTADGSEFESPKKKAKVE

SEQ ID NO: 1355 - protein, 2176 aa, synthetic construct
MPAAKRVKLDGGDKKYSIGLDIGTNSVGWAVITDEYKVPSKKFKVLGNTDRHSIKKNLIGALLFDSGETAEATRLKRTARRRYTRRKNRICYLQEIFSNEMAKVDDSFFHRLEESFLVEEDKKHERHPIFGNIVDEVAYHEKYPTIYHLRKKLVDSTDKADLRLIYLALAHMIKFRGHFLIEGDLNPDNSDVDKLFIQLVQTYNQLFEENPINASGVDAKAILSARLSKSRRLENLIAQLPGEKKNGLFGNLIALSLGLTPNFKSNFDLAEDAKLQLSKDTYDDDLDNLLAQIGDQYADLFLAAKNLSDAILLSDILRVNTEITKAPLSASMIKRYDEHHQDLTLLKALVRQQLPEKYKEIFFDQSKNGYAGYIDGGASQEEFYKFIKPILEKMDGTEELLVKLNREDLLRKQRTFDNGSIPHQIHLGELHAILRRQEDFYPFLKDNREKIEKILTFRIPYYVGPLARGNSRFAWMTRKSEETITPWNFEEVVDKGASAQSFIERMTNFDKNLPNEKVLPKHSLLYEYFTVYNELTKVKYVTEGMRKPAFLSGEQKKAIVDLLFKTNRKVTVKQLKEDYFKKIECFDSVEISGVEDRFNASLGTYHDLLKIIKDKDFLDNEENEDILEDIVLTLTLFEDREMIEERLKTYAHLFDDKVMKQLKRRRYTGWGRLSRKLINGIRDKQSGKTILDFLKSDGFANRNFMQLIHDDSLTFKEDIQKAQVSGQGDSLHEHIANLAGSPAIKKGILQTVKVVDELVKVMGRHKPENIVIEMARENQTTQKGQKNSRERMKRIEEGIKELGSQILKEHPVENTQLQNEKLYLYYLQNGRDMYVDQELDINRLSDYDVDHIVPQSFLKDDSIDNKVLTRSDKARGKSDNVPSEEVVKKMKNYWRQLLNAKLITQRKFDNLTKAERGGLSELDKAGFIKRQLVETRQITKHVAQILDSRMNTKYDENDKLIREVKVITLKSKLVSDFRKDFQFYKVREINNYHHAHDAYLNAVVGTALIKKYPKLESEFVYGDYKVYDVRKMIAKSEQEIGKATAKYFFYSNIMNFFKTEITLANGEIRKRPLIETNGETGEIVWDKGRDFATVRKVLSMPQVNIVKKTEVQTGGFSKESILPKRNSDKLIARKKDWDPKKYGGFDSPTVAYSVLVVAKVEKGKSKKLKSVKELLGITIMERSSFEKNPIDFLEAKGYKEVKKDLIIKLPKYSLFELENGRKRMLASAGELQKGNELALPSKYVNFLYLASHYEKLKGSPEDNEQKQLFVEQHKHYLDEIIEQISEFSKRVILADANLDKVLSAYNKHRDKPIREQAENIIHLFTLTNLGAPAAFKYFDTTIDRKRYTSTKEVLDATLIHQSITGLYETRIDLSQLGGDGGEAAAKGSSGGSGGMNPLQLLQPLPAEIKGTKLLAHWNSGATITCIPESFLEDEQPIKKTLIKTIHGEKQQNVYYVTFKVKGRKVEAEVIASPYEYILLSPTDVPWLTQQPLQLTILVPLQEYQEKILSKTALPEDQKQQLKTLFVKYDNLWQHWENQVGHRKIRPHNIATGDYPPRPQKQYPINPKAKPSIQIVIDDLLKQGVLTPQNSTMNTPVYPVPKPDGRWRMVLDYREVNKTIPLTAAQNQHSAGILATIVRQKYKTTLDLANGFWAHPITPESYWLTAFTWQGKQYCWTRLPQGFLNSPALFNADVVDLLKEIPNVQVYVDDIYLSHDDPKEHVQQLEKVFQILLQAGYVVSLKKSEIGQKTVEFLGFNITKEGRGLTDTFKTKLLNITPPKDLKQLQSILGKLNFARNFIPNFAELVQPLYNLIAPAKGKYIEWSEENTKQLNMVIEALNTASNLEERLPEQRLVIKVNTSPSAGYVRYYNETGKKPIMYLNYVFSKAELKFSMLEKLLTTMHKALIKAMDLAMGQEILVYSPIVSMTKIQKTPLPERKALPIRWITWMTYLEDPRIQFHYDKTLPELKHIPDVYTSSQSPVKHPSQYEGVFYTDGSAIKSPDPTKSNNAGMGIVHATYKPEYQVLNQWSIPLGNHTAQMAEIAAVEFACKKALKIPGPVLVITDSFYVAESANKELPYWKSNGFVNNKKKPLKHISKWKSIAECLSMKPDITIQHEKGISLQIPVFILKGNALADKLATQGSYVVNAGKRTADGSEFEKRTADGSEFESPKKKAKVE

SEQ ID NO: 1356 - protein, 2172 aa, synthetic construct
MPAAKRVKLDGGDKKYSIGLDIGTNSVGWAVITDEYKVPSKKFKVLGNTDRHSIKKNLIGALLFDSGETAEATRLKRTARRRYTRRKNRICYLQEIFSNEMAKVDDSFFHRLEESFLVEEDKKHERHPIFGNIVDEVAYHEKYPTIYHLRKKLVDSTDKADLRLIYLALAHMIKFRGHFLIEGDLNPDNSDVDKLFIQLVQTYNQLFEENPINASGVDAKAILSARLSKSRRLENLIAQLPGEKKNGLFGNLIALSLGLTPNFKSNFDLAEDAKLQLSKDTYDDDLDNLLAQIGDQYADLFLAAKNLSDAILLSDILRVNTEITKAPLSASMIKRYDEHHQDLTLLKALVRQQLPEKYKEIFFDQSKNGYAGYIDGGASQEEFYKFIKPILEKMDGTEELLVKLNREDLLRKQRTFDNGSIPHQIHLGELHAILRRQEDFYPFLKDNREKIEKILTFRIPYYVGPLARGNSRFAWMTRKSEETITPWNFEEVVDKGASAQSFIERMTNFDKNLPNEKVLPKHSLLYEYFTVYNELTKVKYVTEGMRKPAFLSGEQKKAIVDLLFKTNRKVTVKQLKEDYFKKIECFDSVEISGVEDRFNASLGTYHDLLKIIKDKDFLDNEENEDILEDIVLTLTLFEDREMIEERLKTYAHLFDDKVMKQLKRRRYTGWGRLSRKLINGIRDKQSGKTILDFLKSDGFANRNFMQLIHDDSLTFKEDIQKAQVSGQGDSLHEHIANLAGSPAIKKGILQTVKVVDELVKVMGRHKPENIVIEMARENQTTQKGQKNSRERMKRIEEGIKELGSQILKEHPVENTQLQNEKLYLYYLQNGRDMYVDQELDINRLSDYDVDHIVPQSFLKDDSIDNKVLTRSDKARGKSDNVPSEEVVKKMKNYWRQLLNAKLITQRKFDNLTKAERGGLSELDKAGFIKRQLVETRQITKHVAQILDSRMNTKYDENDKLIREVKVITLKSKLVSDFRKDFQFYKVREINNYHHAHDAYLNAVVGTALIKKYPKLESEFVYGDYKVYDVRKMIAKSEQEIGKATAKYFFYSNIMNFFKTEITLANGEIRKRPLIETNGETGEIVWDKGRDFATVRKVLSMPQVNIVKKTEVQTGGFSKESILPKRNSDKLIARKKDWDPKKYGGFDSPTVAYSVLVVAKVEKGKSKKLKSVKELLGITIMERSSFEKNPIDFLEAKGYKEVKKDLIIKLPKYSLFELENGRKRMLASAGELQKGNELALPSKYVNFLYLASHYEKLKGSPEDNEQKQLFVEQHKHYLDEIIEQISEFSKRVILADANLDKVLSAYNKHRDKPIREQAENIIHLFTLTNLGAPAAFKYFDTTIDRKRYTSTKEVLDATLIHQSITGLYETRIDLSQLGGDGGGGGGGGGGGMNPLQLLQPLPAEIKGTKLLAHWNSGATITCIPESFLEDEQPIKKTLIKTIHGEKQQNVYYVTFKVKGRKVEAEVIASPYEYILLSPTDVPWLTQQPLQLTILVPLQEYQEKILSKTALPEDQKQQLKTLFVKYDNLWQHWENQVGHRKIRPHNIATGDYPPRPQKQYPINPKAKPSIQIVIDDLLKQGVLTPQNSTMNTPVYPVPKPDGRWRMVLDYREVNKTIPLTAAQNQHSAGILATIVRQKYKTTLDLANGFWAHPITPESYWLTAFTWQGKQYCWTRLPQGFLNSPALFNADVVDLLKEIPNVQVYVDDIYLSHDDPKEHVQQLEKVFQILLQAGYVVSLKKSEIGQKTVEFLGFNITKEGRGLTDTFKTKLLNITPPKDLKQLQSILGKLNFARNFIPNFAELVQPLYNLIAPAKGKYIEWSEENTKQLNMVIEALNTASNLEERLPEQRLVIKVNTSPSAGYVRYYNETGKKPIMYLNYVFSKAELKFSMLEKLLTTMHKALIKAMDLAMGQEILVYSPIVSMTKIQKTPLPERKALPIRWITWMTYLEDPRIQFHYDKTLPELKHIPDVYTSSQSPVKHPSQYEGVFYTDGSAIKSPDPTKSNNAGMGIVHATYKPEYQVLNQWSIPLGNHTAQMAEIAAVEFACKKALKIPGPVLVITDSFYVAESANKELPYWKSNGFVNNKKKPLKHISKWKSIAECLSMKPDITIQHEKGISLQIPVFILKGNALADKLATQGSYVVNAGKRTADGSEFEKRTADGSEFESPKKKAKVE

SEQ ID NO: 1357 - protein, 2176 aa, synthetic construct
MPAAKRVKLDGGDKKYSIGLDIGTNSVGWAVITDEYKVPSKKFKVLGNTDRHSIKKNLIGALLFDSGETAEATRLKRTARRRYTRRKNRICYLQEIFSNEMAKVDDSFFHRLEESFLVEEDKKHERHPIFGNIVDEVAYHEKYPTIYHLRKKLVDSTDKADLRLIYLALAHMIKFRGHFLIEGDLNPDNSDVDKLFIQLVQTYNQLFEENPINASGVDAKAILSARLSKSRRLENLIAQLPGEKKNGLFGNLIALSLGLTPNFKSNFDLAEDAKLQLSKDTYDDDLDNLLAQIGDQYADLFLAAKNLSDAILLSDILRVNTEITKAPLSASMIKRYDEHHQDLTLLKALVRQQLPEKYKEIFFDQSKNGYAGYIDGGASQEEFYKFIKPILEKMDGTEELLVKLNREDLLRKQRTFDNGSIPHQIHLGELHAILRRQEDFYPFLKDNREKIEKILTFRIPYYVGPLARGNSRFAWMTRKSEETITPWNFEEVVDKGASAQSFIERMTNFDKNLPNEKVLPKHSLLYEYFTVYNELTKVKYVTEGMRKPAFLSGEQKKAIVDLLFKTNRKVTVKQLKEDYFKKIECFDSVEISGVEDRFNASLGTYHDLLKIIKDKDFLDNEENEDILEDIVLTLTLFEDREMIEERLKTYAHLFDDKVMKQLKRRRYTGWGRLSRKLINGIRDKQSGKTILDFLKSDGFANRNFMQLIHDDSLTFKEDIQKAQVSGQGDSLHEHIANLAGSPAIKKGILQTVKVVDELVKVMGRHKPENIVIEMARENQTTQKGQKNSRERMKRIEEGIKELGSQILKEHPVENTQLQNEKLYLYYLQNGRDMYVDQELDINRLSDYDVDHIVPQSFLKDDSIDNKVLTRSDKARGKSDNVPSEEVVKKMKNYWRQLLNAKLITQRKFDNLTKAERGGLSELDKAGFIKRQLVETRQITKHVAQILDSRMNTKYDENDKLIREVKVITLKSKLVSDFRKDFQFYKVREINNYHHAHDAYLNAVVGTALIKKYPKLESEFVYGDYKVYDVRKMIAKSEQEIGKATAKYFFYSNIMNFFKTEITLANGEIRKRPLIETNGETGEIVWDKGRDFATVRKVLSMPQVNIVKKTEVQTGGFSKESILPKRNSDKLIARKKDWDPKKYGGFDSPTVAYSVLVVAKVEKGKSKKLKSVKELLGITIMERSSFEKNPIDFLEAKGYKEVKKDLIIKLPKYSLFELENGRKRMLASAGELQKGNELALPSKYVNFLYLASHYEKLKGSPEDNEQKQLFVEQHKHYLDEIIEQISEFSKRVILADANLDKVLSAYNKHRDKPIREQAENIIHLFTLTNLGAPAAFKYFDTTIDRKRYTSTKEVLDATLIHQSITGLYETRIDLSQLGGDGGGSSEAAAKGGSGGMNPLQLLQPLPAEIKGTKLLAHWNSGATITCIPESFLEDEQPIKKTLIKTIHGEKQQNVYYVTFKVKGRKVEAEVIASPYEYILLSPTDVPWLTQQPLQLTILVPLQEYQEKILSKTALPEDQKQQLKTLFVKYDNLWQHWENQVGHRKIRPHNIATGDYPPRPQKQYPINPKAKPSIQIVIDDLLKQGVLTPQNSTMNTPVYPVPKPDGRWRMVLDYREVNKTIPLTAAQNQHSAGILATIVRQKYKTTLDLANGFWAHPITPESYWLTAFTWQGKQYCWTRLPQGFLNSPALFNADVVDLLKEIPNVQVYVDDIYLSHDDPKEHVQQLEKVFQILLQAGYVVSLKKSEIGQKTVEFLGFNITKEGRGLTDTFKTKLLNITPPKDLKQLQSILGKLNFARNFIPNFAELVQPLYNLIAPAKGKYIEWSEENTKQLNMVIEALNTASNLEERLPEQRLVIKVNTSPSAGYVRYYNETGKKPIMYLNYVFSKAELKFSMLEKLLTTMHKALIKAMDLAMGQEILVYSPIVSMTKIQKTPLPERKALPIRWITWMTYLEDPRIQFHYDKTLPELKHIPDVYTSSQSPVKHPSQYEGVFYTDGSAIKSPDPTKSNNAGMGIVHATYKPEYQVLNQWSIPLGNHTAQMAEIAAVEFACKKALKIPGPVLVITDSFYVAESANKELPYWKSNGFVNNKKKPLKHISKWKSIAECLSMKPDITIQHEKGISLQIPVFILKGNALADKLATQGSYVVNAGKRTADGSEFEKRTADGSEFESPKKKAKVE

SEQ ID NO: 1358 - protein, 2171 aa, synthetic construct
MPAAKRVKLDGGDKKYSIGLDIGTNSVGWAVITDEYKVPSKKFKVLGNTDRHSIKKNLIGALLFDSGETAEATRLKRTARRRYTRRKNRICYLQEIFSNEMAKVDDSFFHRLEESFLVEEDKKHERHPIFGNIVDEVAYHEKYPTIYHLRKKLVDSTDKADLRLIYLALAHMIKFRGHFLIEGDLNPDNSDVDKLFIQLVQTYNQLFEENPINASGVDAKAILSARLSKSRRLENLIAQLPGEKKNGLFGNLIALSLGLTPNFKSNFDLAEDAKLQLSKDTYDDDLDNLLAQIGDQYADLFLAAKNLSDAILLSDILRVNTEITKAPLSASMIKRYDEHHQDLTLLKALVRQQLPEKYKEIFFDQSKNGYAGYIDGGASQEEFYKFIKPILEKMDGTEELLVKLNREDLLRKQRTFDNGSIPHQIHLGELHAILRRQEDFYPFLKDNREKIEKILTFRIPYYVGPLARGNSRFAWMTRKSEETITPWNFEEVVDKGASAQSFIERMTNFDKNLPNEKVLPKHSLLYEYFTVYNELTKVKYVTEGMRKPAFLSGEQKKAIVDLLFKTNRKVTVKQLKEDYFKKIECFDSVEISGVEDRFNASLGTYHDLLKIIKDKDFLDNEENEDILEDIVLTLTLFEDREMIEERLKTYAHLFDDKVMKQLKRRRYTGWGRLSRKLINGIRDKQSGKTILDFLKSDGFANRNFMQLIHDDSLTFKEDIQKAQVSGQGDSLHEHIANLAGSPAIKKGILQTVKVVDELVKVMGRHKPENIVIEMARENQTTQKGQKNSRERMKRIEEGIKELGSQILKEHPVENTQLQNEKLYLYYLQNGRDMYVDQELDINRLSDYDVDHIVPQSFLKDDSIDNKVLTRSDKARGKSDNVPSEEVVKKMKNYWRQLLNAKLITQRKFDNLTKAERGGLSELDKAGFIKRQLVETRQITKHVAQILDSRMNTKYDENDKLIREVKVITLKSKLVSDFRKDFQFYKVREINNYHHAHDAYLNAVVGTALIKKYPKLESEFVYGDYKVYDVRKMIAKSEQEIGKATAKYFFYSNIMNFFKTEITLANGEIRKRPLIETNGETGEIVWDKGRDFATVRKVLSMPQVNIVKKTEVQTGGFSKESILPKRNSDKLIARKKDWDPKKYGGFDSPTVAYSVLVVAKVEKGKSKKLKSVKELLGITIMERSSFEKNPIDFLEAKGYKEVKKDLIIKLPKYSLFELENGRKRMLASAGELQKGNELALPSKYVNFLYLASHYEKLKGSPEDNEQKQLFVEQHKHYLDEIIEQISEFSKRVILADANLDKVLSAYNKHRDKPIREQAENIIHLFTLTNLGAPAAFKYFDTTIDRKRYTSTKEVLDATLIHQSITGLYETRIDLSQLGGDGGPAPGSSGGMNPLQLLQPLPAEIKGTKLLAHWNSGATITCIPESFLEDEQPIKKTLIKTIHGEKQQNVYYVTFKVKGRKVEAEVIASPYEYILLSPTDVPWLTQQPLQLTILVPLQEYQEKILSKTALPEDQKQQLKTLFVKYDNLWQHWENQVGHRKIRPHNIATGDYPPRPQKQYPINPKAKPSIQIVIDDLLKQGVLTPQNSTMNTPVYPVPKPDGRWRMVLDYREVNKTIPLTAAQNQHSAGILATIVRQKYKTTLDLANGFWAHPITPESYWLTAFTWQGKQYCWTRLPQGFLNSPALFNADVVDLLKEIPNVQVYVDDIYLSHDDPKEHVQQLEKVFQILLQAGYVVSLKKSEIGQKTVEFLGFNITKEGRGLTDTFKTKLLNITPPKDLKQLQSILGKLNFARNFIPNFAELVQPLYNLIAPAKGKYIEWSEENTKQLNMVIEALNTASNLEERLPEQRLVIKVNTSPSAGYVRYYNETGKKPIMYLNYVFSKAELKFSMLEKLLTTMHKALIKAMDLAMGQEILVYSPIVSMTKIQKTPLPERKALPIRWITWMTYLEDPRIQFHYDKTLPELKHIPDVYTSSQSPVKHPSQYEGVFYTDGSAIKSPDPTKSNNAGMGIVHATYKPEYQVLNQWSIPLGNHTAQMAEIAAVEFACKKALKIPGPVLVITDSFYVAESANKELPYWKSNGFVNNKKKPLKHISKWKSIAECLSMKPDITIQHEKGISLQIPVFILKGNALADKLATQGSYVVNAGKRTADGSEFEKRTADGSEFESPKKKAKVE

SEQ ID NO: 1359 - protein, 2176 aa, synthetic construct
MPAAKRVKLDGGDKKYSIGLDIGTNSVGWAVITDEYKVPSKKFKVLGNTDRHSIKKNLIGALLFDSGETAEATRLKRTARRRYTRRKNRICYLQEIFSNEMAKVDDSFFHRLEESFLVEEDKKHERHPIFGNIVDEVAYHEKYPTIYHLRKKLVDSTDKADLRLIYLALAHMIKFRGHFLIEGDLNPDNSDVDKLFIQLVQTYNQLFEENPINASGVDAKAILSARLSKSRRLENLIAQLPGEKKNGLFGNLIALSLGLTPNFKSNFDLAEDAKLQLSKDTYDDDLDNLLAQIGDQYADLFLAAKNLSDAILLSDILRVNTEITKAPLSASMIKRYDEHHQDLTLLKALVRQQLPEKYKEIFFDQSKNGYAGYIDGGASQEEFYKFIKPILEKMDGTEELLVKLNREDLLRKQRTFDNGSIPHQIHLGELHAILRRQEDFYPFLKDNREKIEKILTFRIPYYVGPLARGNSRFAWMTRKSEETITPWNFEEVVDKGASAQSFIERMTNFDKNLPNEKVLPKHSLLYEYFTVYNELTKVKYVTEGMRKPAFLSGEQKKAIVDLLFKTNRKVTVKQLKEDYFKKIECFDSVEISGVEDRFNASLGTYHDLLKIIKDKDFLDNEENEDILEDIVLTLTLFEDREMIEERLKTYAHLFDDKVMKQLKRRRYTGWGRLSRKLINGIRDKQSGKTILDFLKSDGFANRNFMQLIHDDSLTFKEDIQKAQVSGQGDSLHEHIANLAGSPAIKKGILQTVKVVDELVKVMGRHKPENIVIEMARENQTTQKGQKNSRERMKRIEEGIKELGSQILKEHPVENTQLQNEKLYLYYLQNGRDMYVDQELDINRLSDYDVDHIVPQSFLKDDSIDNKVLTRSDKARGKSDNVPSEEVVKKMKNYWRQLLNAKLITQRKFDNLTKAERGGLSELDKAGFIKRQLVETRQITKHVAQILDSRMNTKYDENDKLIREVKVITLKSKLVSDFRKDFQFYKVREINNYHHAHDAYLNAVVGTALIKKYPKLESEFVYGDYKVYDVRKMIAKSEQEIGKATAKYFFYSNIMNFFKTEITLANGEIRKRPLIETNGETGEIVWDKGRDFATVRKVLSMPQVNIVKKTEVQTGGFSKESILPKRNSDKLIARKKDWDPKKYGGFDSPTVAYSVLVVAKVEKGKSKKLKSVKELLGITIMERSSFEKNPIDFLEAKGYKEVKKDLIIKLPKYSLFELENGRKRMLASAGELQKGNELALPSKYVNFLYLASHYEKLKGSPEDNEQKQLFVEQHKHYLDEIIEQISEFSKRVILADANLDKVLSAYNKHRDKPIREQAENIIHLFTLTNLGAPAAFKYFDTTIDRKRYTSTKEVLDATLIHQSITGLYETRIDLSQLGGDGGPAPEAAAKGGSGGMNPLQLLQPLPAEIKGTKLLAHWNSGATITCIPESFLEDEQPIKKTLIKTIHGEKQQNVYYVTFKVKGRKVEAEVIASPYEYILLSPTDVPWLTQQPLQLTILVPLQEYQEKILSKTALPEDQKQQLKTLFVKYDNLWQHWENQVGHRKIRPHNIATGDYPPRPQKQYPINPKAKPSIQIVIDDLLKQGVLTPQNSTMNTPVYPVPKPDGRWRMVLDYREVNKTIPLTAAQNQHSAGILATIVRQKYKTTLDLANGFWAHPITPESYWLTAFTWQGKQYCWTRLPQGFLNSPALFNADVVDLLKEIPNVQVYVDDIYLSHDDPKEHVQQLEKVFQILLQAGYVVSLKKSEIGQKTVEFLGFNITKEGRGLTDTFKTKLLNITPPKDLKQLQSILGKLNFARNFIPNFAELVQPLYNLIAPAKGKYIEWSEENTKQLNMVIEALNTASNLEERLPEQRLVIKVNTSPSAGYVRYYNETGKKPIMYLNYVFSKAELKFSMLEKLLTTMHKALIKAMDLAMGQEILVYSPIVSMTKIQKTPLPERKALPIRWITWMTYLEDPRIQFHYDKTLPELKHIPDVYTSSQSPVKHPSQYEGVFYTDGSAIKSPDPTKSNNAGMGIVHATYKPEYQVLNQWSIPLGNHTAQMAEIAAVEFACKKALKIPGPVLVITDSFYVAESANKELPYWKSNGFVNNKKKPLKHISKWKSIAECLSMKPDITIQHEKGISLQIPVFILKGNALADKLATQGSYVVNAGKRTADGSEFEKRTADGSEFESPKKKAKVE

SEQ ID NO: 1360 - protein, 2176 aa, synthetic construct
MPAAKRVKLDGGDKKYSIGLDIGTNSVGWAVITDEYKVPSKKFKVLGNTDRHSIKKNLIGALLFDSGETAEATRLKRTARRRYTRRKNRICYLQEIFSNEMAKVDDSFFHRLEESFLVEEDKKHERHPIFGNIVDEVAYHEKYPTIYHLRKKLVDSTDKADLRLIYLALAHMIKFRGHFLIEGDLNPDNSDVDKLFIQLVQTYNQLFEENPINASGVDAKAILSARLSKSRRLENLIAQLPGEKKNGLFGNLIALSLGLTPNFKSNFDLAEDAKLQLSKDTYDDDLDNLLAQIGDQYADLFLAAKNLSDAILLSDILRVNTEITKAPLSASMIKRYDEHHQDLTLLKALVRQQLPEKYKEIFFDQSKNGYAGYIDGGASQEEFYKFIKPILEKMDGTEELLVKLNREDLLRKQRTFDNGSIPHQIHLGELHAILRRQEDFYPFLKDNREKIEKILTFRIPYYVGPLARGNSRFAWMTRKSEETITPWNFEEVVDKGASAQSFIERMTNFDKNLPNEKVLPKHSLLYEYFTVYNELTKVKYVTEGMRKPAFLSGEQKKAIVDLLFKTNRKVTVKQLKEDYFKKIECFDSVEISGVEDRFNASLGTYHDLLKIIKDKDFLDNEENEDILEDIVLTLTLFEDREMIEERLKTYAHLFDDKVMKQLKRRRYTGWGRLSRKLINGIRDKQSGKTILDFLKSDGFANRNFMQLIHDDSLTFKEDIQKAQVSGQGDSLHEHIANLAGSPAIKKGILQTVKVVDELVKVMGRHKPENIVIEMARENQTTQKGQKNSRERMKRIEEGIKELGSQILKEHPVENTQLQNEKLYLYYLQNGRDMYVDQELDINRLSDYDVDHIVPQSFLKDDSIDNKVLTRSDKARGKSDNVPSEEVVKKMKNYWRQLLNAKLITQRKFDNLTKAERGGLSELDKAGFIKRQLVETRQITKHVAQILDSRMNTKYDENDKLIREVKVITLKSKLVSDFRKDFQFYKVREINNYHHAHDAYLNAVVGTALIKKYPKLESEFVYGDYKVYDVRKMIAKSEQEIGKATAKYFFYSNIMNFFKTEITLANGEIRKRPLIETNGETGEIVWDKGRDFATVRKVLSMPQVNIVKKTEVQTGGFSKESILPKRNSDKLIARKKDWDPKKYGGFDSPTVAYSVLVVAKVEKGKSKKLKSVKELLGITIMERSSFEKNPIDFLEAKGYKEVKKDLIIKLPKYSLFELENGRKRMLASAGELQKGNELALPSKYVNFLYLASHYEKLKGSPEDNEQKQLFVEQHKHYLDEIIEQISEFSKRVILADANLDKVLSAYNKHRDKPIREQAENIIHLFTLTNLGAPAAFKYFDTTIDRKRYTSTKEVLDATLIHQSITGLYETRIDLSQLGGDGGEAAAKGGGPAPGGMNPLQLLQPLPAEIKGTKLLAHWNSGATITCIPESFLEDEQPIKKTLIKTIHGEKQQNVYYVTFKVKGRKVEAEVIASPYEYILLSPTDVPWLTQQPLQLTILVPLQEYQEKILSKTALPEDQKQQLKTLFVKYDNLWQHWENQVGHRKIRPHNIATGDYPPRPQKQYPINPKAKPSIQIVIDDLLKQGVLTPQNSTMNTPVYPVPKPDGRWRMVLDYREVNKTIPLTAAQNQHSAGILATIVRQKYKTTLDLANGFWAHPITPESYWLTAFTWQGKQYCWTRLPQGFLNSPALFNADVVDLLKEIPNVQVYVDDIYLSHDDPKEHVQQLEKVFQILLQAGYVVSLKKSEIGQKTVEFLGFNITKEGRGLTDTFKTKLLNITPPKDLKQLQSILGKLNFARNFIPNFAELVQPLYNLIAPAKGKYIEWSEENTKQLNMVIEALNTASNLEERLPEQRLVIKVNTSPSAGYVRYYNETGKKPIMYLNYVFSKAELKFSMLEKLLTTMHKALIKAMDLAMGQEILVYSPIVSMTKIQKTPLPERKALPIRWITWMTYLEDPRIQFHYDKTLPELKHIPDVYTSSQSPVKHPSQYEGVFYTDGSAIKSPDPTKSNNAGMGIVHATYKPEYQVLNQWSIPLGNHTAQMAEIAAVEFACKKALKIPGPVLVITDSFYVAESANKELPYWKSNGFVNNKKKPLKHISKWKSIAECLSMKPDITIQHEKGISLQIPVFILKGNALADKLATQGSYVVNAGKRTADGSEFEKRTADGSEFESPKKKAKVE

SEQ ID NO: 1361 - protein, 2176 aa, synthetic construct
MPAAKRVKLDGGDKKYSIGLDIGTNSVGWAVITDEYKVPSKKFKVLGNTDRHSIKKNLIGALLFDSGETAEATRLKRTARRRYTRRKNRICYLQEIFSNEMAKVDDSFFHRLEESFLVEEDKKHERHPIFGNIVDEVAYHEKYPTIYHLRKKLVDSTDKADLRLIYLALAHMIKFRGHFLIEGDLNPDNSDVDKLFIQLVQTYNQLFEENPINASGVDAKAILSARLSKSRRLENLIAQLPGEKKNGLFGNLIALSLGLTPNFKSNFDLAEDAKLQLSKDTYDDDLDNLLAQIGDQYADLFLAAKNLSDAILLSDILRVNTEITKAPLSASMIKRYDEHHQDLTLLKALVRQQLPEKYKEIFFDQSKNGYAGYIDGGASQEEFYKFIKPILEKMDGTEELLVKLNREDLLRKQRTFDNGSIPHQIHLGELHAILRRQEDFYPFLKDNREKIEKILTFRIPYYVGPLARGNSRFAWMTRKSEETITPWNFEEVVDKGASAQSFIERMTNFDKNLPNEKVLPKHSLLYEYFTVYNELTKVKYVTEGMRKPAFLSGEQKKAIVDLLFKTNRKVTVKQLKEDYFKKIECFDSVEISGVEDRFNASLGTYHDLLKIIKDKDFLDNEENEDILEDIVLTLTLFEDREMIEERLKTYAHLFDDKVMKQLKRRRYTGWGRLSRKLINGIRDKQSGKTILDFLKSDGFANRNFMQLIHDDSLTFKEDIQKAQVSGQGDSLHEHIANLAGSPAIKKGILQTVKVVDELVKVMGRHKPENIVIEMARENQTTQKGQKNSRERMKRIEEGIKELGSQILKEHPVENTQLQNEKLYLYYLQNGRDMYVDQELDINRLSDYDVDHIVPQSFLKDDSIDNKVLTRSDKARGKSDNVPSEEVVKKMKNYWRQLLNAKLITQRKFDNLTKAERGGLSELDKAGFIKRQLVETRQITKHVAQILDSRMNTKYDENDKLIREVKVITLKSKLVSDFRKDFQFYKVREINNYHHAHDAYLNAVVGTALIKKYPKLESEFVYGDYKVYDVRKMIAKSEQEIGKATAKYFFYSNIMNFFKTEITLANGEIRKRPLIETNGETGEIVWDKGRDFATVRKVLSMPQVNIVKKTEVQTGGFSKESILPKRNSDKLIARKKDWDPKKYGGFDSPTVAYSVLVVAKVEKGKSKKLKSVKELLGITIMERSSFEKNPIDFLEAKGYKEVKKDLIIKLPKYSLFELENGRKRMLASAGELQKGNELALPSKYVNFLYLASHYEKLKGSPEDNEQKQLFVEQHKHYLDEIIEQISEFSKRVILADANLDKVLSAYNKHRDKPIREQAENIIHLFTLTNLGAPAAFKYFDTTIDRKRYTSTKEVLDATLIHQSITGLYETRIDLSQLGGDGGGSSEAAAKGGGGGMNPLQLLQPLPAEIKGTKLLAHWNSGATITCIPESFLEDEQPIKKTLIKTIHGEKQQNVYYVTFKVKGRKVEAEVIASPYEYILLSPTDVPWLTQQPLQLTILVPLQEYQEKILSKTALPEDQKQQLKTLFVKYDNLWQHWENQVGHRKIRPHNIATGDYPPRPQKQYPINPKAKPSIQIVIDDLLKQGVLTPQNSTMNTPVYPVPKPDGRWRMVLDYREVNKTIPLTAAQNQHSAGILATIVRQKYKTTLDLANGFWAHPITPESYWLTAFTWQGKQYCWTRLPQGFLNSPALFNADVVDLLKEIPNVQVYVDDIYLSHDDPKEHVQQLEKVFQILLQAGYVVSLKKSEIGQKTVEFLGFNITKEGRGLTDTFKTKLLNITPPKDLKQLQSILGKLNFARNFIPNFAELVQPLYNLIAPAKGKYIEWSEENTKQLNMVIEALNTASNLEERLPEQRLVIKVNTSPSAGYVRYYNETGKKPIMYLNYVFSKAELKFSMLEKLLTTMHKALIKAMDLAMGQEILVYSPIVSMTKIQKTPLPERKALPIRWITWMTYLEDPRIQFHYDKTLPELKHIPDVYTSSQSPVKHPSQYEGVFYTDGSAIKSPDPTKSNNAGMGIVHATYKPEYQVLNQWSIPLGNHTAQMAEIAAVEFACKKALKIPGPVLVITDSFYVAESANKELPYWKSNGFVNNKKKPLKHISKWKSIAECLSMKPDITIQHEKGISLQIPVFILKGNALADKLATQGSYVVNAGKRTADGSEFEKRTADGSEFESPKKKAKVE

SEQ ID NO: 1362 - protein, 2176 aa, synthetic construct
MPAAKRVKLDGGDKKYSIGLDIGTNSVGWAVITDEYKVPSKKFKVLGNTDRHSIKKNLIGALLFDSGETAEATRLKRTARRRYTRRKNRICYLQEIFSNEMAKVDDSFFHRLEESFLVEEDKKHERHPIFGNIVDEVAYHEKYPTIYHLRKKLVDSTDKADLRLIYLALAHMIKFRGHFLIEGDLNPDNSDVDKLFIQLVQTYNQLFEENPINASGVDAKAILSARLSKSRRLENLIAQLPGEKKNGLFGNLIALSLGLTPNFKSNFDLAEDAKLQLSKDTYDDDLDNLLAQIGDQYADLFLAAKNLSDAILLSDILRVNTEITKAPLSASMIKRYDEHHQDLTLLKALVRQQLPEKYKEIFFDQSKNGYAGYIDGGASQEEFYKFIKPILEKMDGTEELLVKLNREDLLRKQRTFDNGSIPHQIHLGELHAILRRQEDFYPFLKDNREKIEKILTFRIPYYVGPLARGNSRFAWMTRKSEETITPWNFEEVVDKGASAQSFIERMTNFDKNLPNEKVLPKHSLLYEYFTVYNELTKVKYVTEGMRKPAFLSGEQKKAIVDLLFKTNRKVTVKQLKEDYFKKIECFDSVEISGVEDRFNASLGTYHDLLKIIKDKDFLDNEENEDILEDIVLTLTLFEDREMIEERLKTYAHLFDDKVMKQLKRRRYTGWGRLSRKLINGIRDKQSGKTILDFLKSDGFANRNFMQLIHDDSLTFKEDIQKAQVSGQGDSLHEHIANLAGSPAIKKGILQTVKVVDELVKVMGRHKPENIVIEMARENQTTQKGQKNSRERMKRIEEGIKELGSQILKEHPVENTQLQNEKLYLYYLQNGRDMYVDQELDINRLSDYDVDHIVPQSFLKDDSIDNKVLTRSDKARGKSDNVPSEEVVKKMKNYWRQLLNAKLITQRKFDNLTKAERGGLSELDKAGFIKRQLVETRQITKHVAQILDSRMNTKYDENDKLIREVKVITLKSKLVSDFRKDFQFYKVREINNYHHAHDAYLNAVVGTALIKKYPKLESEFVYGDYKVYDVRKMIAKSEQEIGKATAKYFFYSNIMNFFKTEITLANGEIRKRPLIETNGETGEIVWDKGRDFATVRKVLSMPQVNIVKKTEVQTGGFSKESILPKRNSDKLIARKKDWDPKKYGGFDSPTVAYSVLVVAKVEKGKSKKLKSVKELLGITIMERSSFEKNPIDFLEAKGYKEVKKDLIIKLPKYSLFELENGRKRMLASAGELQKGNELALPSKYVNFLYLASHYEKLKGSPEDNEQKQLFVEQHKHYLDEIIEQISEFSKRVILADANLDKVLSAYNKHRDKPIREQAENIIHLFTLTNLGAPAAFKYFDTTIDRKRYTSTKEVLDATLIHQSITGLYETRIDLSQLGGDGGEAAAKGGGGSSGGMNPLQLLQPLPAEIKGTKLLAHWNSGATITCIPESFLEDEQPIKKTLIKTIHGEKQQNVYYVTFKVKGRKVEAEVIASPYEYILLSPTDVPWLTQQPLQLTILVPLQEYQEKILSKTALPEDQKQQLKTLFVKYDNLWQHWENQVGHRKIRPHNIATGDYPPRPQKQYPINPKAKPSIQIVIDDLLKQGVLTPQNSTMNTPVYPVPKPDGRWRMVLDYREVNKTIPLTAAQNQHSAGILATIVRQKYKTTLDLANGFWAHPITPESYWLTAFTWQGKQYCWTRLPQGFLNSPALFNADVVDLLKEIPNVQVYVDDIYLSHDDPKEHVQQLEKVFQILLQAGYVVSLKKSEIGQKTVEFLGFNITKEGRGLTDTFKTKLLNITPPKDLKQLQSILGKLNFARNFIPNFAELVQPLYNLIAPAKGKYIEWSEENTKQLNMVIEALNTASNLEERLPEQRLVIKVNTSPSAGYVRYYNETGKKPIMYLNYVFSKAELKFSMLEKLLTTMHKALIKAMDLAMGQEILVYSPIVSMTKIQKTPLPERKALPIRWITWMTYLEDPRIQFHYDKTLPELKHIPDVYTSSQSPVKHPSQYEGVFYTDGSAIKSPDPTKSNNAGMGIVHATYKPEYQVLNQWSIPLGNHTAQMAEIAAVEFACKKALKIPGPVLVITDSFYVAESANKELPYWKSNGFVNNKKKPLKHISKWKSIAECLSMKPDITIQHEKGISLQIPVFILKGNALADKLATQGSYVVNAGKRTADGSEFEKRTADGSEFESPKKKAKVE

SEQ ID NO: 1363 - protein, 2172 aa, synthetic construct
MPAAKRVKLDGGDKKYSIGLDIGTNSVGWAVITDEYKVPSKKFKVLGNTDRHSIKKNLIGALLFDSGETAEATRLKRTARRRYTRRKNRICYLQEIFSNEMAKVDDSFFHRLEESFLVEEDKKHERHPIFGNIVDEVAYHEKYPTIYHLRKKLVDSTDKADLRLIYLALAHMIKFRGHFLIEGDLNPDNSDVDKLFIQLVQTYNQLFEENPINASGVDAKAILSARLSKSRRLENLIAQLPGEKKNGLFGNLIALSLGLTPNFKSNFDLAEDAKLQLSKDTYDDDLDNLLAQIGDQYADLFLAAKNLSDAILLSDILRVNTEITKAPLSASMIKRYDEHHQDLTLLKALVRQQLPEKYKEIFFDQSKNGYAGYIDGGASQEEFYKFIKPILEKMDGTEELLVKLNREDLLRKQRTFDNGSIPHQIHLGELHAILRRQEDFYPFLKDNREKIEKILTFRIPYYVGPLARGNSRFAWMTRKSEETITPWNFEEVVDKGASAQSFIERMTNFDKNLPNEKVLPKHSLLYEYFTVYNELTKVKYVTEGMRKPAFLSGEQKKAIVDLLFKTNRKVTVKQLKEDYFKKIECFDSVEISGVEDRFNASLGTYHDLLKIIKDKDFLDNEENEDILEDIVLTLTLFEDREMIEERLKTYAHLFDDKVMKQLKRRRYTGWGRLSRKLINGIRDKQSGKTILDFLKSDGFANRNFMQLIHDDSLTFKEDIQKAQVSGQGDSLHEHIANLAGSPAIKKGILQTVKVVDELVKVMGRHKPENIVIEMARENQTTQKGQKNSRERMKRIEEGIKELGSQILKEHPVENTQLQNEKLYLYYLQNGRDMYVDQELDINRLSDYDVDHIVPQSFLKDDSIDNKVLTRSDKARGKSDNVPSEEVVKKMKNYWRQLLNAKLITQRKFDNLTKAERGGLSELDKAGFIKRQLVETRQITKHVAQILDSRMNTKYDENDKLIREVKVITLKSKLVSDFRKDFQFYKVREINNYHHAHDAYLNAVVGTALIKKYPKLESEFVYGDYKVYDVRKMIAKSEQEIGKATAKYFFYSNIMNFFKTEITLANGEIRKRPLIETNGETGEIVWDKGRDFATVRKVLSMPQVNIVKKTEVQTGGFSKESILPKRNSDKLIARKKDWDPKKYGGFDSPTVAYSVLVVAKVEKGKSKKLKSVKELLGITIMERSSFEKNPIDFLEAKGYKEVKKDLIIKLPKYSLFELENGRKRMLASAGELQKGNELALPSKYVNFLYLASHYEKLKGSPEDNEQKQLFVEQHKHYLDEIIEQISEFSKRVILADANLDKVLSAYNKHRDKPIREQAENIIHLFTLTNLGAPAAFKYFDTTIDRKRYTSTKEVLDATLIHQSITGLYETRIDLSQLGGDGGPAPAPAPGGMNPLQLLQPLPAEIKGTKLLAHWNSGATITCIPESFLEDEQPIKKTLIKTIHGEKQQNVYYVTFKVKGRKVEAEVIASPYEYILLSPTDVPWLTQQPLQLTILVPLQEYQEKILSKTALPEDQKQQLKTLFVKYDNLWQHWENQVGHRKIRPHNIATGDYPPRPQKQYPINPKAKPSIQIVIDDLLKQGVLTPQNSTMNTPVYPVPKPDGRWRMVLDYREVNKTIPLTAAQNQHSAGILATIVRQKYKTTLDLANGFWAHPITPESYWLTAFTWQGKQYCWTRLPQGFLNSPALFNADVVDLLKEIPNVQVYVDDIYLSHDDPKEHVQQLEKVFQILLQAGYVVSLKKSEIGQKTVEFLGFNITKEGRGLTDTFKTKLLNITPPKDLKQLQSILGKLNFARNFIPNFAELVQPLYNLIAPAKGKYIEWSEENTKQLNMVIEALNTASNLEERLPEQRLVIKVNTSPSAGYVRYYNETGKKPIMYLNYVFSKAELKFSMLEKLLTTMHKALIKAMDLAMGQEILVYSPIVSMTKIQKTPLPERKALPIRWITWMTYLEDPRIQFHYDKTLPELKHIPDVYTSSQSPVKHPSQYEGVFYTDGSAIKSPDPTKSNNAGMGIVHATYKPEYQVLNQWSIPLGNHTAQMAEIAAVEFACKKALKIPGPVLVITDSFYVAESANKELPYWKSNGFVNNKKKPLKHISKWKSIAECLSMKPDITIQHEKGISLQIPVFILKGNALADKLATQGSYVVNAGKRTADGSEFEKRTADGSEFESPKKKAKVE

SEQ ID NO: 1364 - protein, 2174 aa, synthetic construct
MPAAKRVKLDGGDKKYSIGLDIGTNSVGWAVITDEYKVPSKKFKVLGNTDRHSIKKNLIGALLFDSGETAEATRLKRTARRRYTRRKNRICYLQEIFSNEMAKVDDSFFHRLEESFLVEEDKKHERHPIFGNIVDEVAYHEKYPTIYHLRKKLVDSTDKADLRLIYLALAHMIKFRGHFLIEGDLNPDNSDVDKLFIQLVQTYNQLFEENPINASGVDAKAILSARLSKSRRLENLIAQLPGEKKNGLFGNLIALSLGLTPNFKSNFDLAEDAKLQLSKDTYDDDLDNLLAQIGDQYADLFLAAKNLSDAILLSDILRVNTEITKAPLSASMIKRYDEHHQDLTLLKALVRQQLPEKYKEIFFDQSKNGYAGYIDGGASQEEFYKFIKPILEKMDGTEELLVKLNREDLLRKQRTFDNGSIPHQIHLGELHAILRRQEDFYPFLKDNREKIEKILTFRIPYYVGPLARGNSRFAWMTRKSEETITPWNFEEVVDKGASAQSFIERMTNFDKNLPNEKVLPKHSLLYEYFTVYNELTKVKYVTEGMRKPAFLSGEQKKAIVDLLFKTNRKVTVKQLKEDYFKKIECFDSVEISGVEDRFNASLGTYHDLLKIIKDKDFLDNEENEDILEDIVLTLTLFEDREMIEERLKTYAHLFDDKVMKQLKRRRYTGWGRLSRKLINGIRDKQSGKTILDFLKSDGFANRNFMQLIHDDSLTFKEDIQKAQVSGQGDSLHEHIANLAGSPAIKKGILQTVKVVDELVKVMGRHKPENIVIEMARENQTTQKGQKNSRERMKRIEEGIKELGSQILKEHPVENTQLQNEKLYLYYLQNGRDMYVDQELDINRLSDYDVDHIVPQSFLKDDSIDNKVLTRSDKARGKSDNVPSEEVVKKMKNYWRQLLNAKLITQRKFDNLTKAERGGLSELDKAGFIKRQLVETRQITKHVAQILDSRMNTKYDENDKLIREVKVITLKSKLVSDFRKDFQFYKVREINNYHHAHDAYLNAVVGTALIKKYPKLESEFVYGDYKVYDVRKMIAKSEQEIGKATAKYFFYSNIMNFFKTEITLANGEIRKRPLIETNGETGEIVWDKGRDFATVRKVLSMPQVNIVKKTEVQTGGFSKESILPKRNSDKLIARKKDWDPKKYGGFDSPTVAYSVLVVAKVEKGKSKKLKSVKELLGITIMERSSFEKNPIDFLEAKGYKEVKKDLIIKLPKYSLFELENGRKRMLASAGELQKGNELALPSKYVNFLYLASHYEKLKGSPEDNEQKQLFVEQHKHYLDEIIEQISEFSKRVILADANLDKVLSAYNKHRDKPIREQAENIIHLFTLTNLGAPAAFKYFDTTIDRKRYTSTKEVLDATLIHQSITGLYETRIDLSQLGGDGGPAPAPAPAPGGMNPLQLLQPLPAEIKGTKLLAHWNSGATITCIPESFLEDEQPIKKTLIKTIHGEKQQNVYYVTFKVKGRKVEAEVIASPYEYILLSPTDVPWLTQQPLQLTILVPLQEYQEKILSKTALPEDQKQQLKTLFVKYDNLWQHWENQVGHRKIRPHNIATGDYPPRPQKQYPINPKAKPSIQIVIDDLLKQGVLTPQNSTMNTPVYPVPKPDGRWRMVLDYREVNKTIPLTAAQNQHSAGILATIVRQKYKTTLDLANGFWAHPITPESYWLTAFTWQGKQYCWTRLPQGFLNSPALFNADVVDLLKEIPNVQVYVDDIYLSHDDPKEHVQQLEKVFQILLQAGYVVSLKKSEIGQKTVEFLGFNITKEGRGLTDTFKTKLLNITPPKDLKQLQSILGKLNFARNFIPNFAELVQPLYNLIAPAKGKYIEWSEENTKQLNMVIEALNTASNLEERLPEQRLVIKVNTSPSAGYVRYYNETGKKPIMYLNYVFSKAELKFSMLEKLLTTMHKALIKAMDLAMGQEILVYSPIVSMTKIQKTPLPERKALPIRWITWMTYLEDPRIQFHYDKTLPELKHIPDVYTSSQSPVKHPSQYEGVFYTDGSAIKSPDPTKSNNAGMGIVHATYKPEYQVLNQWSIPLGNHTAQMAEIAAVEFACKKALKIPGPVLVITDSFYVAESANKELPYWKSNGFVNNKKKPLKHISKWKSIAECLSMKPDITIQHEKGISLQIPVFILKGNALADKLATQGSYVVNAGKRTADGSEFEKRTADGSEFESPKKKAKVE

SEQ ID NO: 1365 - protein, 2094 aa, synthetic construct
MPAAKRVKLDGGDKKYSIGLDIGTNSVGWAVITDEYKVPSKKFKVLGNTDRHSIKKNLIGALLFDSGETAEATRLKRTARRRYTRRKNRICYLQEIFSNEMAKVDDSFFHRLEESFLVEEDKKHERHPIFGNIVDEVAYHEKYPTIYHLRKKLVDSTDKADLRLIYLALAHMIKFRGHFLIEGDLNPDNSDVDKLFIQLVQTYNQLFEENPINASGVDAKAILSARLSKSRRLENLIAQLPGEKKNGLFGNLIALSLGLTPNFKSNFDLAEDAKLQLSKDTYDDDLDNLLAQIGDQYADLFLAAKNLSDAILLSDILRVNTEITKAPLSASMIKRYDEHHQDLTLLKALVRQQLPEKYKEIFFDQSKNGYAGYIDGGASQEEFYKFIKPILEKMDGTEELLVKLNREDLLRKQRTFDNGSIPHQIHLGELHAILRRQEDFYPFLKDNREKIEKILTFRIPYYVGPLARGNSRFAWMTRKSEETITPWNFEEVVDKGASAQSFIERMTNFDKNLPNEKVLPKHSLLYEYFTVYNELTKVKYVTEGMRKPAFLSGEQKKAIVDLLFKTNRKVTVKQLKEDYFKKIECFDSVEISGVEDRFNASLGTYHDLLKIIKDKDFLDNEENEDILEDIVLTLTLFEDREMIEERLKTYAHLFDDKVMKQLKRRRYTGWGRLSRKLINGIRDKQSGKTILDFLKSDGFANRNFMQLIHDDSLTFKEDIQKAQVSGQGDSLHEHIANLAGSPAIKKGILQTVKVVDELVKVMGRHKPENIVIEMARENQTTQKGQKNSRERMKRIEEGIKELGSQILKEHPVENTQLQNEKLYLYYLQNGRDMYVDQELDINRLSDYDVDHIVPQSFLKDDSIDNKVLTRSDKARGKSDNVPSEEVVKKMKNYWRQLLNAKLITQRKFDNLTKAERGGLSELDKAGFIKRQLVETRQITKHVAQILDSRMNTKYDENDKLIREVKVITLKSKLVSDFRKDFQFYKVREINNYHHAHDAYLNAVVGTALIKKYPKLESEFVYGDYKVYDVRKMIAKSEQEIGKATAKYFFYSNIMNFFKTEITLANGEIRKRPLIETNGETGEIVWDKGRDFATVRKVLSMPQVNIVKKTEVQTGGFSKESILPKRNSDKLIARKKDWDPKKYGGFDSPTVAYSVLVVAKVEKGKSKKLKSVKELLGITIMERSSFEKNPIDFLEAKGYKEVKKDLIIKLPKYSLFELENGRKRMLASAGELQKGNELALPSKYVNFLYLASHYEKLKGSPEDNEQKQLFVEQHKHYLDEIIEQISEFSKRVILADANLDKVLSAYNKHRDKPIREQAENIIHLFTLTNLGAPAAFKYFDTTIDRKRYTSTKEVLDATLIHQSITGLYETRIDLSQLGGDGGEAAAKGGSPAPGGVLNLEEEYRLHEKPVPSSIDPSWLQLFPTVWAERAGMGLANQVPPVVVELRSGASPVAVRQYPMSKEAREGIRPHIQKFLDLGVLVPCRSPWNTPLLPVKKPGTNDYRPVQDLREINKRVQDIHPTVPNPYNLLSSLPPSYTWYSVLDLKDAFFCLRLHPNSQPLFAFEWKDPEKGNTGQLTWTRLPQGFKNSPTLFDEALHRDLAPFRALNPQVVLLQYVDDLLVAAPTYEDCKKGTQKLLQELSKLGYRVSAKKAQLCQREVTYLGYLLKEGKRWLTPARKATVMKIPVPTTPRQVREFLGTAGFCRLWIPGFASLAAPLYPLTKESIPFIWTEEHQQAFDHIKKALLSAPALALPDLTKPFTLYIDERAGVARGVLTQTLGPWRRPVAYLSKKLDPVASGWPTCLKAVAAVALLLKDADKLTLGQNVTVIASHSLESIVRQPPDRWMTNARMTHYQSLLLNERVSFAPPAVLNPATLLPVESEATPVHRCSEILAEETGTRRDLEDQPLPGVPTWYTDGSSFITEGKRRAGAPIVDGKRTVWASSLPEGTSAQKAELVALTQALRLAEGKNINIYTDSRYAFATAHIHGAIYKQRGLLTSAGKDIKNKEEILALLEAIHLPRRVAIIHCPGHQRGSNPVATGNRRADEAAKQAALSTRVLAGTTKPAGKRTADGSEFEKRTADGSEFESPKKKAKVE

SEQ ID NO: 1366 - protein, 2101 aa, synthetic construct
MPAAKRVKLDGGDKKYSIGLDIGTNSVGWAVITDEYKVPSKKFKVLGNTDRHSIKKNLIGALLFDSGETAEATRLKRTARRRYTRRKNRICYLQEIFSNEMAKVDDSFFHRLEESFLVEEDKKHERHPIFGNIVDEVAYHEKYPTIYHLRKKLVDSTDKADLRLIYLALAHMIKFRGHFLIEGDLNPDNSDVDKLFIQLVQTYNQLFEENPINASGVDAKAILSARLSKSRRLENLIAQLPGEKKNGLFGNLIALSLGLTPNFKSNFDLAEDAKLQLSKDTYDDDLDNLLAQIGDQYADLFLAAKNLSDAILLSDILRVNTEITKAPLSASMIKRYDEHHQDLTLLKALVRQQLPEKYKEIFFDQSKNGYAGYIDGGASQEEFYKFIKPILEKMDGTEELLVKLNREDLLRKQRTFDNGSIPHQIHLGELHAILRRQEDFYPFLKDNREKIEKILTFRIPYYVGPLARGNSRFAWMTRKSEETITPWNFEEVVDKGASAQSFIERMTNFDKNLPNEKVLPKHSLLYEYFTVYNELTKVKYVTEGMRKPAFLSGEQKKAIVDLLFKTNRKVTVKQLKEDYFKKIECFDSVEISGVEDRFNASLGTYHDLLKIIKDKDFLDNEENEDILEDIVLTLTLFEDREMIEERLKTYAHLFDDKVMKQLKRRRYTGWGRLSRKLINGIRDKQSGKTILDFLKSDGFANRNFMQLIHDDSLTFKEDIQKAQVSGQGDSLHEHIANLAGSPAIKKGILQTVKVVDELVKVMGRHKPENIVIEMARENQTTQKGQKNSRERMKRIEEGIKELGSQILKEHPVENTQLQNEKLYLYYLQNGRDMYVDQELDINRLSDYDVDHIVPQSFLKDDSIDNKVLTRSDKARGKSDNVPSEEVVKKMKNYWRQLLNAKLITQRKFDNLTKAERGGLSELDKAGFIKRQLVETRQITKHVAQILDSRMNTKYDENDKLIREVKVITLKSKLVSDFRKDFQFYKVREINNYHHAHDAYLNAVVGTALIKKYPKLESEFVYGDYKVYDVRKMIAKSEQEIGKATAKYFFYSNIMNFFKTEITLANGEIRKRPLIETNGETGEIVWDKGRDFATVRKVLSMPQVNIVKKTEVQTGGFSKESILPKRNSDKLIARKKDWDPKKYGGFDSPTVAYSVLVVAKVEKGKSKKLKSVKELLGITIMERSSFEKNPIDFLEAKGYKEVKKDLIIKLPKYSLFELENGRKRMLASAGELQKGNELALPSKYVNFLYLASHYEKLKGSPEDNEQKQLFVEQHKHYLDEIIEQISEFSKRVILADANLDKVLSAYNKHRDKPIREQAENIIHLFTLTNLGAPAAFKYFDTTIDRKRYTSTKEVLDATLIHQSITGLYETRIDLSQLGGDGGGSSGSSGSSGSSGSSGSSGGVLNLEEEYRLHEKPVPSSIDPSWLQLFPTVWAERAGMGLANQVPPVVVELRSGASPVAVRQYPMSKEAREGIRPHIQKFLDLGVLVPCRSPWNTPLLPVKKPGTNDYRPVQDLREINKRVQDIHPTVPNPYNLLSSLPPSYTWYSVLDLKDAFFCLRLHPNSQPLFAFEWKDPEKGNTGQLTWTRLPQGFKNSPTLFDEALHRDLAPFRALNPQVVLLQYVDDLLVAAPTYEDCKKGTQKLLQELSKLGYRVSAKKAQLCQREVTYLGYLLKEGKRWLTPARKATVMKIPVPTTPRQVREFLGTAGFCRLWIPGFASLAAPLYPLTKESIPFIWTEEHQQAFDHIKKALLSAPALALPDLTKPFTLYIDERAGVARGVLTQTLGPWRRPVAYLSKKLDPVASGWPTCLKAVAAVALLLKDADKLTLGQNVTVIASHSLESIVRQPPDRWMTNARMTHYQSLLLNERVSFAPPAVLNPATLLPVESEATPVHRCSEILAEETGTRRDLEDQPLPGVPTWYTDGSSFITEGKRRAGAPIVDGKRTVWASSLPEGTSAQKAELVALTQALRLAEGKNINIYTDSRYAFATAHIHGAIYKQRGLLTSAGKDIKNKEEILALLEAIHLPRRVAIIHCPGHQRGSNPVATGNRRADEAAKQAALSTRVLAGTTKPAGKRTADGSEFEKRTADGSEFESPKKKAKVE

SEQ ID NO: 1367 - protein, 2103 aa, synthetic construct
MPAAKRVKLDGGDKKYSIGLDIGTNSVGWAVITDEYKVPSKKFKVLGNTDRHSIKKNLIGALLFDSGETAEATRLKRTARRRYTRRKNRICYLQEIFSNEMAKVDDSFFHRLEESFLVEEDKKHERHPIFGNIVDEVAYHEKYPTIYHLRKKLVDSTDKADLRLIYLALAHMIKFRGHFLIEGDLNPDNSDVDKLFIQLVQTYNQLFEENPINASGVDAKAILSARLSKSRRLENLIAQLPGEKKNGLFGNLIALSLGLTPNFKSNFDLAEDAKLQLSKDTYDDDLDNLLAQIGDQYADLFLAAKNLSDAILLSDILRVNTEITKAPLSASMIKRYDEHHQDLTLLKALVRQQLPEKYKEIFFDQSKNGYAGYIDGGASQEEFYKFIKPILEKMDGTEELLVKLNREDLLRKQRTFDNGSIPHQIHLGELHAILRRQEDFYPFLKDNREKIEKILTFRIPYYVGPLARGNSRFAWMTRKSEETITPWNFEEVVDKGASAQSFIERMTNFDKNLPNEKVLPKHSLLYEYFTVYNELTKVKYVTEGMRKPAFLSGEQKKAIVDLLFKTNRKVTVKQLKEDYFKKIECFDSVEISGVEDRFNASLGTYHDLLKIIKDKDFLDNEENEDILEDIVLTLTLFEDREMIEERLKTYAHLFDDKVMKQLKRRRYTGWGRLSRKLINGIRDKQSGKTILDFLKSDGFANRNFMQLIHDDSLTFKEDIQKAQVSGQGDSLHEHIANLAGSPAIKKGILQTVKVVDELVKVMGRHKPENIVIEMARENQTTQKGQKNSRERMKRIEEGIKELGSQILKEHPVENTQLQNEKLYLYYLQNGRDMYVDQELDINRLSDYDVDHIVPQSFLKDDSIDNKVLTRSDKARGKSDNVPSEEVVKKMKNYWRQLLNAKLITQRKFDNLTKAERGGLSELDKAGFIKRQLVETRQITKHVAQILDSRMNTKYDENDKLIREVKVITLKSKLVSDFRKDFQFYKVREINNYHHAHDAYLNAVVGTALIKKYPKLESEFVYGDYKVYDVRKMIAKSEQEIGKATAKYFFYSNIMNFFKTEITLANGEIRKRPLIETNGETGEIVWDKGRDFATVRKVLSMPQVNIVKKTEVQTGGFSKESILPKRNSDKLIARKKDWDPKKYGGFDSPTVAYSVLVVAKVEKGKSKKLKSVKELLGITIMERSSFEKNPIDFLEAKGYKEVKKDLIIKLPKYSLFELENGRKRMLASAGELQKGNELALPSKYVNFLYLASHYEKLKGSPEDNEQKQLFVEQHKHYLDEIIEQISEFSKRVILADANLDKVLSAYNKHRDKPIREQAENIIHLFTLTNLGAPAAFKYFDTTIDRKRYTSTKEVLDATLIHQSITGLYETRIDLSQLGGDGGEAAAKEAAAKEAAAKEAAAKGGVLNLEEEYRLHEKPVPSSIDPSWLQLFPTVWAERAGMGLANQVPPVVVELRSGASPVAVRQYPMSKEAREGIRPHIQKFLDLGVLVPCRSPWNTPLLPVKKPGTNDYRPVQDLREINKRVQDIHPTVPNPYNLLSSLPPSYTWYSVLDLKDAFFCLRLHPNSQPLFAFEWKDPEKGNTGQLTWTRLPQGFKNSPTLFDEALHRDLAPFRALNPQVVLLQYVDDLLVAAPTYEDCKKGTQKLLQELSKLGYRVSAKKAQLCQREVTYLGYLLKEGKRWLTPARKATVMKIPVPTTPRQVREFLGTAGFCRLWIPGFASLAAPLYPLTKESIPFIWTEEHQQAFDHIKKALLSAPALALPDLTKPFTLYIDERAGVARGVLTQTLGPWRRPVAYLSKKLDPVASGWPTCLKAVAAVALLLKDADKLTLGQNVTVIASHSLESIVRQPPDRWMTNARMTHYQSLLLNERVSFAPPAVLNPATLLPVESEATPVHRCSEILAEETGTRRDLEDQPLPGVPTWYTDGSSFITEGKRRAGAPIVDGKRTVWASSLPEGTSAQKAELVALTQALRLAEGKNINIYTDSRYAFATAHIHGAIYKQRGLLTSAGKDIKNKEEILALLEAIHLPRRVAIIHCPGHQRGSNPVATGNRRADEAAKQAALSTRVLAGTTKPAGKRTADGSEFEKRTADGSEFESPKKKAKVE

SEQ ID NO: 1368 - protein, 2098 aa, synthetic construct
MPAAKRVKLDGGDKKYSIGLDIGTNSVGWAVITDEYKVPSKKFKVLGNTDRHSIKKNLIGALLFDSGETAEATRLKRTARRRYTRRKNRICYLQEIFSNEMAKVDDSFFHRLEESFLVEEDKKHERHPIFGNIVDEVAYHEKYPTIYHLRKKLVDSTDKADLRLIYLALAHMIKFRGHFLIEGDLNPDNSDVDKLFIQLVQTYNQLFEENPINASGVDAKAILSARLSKSRRLENLIAQLPGEKKNGLFGNLIALSLGLTPNFKSNFDLAEDAKLQLSKDTYDDDLDNLLAQIGDQYADLFLAAKNLSDAILLSDILRVNTEITKAPLSASMIKRYDEHHQDLTLLKALVRQQLPEKYKEIFFDQSKNGYAGYIDGGASQEEFYKFIKPILEKMDGTEELLVKLNREDLLRKQRTFDNGSIPHQIHLGELHAILRRQEDFYPFLKDNREKIEKILTFRIPYYVGPLARGNSRFAWMTRKSEETITPWNFEEVVDKGASAQSFIERMTNFDKNLPNEKVLPKHSLLYEYFTVYNELTKVKYVTEGMRKPAFLSGEQKKAIVDLLFKTNRKVTVKQLKEDYFKKIECFDSVEISGVEDRFNASLGTYHDLLKIIKDKDFLDNEENEDILEDIVLTLTLFEDREMIEERLKTYAHLFDDKVMKQLKRRRYTGWGRLSRKLINGIRDKQSGKTILDFLKSDGFANRNFMQLIHDDSLTFKEDIQKAQVSGQGDSLHEHIANLAGSPAIKKGILQTVKVVDELVKVMGRHKPENIVIEMARENQTTQKGQKNSRERMKRIEEGIKELGSQILKEHPVENTQLQNEKLYLYYLQNGRDMYVDQELDINRLSDYDVDHIVPQSFLKDDSIDNKVLTRSDKARGKSDNVPSEEVVKKMKNYWRQLLNAKLITQRKFDNLTKAERGGLSELDKAGFIKRQLVETRQITKHVAQILDSRMNTKYDENDKLIREVKVITLKSKLVSDFRKDFQFYKVREINNYHHAHDAYLNAVVGTALIKKYPKLESEFVYGDYKVYDVRKMIAKSEQEIGKATAKYFFYSNIMNFFKTEITLANGEIRKRPLIETNGETGEIVWDKGRDFATVRKVLSMPQVNIVKKTEVQTGGFSKESILPKRNSDKLIARKKDWDPKKYGGFDSPTVAYSVLVVAKVEKGKSKKLKSVKELLGITIMERSSFEKNPIDFLEAKGYKEVKKDLIIKLPKYSLFELENGRKRMLASAGELQKGNELALPSKYVNFLYLASHYEKLKGSPEDNEQKQLFVEQHKHYLDEIIEQISEFSKRVILADANLDKVLSAYNKHRDKPIREQAENIIHLFTLTNLGAPAAFKYFDTTIDRKRYTSTKEVLDATLIHQSITGLYETRIDLSQLGGDGGGSSGSSGSSGSSGSSGGVLNLEEEYRLHEKPVPSSIDPSWLQLFPTVWAERAGMGLANQVPPVVVELRSGASPVAVRQYPMSKEAREGIRPHIQKFLDLGVLVPCRSPWNTPLLPVKKPGTNDYRPVQDLREINKRVQDIHPTVPNPYNLLSSLPPSYTWYSVLDLKDAFFCLRLHPNSQPLFAFEWKDPEKGNTGQLTWTRLPQGFKNSPTLFDEALHRDLAPFRALNPQVVLLQYVDDLLVAAPTYEDCKKGTQKLLQELSKLGYRVSAKKAQLCQREVTYLGYLLKEGKRWLTPARKATVMKIPVPTTPRQVREFLGTAGFCRLWIPGFASLAAPLYPLTKESIPFIWTEEHQQAFDHIKKALLSAPALALPDLTKPFTLYIDERAGVARGVLTQTLGPWRRPVAYLSKKLDPVASGWPTCLKAVAAVALLLKDADKLTLGQNVTVIASHSLESIVRQPPDRWMTNARMTHYQSLLLNERVSFAPPAVLNPATLLPVESEATPVHRCSEILAEETGTRRDLEDQPLPGVPTWYTDGSSFITEGKRRAGAPIVDGKRTVWASSLPEGTSAQKAELVALTQALRLAEGKNINIYTDSRYAFATAHIHGAIYKQRGLLTSAGKDIKNKEEILALLEAIHLPRRVAIIHCPGHQRGSNPVATGNRRADEAAKQAALSTRVLAGTTKPAGKRTADGSEFEKRTADGSEFESPKKKAKVE

SEQ ID NO: 1369 - protein, 2094 aa, synthetic construct
MPAAKRVKLDGGDKKYSIGLDIGTNSVGWAVITDEYKVPSKKFKVLGNTDRHSIKKNLIGALLFDSGETAEATRLKRTARRRYTRRKNRICYLQEIFSNEMAKVDDSFFHRLEESFLVEEDKKHERHPIFGNIVDEVAYHEKYPTIYHLRKKLVDSTDKADLRLIYLALAHMIKFRGHFLIEGDLNPDNSDVDKLFIQLVQTYNQLFEENPINASGVDAKAILSARLSKSRRLENLIAQLPGEKKNGLFGNLIALSLGLTPNFKSNFDLAEDAKLQLSKDTYDDDLDNLLAQIGDQYADLFLAAKNLSDAILLSDILRVNTEITKAPLSASMIKRYDEHHQDLTLLKALVRQQLPEKYKEIFFDQSKNGYAGYIDGGASQEEFYKFIKPILEKMDGTEELLVKLNREDLLRKQRTFDNGSIPHQIHLGELHAILRRQEDFYPFLKDNREKIEKILTFRIPYYVGPLARGNSRFAWMTRKSEETITPWNFEEVVDKGASAQSFIERMTNFDKNLPNEKVLPKHSLLYEYFTVYNELTKVKYVTEGMRKPAFLSGEQKKAIVDLLFKTNRKVTVKQLKEDYFKKIECFDSVEISGVEDRFNASLGTYHDLLKIIKDKDFLDNEENEDILEDIVLTLTLFEDREMIEERLKTYAHLFDDKVMKQLKRRRYTGWGRLSRKLINGIRDKQSGKTILDFLKSDGFANRNFMQLIHDDSLTFKEDIQKAQVSGQGDSLHEHIANLAGSPAIKKGILQTVKVVDELVKVMGRHKPENIVIEMARENQTTQKGQKNSRERMKRIEEGIKELGSQILKEHPVENTQLQNEKLYLYYLQNGRDMYVDQELDINRLSDYDVDHIVPQSFLKDDSIDNKVLTRSDKARGKSDNVPSEEVVKKMKNYWRQLLNAKLITQRKFDNLTKAERGGLSELDKAGFIKRQLVETRQITKHVAQILDSRMNTKYDENDKLIREVKVITLKSKLVSDFRKDFQFYKVREINNYHHAHDAYLNAVVGTALIKKYPKLESEFVYGDYKVYDVRKMIAKSEQEIGKATAKYFFYSNIMNFFKTEITLANGEIRKRPLIETNGETGEIVWDKGRDFATVRKVLSMPQVNIVKKTEVQTGGFSKESILPKRNSDKLIARKKDWDPKKYGGFDSPTVAYSVLVVAKVEKGKSKKLKSVKELLGITIMERSSFEKNPIDFLEAKGYKEVKKDLIIKLPKYSLFELENGRKRMLASAGELQKGNELALPSKYVNFLYLASHYEKLKGSPEDNEQKQLFVEQHKHYLDEIIEQISEFSKRVILADANLDKVLSAYNKHRDKPIREQAENIIHLFTLTNLGAPAAFKYFDTTIDRKRYTSTKEVLDATLIHQSITGLYETRIDLSQLGGDGGEAAAKGSSGGSGGVLNLEEEYRLHEKPVPSSIDPSWLQLFPTVWAERAGMGLANQVPPVVVELRSGASPVAVRQYPMSKEAREGIRPHIQKFLDLGVLVPCRSPWNTPLLPVKKPGTNDYRPVQDLREINKRVQDIHPTVPNPYNLLSSLPPSYTWYSVLDLKDAFFCLRLHPNSQPLFAFEWKDPEKGNTGQLTWTRLPQGFKNSPTLFDEALHRDLAPFRALNPQVVLLQYVDDLLVAAPTYEDCKKGTQKLLQELSKLGYRVSAKKAQLCQREVTYLGYLLKEGKRWLTPARKATVMKIPVPTTPRQVREFLGTAGFCRLWIPGFASLAAPLYPLTKESIPFIWTEEHQQAFDHIKKALLSAPALALPDLTKPFTLYIDERAGVARGVLTQTLGPWRRPVAYLSKKLDPVASGWPTCLKAVAAVALLLKDADKLTLGQNVTVIASHSLESIVRQPPDRWMTNARMTHYQSLLLNERVSFAPPAVLNPATLLPVESEATPVHRCSEILAEETGTRRDLEDQPLPGVPTWYTDGSSFITEGKRRAGAPIVDGKRTVWASSLPEGTSAQKAELVALTQALRLAEGKNINIYTDSRYAFATAHIHGAIYKQRGLLTSAGKDIKNKEEILALLEAIHLPRRVAIIHCPGHQRGSNPVATGNRRADEAAKQAALSTRVLAGTTKPAGKRTADGSEFEKRTADGSEFESPKKKAKVE

SEQ ID NO: 1370 - protein, 2129 aa, synthetic construct
MPAAKRVKLDGGDKKYSIGLDIGTNSVGWAVITDEYKVPSKKFKVLGNTDRHSIKKNLIGALLFDSGETAEATRLKRTARRRYTRRKNRICYLQEIFSNEMAKVDDSFFHRLEESFLVEEDKKHERHPIFGNIVDEVAYHEKYPTIYHLRKKLVDSTDKADLRLIYLALAHMIKFRGHFLIEGDLNPDNSDVDKLFIQLVQTYNQLFEENPINASGVDAKAILSARLSKSRRLENLIAQLPGEKKNGLFGNLIALSLGLTPNFKSNFDLAEDAKLQLSKDTYDDDLDNLLAQIGDQYADLFLAAKNLSDAILLSDILRVNTEITKAPLSASMIKRYDEHHQDLTLLKALVRQQLPEKYKEIFFDQSKNGYAGYIDGGASQEEFYKFIKPILEKMDGTEELLVKLNREDLLRKQRTFDNGSIPHQIHLGELHAILRRQEDFYPFLKDNREKIEKILTFRIPYYVGPLARGNSRFAWMTRKSEETITPWNFEEVVDKGASAQSFIERMTNFDKNLPNEKVLPKHSLLYEYFTVYNELTKVKYVTEGMRKPAFLSGEQKKAIVDLLFKTNRKVTVKQLKEDYFKKIECFDSVEISGVEDRFNASLGTYHDLLKIIKDKDFLDNEENEDILEDIVLTLTLFEDREMIEERLKTYAHLFDDKVMKQLKRRRYTGWGRLSRKLINGIRDKQSGKTILDFLKSDGFANRNFMQLIHDDSLTFKEDIQKAQVSGQGDSLHEHIANLAGSPAIKKGILQTVKVVDELVKVMGRHKPENIVIEMARENQTTQKGQKNSRERMKRIEEGIKELGSQILKEHPVENTQLQNEKLYLYYLQNGRDMYVDQELDINRLSDYDVDHIVPQSFLKDDSIDNKVLTRSDKARGKSDNVPSEEVVKKMKNYWRQLLNAKLITQRKFDNLTKAERGGLSELDKAGFIKRQLVETRQITKHVAQILDSRMNTKYDENDKLIREVKVITLKSKLVSDFRKDFQFYKVREINNYHHAHDAYLNAVVGTALIKKYPKLESEFVYGDYKVYDVRKMIAKSEQEIGKATAKYFFYSNIMNFFKTEITLANGEIRKRPLIETNGETGEIVWDKGRDFATVRKVLSMPQVNIVKKTEVQTGGFSKESILPKRNSDKLIARKKDWDPKKYGGFDSPTVAYSVLVVAKVEKGKSKKLKSVKELLGITIMERSSFEKNPIDFLEAKGYKEVKKDLIIKLPKYSLFELENGRKRMLASAGELQKGNELALPSKYVNFLYLASHYEKLKGSPEDNEQKQLFVEQHKHYLDEIIEQISEFSKRVILADANLDKVLSAYNKHRDKPIREQAENIIHLFTLTNLGAPAAFKYFDTTIDRKRYTSTKEVLDATLIHQSITGLYETRIDLSQLGGDGGAEAAAKEAAAKEAAAKEAAAKALEAEAAAKEAAAKEAAAKEAAAKAGGVLNLEEEYRLHEKPVPSSIDPSWLQLFPTVWAERAGMGLANQVPPVVVELRSGASPVAVRQYPMSKEAREGIRPHIQKFLDLGVLVPCRSPWNTPLLPVKKPGTNDYRPVQDLREINKRVQDIHPTVPNPYNLLSSLPPSYTWYSVLDLKDAFFCLRLHPNSQPLFAFEWKDPEKGNTGQLTWTRLPQGFKNSPTLFNEALHRDLAPFRALNPQVVLLQYVDDLLVAAPTYEDCKKGTQKLLQELSKLGYRVSAKKAQLCQREVTYLGYLLKEGKRWLTPARKATVMKIPVPTTPRQVREFLGTAGFCRLWIPGFASLAAPLYPLTKPSIPFIWTEEHQQAFDHIKKALLSAPALALPDLTKPFTLYIDERAGVARGVLTQTLGPWRRPVAYLSKKLDPVASGWPTCLKAVAAVALLLKDADKLTLGQNVTVIASHSLESIVRQPPDRWMTNARMTHYQSLLLNERVSFAPPAVLNPATLLPVESEATPVHRCSEILAEETGTRRDLEDQPLPGVPTWYTDGSSFITEGKRRAGAPIVDGKRTVWASSLPEGTSAQKAELVALTQALRLAEGKNINIYTDSRYAFATAHIHGAIYKQRGWLTSAGKDIKNKEEILALLEAIHLPRRVAIIHCPGHQRGSNPVATGNRRADEAAKQAALSTRVLAGTTKPAGKRTADGSEFEKRTADGSEFESPKKKAKVE

SEQ ID NO: 1371 - protein, 2098 aa, synthetic construct
MPAAKRVKLDGGDKKYSIGLDIGTNSVGWAVITDEYKVPSKKFKVLGNTDRHSIKKNLIGALLFDSGETAEATRLKRTARRRYTRRKNRICYLQEIFSNEMAKVDDSFFHRLEESFLVEEDKKHERHPIFGNIVDEVAYHEKYPTIYHLRKKLVDSTDKADLRLIYLALAHMIKFRGHFLIEGDLNPDNSDVDKLFIQLVQTYNQLFEENPINASGVDAKAILSARLSKSRRLENLIAQLPGEKKNGLFGNLIALSLGLTPNFKSNFDLAEDAKLQLSKDTYDDDLDNLLAQIGDQYADLFLAAKNLSDAILLSDILRVNTEITKAPLSASMIKRYDEHHQDLTLLKALVRQQLPEKYKEIFFDQSKNGYAGYIDGGASQEEFYKFIKPILEKMDGTEELLVKLNREDLLRKQRTFDNGSIPHQIHLGELHAILRRQEDFYPFLKDNREKIEKILTFRIPYYVGPLARGNSRFAWMTRKSEETITPWNFEEVVDKGASAQSFIERMTNFDKNLPNEKVLPKHSLLYEYFTVYNELTKVKYVTEGMRKPAFLSGEQKKAIVDLLFKTNRKVTVKQLKEDYFKKIECFDSVEISGVEDRFNASLGTYHDLLKIIKDKDFLDNEENEDILEDIVLTLTLFEDREMIEERLKTYAHLFDDKVMKQLKRRRYTGWGRLSRKLINGIRDKQSGKTILDFLKSDGFANRNFMQLIHDDSLTFKEDIQKAQVSGQGDSLHEHIANLAGSPAIKKGILQTVKVVDELVKVMGRHKPENIVIEMARENQTTQKGQKNSRERMKRIEEGIKELGSQILKEHPVENTQLQNEKLYLYYLQNGRDMYVDQELDINRLSDYDVDHIVPQSFLKDDSIDNKVLTRSDKARGKSDNVPSEEVVKKMKNYWRQLLNAKLITQRKFDNLTKAERGGLSELDKAGFIKRQLVETRQITKHVAQILDSRMNTKYDENDKLIREVKVITLKSKLVSDFRKDFQFYKVREINNYHHAHDAYLNAVVGTALIKKYPKLESEFVYGDYKVYDVRKMIAKSEQEIGKATAKYFFYSNIMNFFKTEITLANGEIRKRPLIETNGETGEIVWDKGRDFATVRKVLSMPQVNIVKKTEVQTGGFSKESILPKRNSDKLIARKKDWDPKKYGGFDSPTVAYSVLVVAKVEKGKSKKLKSVKELLGITIMERSSFEKNPIDFLEAKGYKEVKKDLIIKLPKYSLFELENGRKRMLASAGELQKGNELALPSKYVNFLYLASHYEKLKGSPEDNEQKQLFVEQHKHYLDEIIEQISEFSKRVILADANLDKVLSAYNKHRDKPIREQAENIIHLFTLTNLGAPAAFKYFDTTIDRKRYTSTKEVLDATLIHQSITGLYETRIDLSQLGGDGGPAPGGSEAAAKGGTAPLEEEYRLFLEAPIQNVTLLEQWKREIPKVWAEINPPGLASTQAPIHVQLLSTALPVRVRQYPITLEAKRSLRETIRKFRAAGILRPVHSPWNTPLLPVRKSGTSEYRMVQDLREVNKRVETIHPTVPNPYTLLSLLPPDRIWYSVLDLKDAFFCIPLAPESQLIFAFEWADAEEGESGQLTWTRLPQGFKNSPTLFNEALNRDLQGFRLDHPSVSLLQYVDDLLIAADTQAACLSATRDLLMTLAELGYRVSGKKAQLCQEEVTYLGFKIHKGSRSLSNSRTQAILQIPVPKTKRQVREFLGKIGYCRLFIPGFAELAQPLYAATRPGNDPLVWGEKEEEAFQSLKLALTQPPALALPSLDKPFQLFVEETSGAAKGVLTQALGPWKRPVAYLSKRLDPVAAGWPRCLRAIAAAALLTREASKLTFGQDIEITSSHNLESLLRSPPDKWLTNARITQYQVLLLDPPRVRFKQTAALNPATLLPETDDTLPIHHCLDTLDSLTSTRPDLTDQPLAQAEATLFTDGSSYIRDGKRYAGAAVVTLDSVIWAEPLPIGTSAQKAELIALTKALEWSKDKSVNIYTDSRYAFATLHVHGMIYRERGWLTAGGKAIKNAPEILALLTAVWLPKRVAVMHCKGHQKDDAPTSTGNRRADEVAREVAIRPLSTQATISAGKRTADGSEFEKRTADGSEFESPKKKAKVE

SEQ ID NO: 1372 - protein, 2133 aa, synthetic construct
MPAAKRVKLDGGDKKYSIGLDIGTNSVGWAVITDEYKVPSKKFKVLGNTDRHSIKKNLIGALLFDSGETAEATRLKRTARRRYTRRKNRICYLQEIFSNEMAKVDDSFFHRLEESFLVEEDKKHERHPIFGNIVDEVAYHEKYPTIYHLRKKLVDSTDKADLRLIYLALAHMIKFRGHFLIEGDLNPDNSDVDKLFIQLVQTYNQLFEENPINASGVDAKAILSARLSKSRRLENLIAQLPGEKKNGLFGNLIALSLGLTPNFKSNFDLAEDAKLQLSKDTYDDDLDNLLAQIGDQYADLFLAAKNLSDAILLSDILRVNTEITKAPLSASMIKRYDEHHQDLTLLKALVRQQLPEKYKEIFFDQSKNGYAGYIDGGASQEEFYKFIKPILEKMDGTEELLVKLNREDLLRKQRTFDNGSIPHQIHLGELHAILRRQEDFYPFLKDNREKIEKILTFRIPYYVGPLARGNSRFAWMTRKSEETITPWNFEEVVDKGASAQSFIERMTNFDKNLPNEKVLPKHSLLYEYFTVYNELTKVKYVTEGMRKPAFLSGEQKKAIVDLLFKTNRKVTVKQLKEDYFKKIECFDSVEISGVEDRFNASLGTYHDLLKIIKDKDFLDNEENEDILEDIVLTLTLFEDREMIEERLKTYAHLFDDKVMKQLKRRRYTGWGRLSRKLINGIRDKQSGKTILDFLKSDGFANRNFMQLIHDDSLTFKEDIQKAQVSGQGDSLHEHIANLAGSPAIKKGILQTVKVVDELVKVMGRHKPENIVIEMARENQTTQKGQKNSRERMKRIEEGIKELGSQILKEHPVENTQLQNEKLYLYYLQNGRDMYVDQELDINRLSDYDVDHIVPQSFLKDDSIDNKVLTRSDKARGKSDNVPSEEVVKKMKNYWRQLLNAKLITQRKFDNLTKAERGGLSELDKAGFIKRQLVETRQITKHVAQILDSRMNTKYDENDKLIREVKVITLKSKLVSDFRKDFQFYKVREINNYHHAHDAYLNAVVGTALIKKYPKLESEFVYGDYKVYDVRKMIAKSEQEIGKATAKYFFYSNIMNFFKTEITLANGEIRKRPLIETNGETGEIVWDKGRDFATVRKVLSMPQVNIVKKTEVQTGGFSKESILPKRNSDKLIARKKDWDPKKYGGFDSPTVAYSVLVVAKVEKGKSKKLKSVKELLGITIMERSSFEKNPIDFLEAKGYKEVKKDLIIKLPKYSLFELENGRKRMLASAGELQKGNELALPSKYVNFLYLASHYEKLKGSPEDNEQKQLFVEQHKHYLDEIIEQISEFSKRVILADANLDKVLSAYNKHRDKPIREQAENIIHLFTLTNLGAPAAFKYFDTTIDRKRYTSTKEVLDATLIHQSITGLYETRIDLSQLGGDGGAEAAAKEAAAKEAAAKEAAAKALEAEAAAKEAAAKEAAAKEAAAKAGGTAPLEEEYRLFLEAPIQNVTLLEQWKREIPKVWAEINPPGLASTQAPIHVQLLSTALPVRVRQYPITLEAKRSLRETIRKFRAAGILRPVHSPWNTPLLPVRKSGTSEYRMVQDLREVNKRVETIHPTVPNPYTLLSLLPPDRIWYSVLDLKDAFFCIPLAPESQLIFAFEWADAEEGESGQLTWTRLPQGFKNSPTLFNEALNRDLQGFRLDHPSVSLLQYVDDLLIAADTQAACLSATRDLLMTLAELGYRVSGKKAQLCQEEVTYLGFKIHKGSRSLSNSRTQAILQIPVPKTKRQVREFLGKIGYCRLFIPGFAELAQPLYAATRPGNDPLVWGEKEEEAFQSLKLALTQPPALALPSLDKPFQLFVEETSGAAKGVLTQALGPWKRPVAYLSKRLDPVAAGWPRCLRAIAAAALLTREASKLTFGQDIEITSSHNLESLLRSPPDKWLTNARITQYQVLLLDPPRVRFKQTAALNPATLLPETDDTLPIHHCLDTLDSLTSTRPDLTDQPLAQAEATLFTDGSSYIRDGKRYAGAAVVTLDSVIWAEPLPIGTSAQKAELIALTKALEWSKDKSVNIYTDSRYAFATLHVHGMIYRERGWLTAGGKAIKNAPEILALLTAVWLPKRVAVMHCKGHQKDDAPTSTGNRRADEVAREVAIRPLSTQATISAGKRTADGSEFEKRTADGSEFESPKKKAKVE

SEQ ID NO: 1373 - protein, 2117 aa, synthetic construct
MPAAKRVKLDGGDKKYSIGLDIGTNSVGWAVITDEYKVPSKKFKVLGNTDRHSIKKNLIGALLFDSGETAEATRLKRTARRRYTRRKNRICYLQEIFSNEMAKVDDSFFHRLEESFLVEEDKKHERHPIFGNIVDEVAYHEKYPTIYHLRKKLVDSTDKADLRLIYLALAHMIKFRGHFLIEGDLNPDNSDVDKLFIQLVQTYNQLFEENPINASGVDAKAILSARLSKSRRLENLIAQLPGEKKNGLFGNLIALSLGLTPNFKSNFDLAEDAKLQLSKDTYDDDLDNLLAQIGDQYADLFLAAKNLSDAILLSDILRVNTEITKAPLSASMIKRYDEHHQDLTLLKALVRQQLPEKYKEIFFDQSKNGYAGYIDGGASQEEFYKFIKPILEKMDGTEELLVKLNREDLLRKQRTFDNGSIPHQIHLGELHAILRRQEDFYPFLKDNREKIEKILTFRIPYYVGPLARGNSRFAWMTRKSEETITPWNFEEVVDKGASAQSFIERMTNFDKNLPNEKVLPKHSLLYEYFTVYNELTKVKYVTEGMRKPAFLSGEQKKAIVDLLFKTNRKVTVKQLKEDYFKKIECFDSVEISGVEDRFNASLGTYHDLLKIIKDKDFLDNEENEDILEDIVLTLTLFEDREMIEERLKTYAHLFDDKVMKQLKRRRYTGWGRLSRKLINGIRDKQSGKTILDFLKSDGFANRNFMQLIHDDSLTFKEDIQKAQVSGQGDSLHEHIANLAGSPAIKKGILQTVKVVDELVKVMGRHKPENIVIEMARENQTTQKGQKNSRERMKRIEEGIKELGSQILKEHPVENTQLQNEKLYLYYLQNGRDMYVDQELDINRLSDYDVDHIVPQSFLKDDSIDNKVLTRSDKARGKSDNVPSEEVVKKMKNYWRQLLNAKLITQRKFDNLTKAERGGLSELDKAGFIKRQLVETRQITKHVAQILDSRMNTKYDENDKLIREVKVITLKSKLVSDFRKDFQFYKVREINNYHHAHDAYLNAVVGTALIKKYPKLESEFVYGDYKVYDVRKMIAKSEQEIGKATAKYFFYSNIMNFFKTEITLANGEIRKRPLIETNGETGEIVWDKGRDFATVRKVLSMPQVNIVKKTEVQTGGFSKESILPKRNSDKLIARKKDWDPKKYGGFDSPTVAYSVLVVAKVEKGKSKKLKSVKELLGITIMERSSFEKNPIDFLEAKGYKEVKKDLIIKLPKYSLFELENGRKRMLASAGELQKGNELALPSKYVNFLYLASHYEKLKGSPEDNEQKQLFVEQHKHYLDEIIEQISEFSKRVILADANLDKVLSAYNKHRDKPIREQAENIIHLFTLTNLGAPAAFKYFDTTIDRKRYTSTKEVLDATLIHQSITGLYETRIDLSQLGGDGGGGGGSGGGGSGGGGSGGGGSGGGGSGGGGSGGTAPLEEEYRLFLEAPIQNVTLLEQWKREIPKVWAEINPPGLASTQAPIHVQLLSTALPVRVRQYPITLEAKRSLRETIRKFRAAGILRPVHSPWNTPLLPVRKSGTSEYRMVQDLREVNKRVETIHPTVPNPYTLLSLLPPDRIWYSVLDLKDAFFCIPLAPESQLIFAFEWADAEEGESGQLTWTRLPQGFKNSPTLFNEALNRDLQGFRLDHPSVSLLQYVDDLLIAADTQAACLSATRDLLMTLAELGYRVSGKKAQLCQEEVTYLGFKIHKGSRSLSNSRTQAILQIPVPKTKRQVREFLGKIGYCRLFIPGFAELAQPLYAATRPGNDPLVWGEKEEEAFQSLKLALTQPPALALPSLDKPFQLFVEETSGAAKGVLTQALGPWKRPVAYLSKRLDPVAAGWPRCLRAIAAAALLTREASKLTFGQDIEITSSHNLESLLRSPPDKWLTNARITQYQVLLLDPPRVRFKQTAALNPATLLPETDDTLPIHHCLDTLDSLTSTRPDLTDQPLAQAEATLFTDGSSYIRDGKRYAGAAVVTLDSVIWAEPLPIGTSAQKAELIALTKALEWSKDKSVNIYTDSRYAFATLHVHGMIYRERGWLTAGGKAIKNAPEILALLTAVWLPKRVAVMHCKGHQKDDAPTSTGNRRADEVAREVAIRPLSTQATISAGKRTADGSEFEKRTADGSEFESPKKKAKVE

SEQ ID NO: 1374 - protein, 2107 aa, synthetic construct
MPAAKRVKLDGGDKKYSIGLDIGTNSVGWAVITDEYKVPSKKFKVLGNTDRHSIKKNLIGALLFDSGETAEATRLKRTARRRYTRRKNRICYLQEIFSNEMAKVDDSFFHRLEESFLVEEDKKHERHPIFGNIVDEVAYHEKYPTIYHLRKKLVDSTDKADLRLIYLALAHMIKFRGHFLIEGDLNPDNSDVDKLFIQLVQTYNQLFEENPINASGVDAKAILSARLSKSRRLENLIAQLPGEKKNGLFGNLIALSLGLTPNFKSNFDLAEDAKLQLSKDTYDDDLDNLLAQIGDQYADLFLAAKNLSDAILLSDILRVNTEITKAPLSASMIKRYDEHHQDLTLLKALVRQQLPEKYKEIFFDQSKNGYAGYIDGGASQEEFYKFIKPILEKMDGTEELLVKLNREDLLRKQRTFDNGSIPHQIHLGELHAILRRQEDFYPFLKDNREKIEKILTFRIPYYVGPLARGNSRFAWMTRKSEETITPWNFEEVVDKGASAQSFIERMTNFDKNLPNEKVLPKHSLLYEYFTVYNELTKVKYVTEGMRKPAFLSGEQKKAIVDLLFKTNRKVTVKQLKEDYFKKIECFDSVEISGVEDRFNASLGTYHDLLKIIKDKDFLDNEENEDILEDIVLTLTLFEDREMIEERLKTYAHLFDDKVMKQLKRRRYTGWGRLSRKLINGIRDKQSGKTILDFLKSDGFANRNFMQLIHDDSLTFKEDIQKAQVSGQGDSLHEHIANLAGSPAIKKGILQTVKVVDELVKVMGRHKPENIVIEMARENQTTQKGQKNSRERMKRIEEGIKELGSQILKEHPVENTQLQNEKLYLYYLQNGRDMYVDQELDINRLSDYDVDHIVPQSFLKDDSIDNKVLTRSDKARGKSDNVPSEEVVKKMKNYWRQLLNAKLITQRKFDNLTKAERGGLSELDKAGFIKRQLVETRQITKHVAQILDSRMNTKYDENDKLIREVKVITLKSKLVSDFRKDFQFYKVREINNYHHAHDAYLNAVVGTALIKKYPKLESEFVYGDYKVYDVRKMIAKSEQEIGKATAKYFFYSNIMNFFKTEITLANGEIRKRPLIETNGETGEIVWDKGRDFATVRKVLSMPQVNIVKKTEVQTGGFSKESILPKRNSDKLIARKKDWDPKKYGGFDSPTVAYSVLVVAKVEKGKSKKLKSVKELLGITIMERSSFEKNPIDFLEAKGYKEVKKDLIIKLPKYSLFELENGRKRMLASAGELQKGNELALPSKYVNFLYLASHYEKLKGSPEDNEQKQLFVEQHKHYLDEIIEQISEFSKRVILADANLDKVLSAYNKHRDKPIREQAENIIHLFTLTNLGAPAAFKYFDTTIDRKRYTSTKEVLDATLIHQSITGLYETRIDLSQLGGDGGGGGGSGGGGSGGGGSGGGGSGGTAPLEEEYRLFLEAPIQNVTLLEQWKREIPKVWAEINPPGLASTQAPIHVQLLSTALPVRVRQYPITLEAKRSLRETIRKFRAAGILRPVHSPWNTPLLPVRKSGTSEYRMVQDLREVNKRVETIHPTVPNPYTLLSLLPPDRIWYSVLDLKDAFFCIPLAPESQLIFAFEWADAEEGESGQLTWTRLPQGFKNSPTLFNEALNRDLQGFRLDHPSVSLLQYVDDLLIAADTQAACLSATRDLLMTLAELGYRVSGKKAQLCQEEVTYLGFKIHKGSRSLSNSRTQAILQIPVPKTKRQVREFLGKIGYCRLFIPGFAELAQPLYAATRPGNDPLVWGEKEEEAFQSLKLALTQPPALALPSLDKPFQLFVEETSGAAKGVLTQALGPWKRPVAYLSKRLDPVAAGWPRCLRAIAAAALLTREASKLTFGQDIEITSSHNLESLLRSPPDKWLTNARITQYQVLLLDPPRVRFKQTAALNPATLLPETDDTLPIHHCLDTLDSLTSTRPDLTDQPLAQAEATLFTDGSSYIRDGKRYAGAAVVTLDSVIWAEPLPIGTSAQKAELIALTKALEWSKDKSVNIYTDSRYAFATLHVHGMIYRERGWLTAGGKAIKNAPEILALLTAVWLPKRVAVMHCKGHQKDDAPTSTGNRRADEVAREVAIRPLSTQATISAGKRTADGSEFEKRTADGSEFESPKKKAKVE

SEQ ID NO: 1375 - protein, 2093 aa, synthetic construct
MPAAKRVKLDGGDKKYSIGLDIGTNSVGWAVITDEYKVPSKKFKVLGNTDRHSIKKNLIGALLFDSGETAEATRLKRTARRRYTRRKNRICYLQEIFSNEMAKVDDSFFHRLEESFLVEEDKKHERHPIFGNIVDEVAYHEKYPTIYHLRKKLVDSTDKADLRLIYLALAHMIKFRGHFLIEGDLNPDNSDVDKLFIQLVQTYNQLFEENPINASGVDAKAILSARLSKSRRLENLIAQLPGEKKNGLFGNLIALSLGLTPNFKSNFDLAEDAKLQLSKDTYDDDLDNLLAQIGDQYADLFLAAKNLSDAILLSDILRVNTEITKAPLSASMIKRYDEHHQDLTLLKALVRQQLPEKYKEIFFDQSKNGYAGYIDGGASQEEFYKFIKPILEKMDGTEELLVKLNREDLLRKQRTFDNGSIPHQIHLGELHAILRRQEDFYPFLKDNREKIEKILTFRIPYYVGPLARGNSRFAWMTRKSEETITPWNFEEVVDKGASAQSFIERMTNFDKNLPNEKVLPKHSLLYEYFTVYNELTKVKYVTEGMRKPAFLSGEQKKAIVDLLFKTNRKVTVKQLKEDYFKKIECFDSVEISGVEDRFNASLGTYHDLLKIIKDKDFLDNEENEDILEDIVLTLTLFEDREMIEERLKTYAHLFDDKVMKQLKRRRYTGWGRLSRKLINGIRDKQSGKTILDFLKSDGFANRNFMQLIHDDSLTFKEDIQKAQVSGQGDSLHEHIANLAGSPAIKKGILQTVKVVDELVKVMGRHKPENIVIEMARENQTTQKGQKNSRERMKRIEEGIKELGSQILKEHPVENTQLQNEKLYLYYLQNGRDMYVDQELDINRLSDYDVDHIVPQSFLKDDSIDNKVLTRSDKARGKSDNVPSEEVVKKMKNYWRQLLNAKLITQRKFDNLTKAERGGLSELDKAGFIKRQLVETRQITKHVAQILDSRMNTKYDENDKLIREVKVITLKSKLVSDFRKDFQFYKVREINNYHHAHDAYLNAVVGTALIKKYPKLESEFVYGDYKVYDVRKMIAKSEQEIGKATAKYFFYSNIMNFFKTEITLANGEIRKRPLIETNGETGEIVWDKGRDFATVRKVLSMPQVNIVKKTEVQTGGFSKESILPKRNSDKLIARKKDWDPKKYGGFDSPTVAYSVLVVAKVEKGKSKKLKSVKELLGITIMERSSFEKNPIDFLEAKGYKEVKKDLIIKLPKYSLFELENGRKRMLASAGELQKGNELALPSKYVNFLYLASHYEKLKGSPEDNEQKQLFVEQHKHYLDEIIEQISEFSKRVILADANLDKVLSAYNKHRDKPIREQAENIIHLFTLTNLGAPAAFKYFDTTIDRKRYTSTKEVLDATLIHQSITGLYETRIDLSQLGGDGGGSSPAPGGTAPLEEEYRLFLEAPIQNVTLLEQWKREIPKVWAEINPPGLASTQAPIHVQLLSTALPVRVRQYPITLEAKRSLRETIRKFRAAGILRPVHSPWNTPLLPVRKSGTSEYRMVQDLREVNKRVETIHPTVPNPYTLLSLLPPDRIWYSVLDLKDAFFCIPLAPESQLIFAFEWADAEEGESGQLTWTRLPQGFKNSPTLFNEALNRDLQGFRLDHPSVSLLQYVDDLLIAADTQAACLSATRDLLMTLAELGYRVSGKKAQLCQEEVTYLGFKIHKGSRSLSNSRTQAILQIPVPKTKRQVREFLGKIGYCRLFIPGFAELAQPLYAATRPGNDPLVWGEKEEEAFQSLKLALTQPPALALPSLDKPFQLFVEETSGAAKGVLTQALGPWKRPVAYLSKRLDPVAAGWPRCLRAIAAAALLTREASKLTFGQDIEITSSHNLESLLRSPPDKWLTNARITQYQVLLLDPPRVRFKQTAALNPATLLPETDDTLPIHHCLDTLDSLTSTRPDLTDQPLAQAEATLFTDGSSYIRDGKRYAGAAVVTLDSVIWAEPLPIGTSAQKAELIALTKALEWSKDKSVNIYTDSRYAFATLHVHGMIYRERGWLTAGGKAIKNAPEILALLTAVWLPKRVAVMHCKGHQKDDAPTSTGNRRADEVAREVAIRPLSTQATISAGKRTADGSEFEKRTADGSEFESPKKKAKVE

SEQ ID NO: 1376 - protein, 2103 aa, synthetic construct
MPAAKRVKLDGGDKKYSIGLDIGTNSVGWAVITDEYKVPSKKFKVLGNTDRHSIKKNLIGALLFDSGETAEATRLKRTARRRYTRRKNRICYLQEIFSNEMAKVDDSFFHRLEESFLVEEDKKHERHPIFGNIVDEVAYHEKYPTIYHLRKKLVDSTDKADLRLIYLALAHMIKFRGHFLIEGDLNPDNSDVDKLFIQLVQTYNQLFEENPINASGVDAKAILSARLSKSRRLENLIAQLPGEKKNGLFGNLIALSLGLTPNFKSNFDLAEDAKLQLSKDTYDDDLDNLLAQIGDQYADLFLAAKNLSDAILLSDILRVNTEITKAPLSASMIKRYDEHHQDLTLLKALVRQQLPEKYKEIFFDQSKNGYAGYIDGGASQEEFYKFIKPILEKMDGTEELLVKLNREDLLRKQRTFDNGSIPHQIHLGELHAILRRQEDFYPFLKDNREKIEKILTFRIPYYVGPLARGNSRFAWMTRKSEETITPWNFEEVVDKGASAQSFIERMTNFDKNLPNEKVLPKHSLLYEYFTVYNELTKVKYVTEGMRKPAFLSGEQKKAIVDLLFKTNRKVTVKQLKEDYFKKIECFDSVEISGVEDRFNASLGTYHDLLKIIKDKDFLDNEENEDILEDIVLTLTLFEDREMIEERLKTYAHLFDDKVMKQLKRRRYTGWGRLSRKLINGIRDKQSGKTILDFLKSDGFANRNFMQLIHDDSLTFKEDIQKAQVSGQGDSLHEHIANLAGSPAIKKGILQTVKVVDELVKVMGRHKPENIVIEMARENQTTQKGQKNSRERMKRIEEGIKELGSQILKEHPVENTQLQNEKLYLYYLQNGRDMYVDQELDINRLSDYDVDHIVPQSFLKDDSIDNKVLTRSDKARGKSDNVPSEEVVKKMKNYWRQLLNAKLITQRKFDNLTKAERGGLSELDKAGFIKRQLVETRQITKHVAQILDSRMNTKYDENDKLIREVKVITLKSKLVSDFRKDFQFYKVREINNYHHAHDAYLNAVVGTALIKKYPKLESEFVYGDYKVYDVRKMIAKSEQEIGKATAKYFFYSNIMNFFKTEITLANGEIRKRPLIETNGETGEIVWDKGRDFATVRKVLSMPQVNIVKKTEVQTGGFSKESILPKRNSDKLIARKKDWDPKKYGGFDSPTVAYSVLVVAKVEKGKSKKLKSVKELLGITIMERSSFEKNPIDFLEAKGYKEVKKDLIIKLPKYSLFELENGRKRMLASAGELQKGNELALPSKYVNFLYLASHYEKLKGSPEDNEQKQLFVEQHKHYLDEIIEQISEFSKRVILADANLDKVLSAYNKHRDKPIREQAENIIHLFTLTNLGAPAAFKYFDTTIDRKRYTSTKEVLDATLIHQSITGLYETRIDLSQLGGDGGSGSETPGTSESATPESGGTAPLEEEYRLFLEAPIQNVTLLEQWKREIPKVWAEINPPGLASTQAPIHVQLLSTALPVRVRQYPITLEAKRSLRETIRKFRAAGILRPVHSPWNTPLLPVRKSGTSEYRMVQDLREVNKRVETIHPTVPNPYTLLSLLPPDRIWYSVLDLKDAFFCIPLAPESQLIFAFEWADAEEGESGQLTWTRLPQGFKNSPTLFNEALNRDLQGFRLDHPSVSLLQYVDDLLIAADTQAACLSATRDLLMTLAELGYRVSGKKAQLCQEEVTYLGFKIHKGSRSLSNSRTQAILQIPVPKTKRQVREFLGKIGYCRLFIPGFAELAQPLYAATRPGNDPLVWGEKEEEAFQSLKLALTQPPALALPSLDKPFQLFVEETSGAAKGVLTQALGPWKRPVAYLSKRLDPVAAGWPRCLRAIAAAALLTREASKLTFGQDIEITSSHNLESLLRSPPDKWLTNARITQYQVLLLDPPRVRFKQTAALNPATLLPETDDTLPIHHCLDTLDSLTSTRPDLTDQPLAQAEATLFTDGSSYIRDGKRYAGAAVVTLDSVIWAEPLPIGTSAQKAELIALTKALEWSKDKSVNIYTDSRYAFATLHVHGMIYRERGWLTAGGKAIKNAPEILALLTAVWLPKRVAVMHCKGHQKDDAPTSTGNRRADEVAREVAIRPLSTQATISAGKRTADGSEFEKRTADGSEFESPKKKAKVE

SEQ ID NO: 1377 - protein, 2098 aa, synthetic construct
MPAAKRVKLDGGDKKYSIGLDIGTNSVGWAVITDEYKVPSKKFKVLGNTDRHSIKKNLIGALLFDSGETAEATRLKRTARRRYTRRKNRICYLQEIFSNEMAKVDDSFFHRLEESFLVEEDKKHERHPIFGNIVDEVAYHEKYPTIYHLRKKLVDSTDKADLRLIYLALAHMIKFRGHFLIEGDLNPDNSDVDKLFIQLVQTYNQLFEENPINASGVDAKAILSARLSKSRRLENLIAQLPGEKKNGLFGNLIALSLGLTPNFKSNFDLAEDAKLQLSKDTYDDDLDNLLAQIGDQYADLFLAAKNLSDAILLSDILRVNTEITKAPLSASMIKRYDEHHQDLTLLKALVRQQLPEKYKEIFFDQSKNGYAGYIDGGASQEEFYKFIKPILEKMDGTEELLVKLNREDLLRKQRTFDNGSIPHQIHLGELHAILRRQEDFYPFLKDNREKIEKILTFRIPYYVGPLARGNSRFAWMTRKSEETITPWNFEEVVDKGASAQSFIERMTNFDKNLPNEKVLPKHSLLYEYFTVYNELTKVKYVTEGMRKPAFLSGEQKKAIVDLLFKTNRKVTVKQLKEDYFKKIECFDSVEISGVEDRFNASLGTYHDLLKIIKDKDFLDNEENEDILEDIVLTLTLFEDREMIEERLKTYAHLFDDKVMKQLKRRRYTGWGRLSRKLINGIRDKQSGKTILDFLKSDGFANRNFMQLIHDDSLTFKEDIQKAQVSGQGDSLHEHIANLAGSPAIKKGILQTVKVVDELVKVMGRHKPENIVIEMARENQTTQKGQKNSRERMKRIEEGIKELGSQILKEHPVENTQLQNEKLYLYYLQNGRDMYVDQELDINRLSDYDVDHIVPQSFLKDDSIDNKVLTRSDKARGKSDNVPSEEVVKKMKNYWRQLLNAKLITQRKFDNLTKAERGGLSELDKAGFIKRQLVETRQITKHVAQILDSRMNTKYDENDKLIREVKVITLKSKLVSDFRKDFQFYKVREINNYHHAHDAYLNAVVGTALIKKYPKLESEFVYGDYKVYDVRKMIAKSEQEIGKATAKYFFYSNIMNFFKTEITLANGEIRKRPLIETNGETGEIVWDKGRDFATVRKVLSMPQVNIVKKTEVQTGGFSKESILPKRNSDKLIARKKDWDPKKYGGFDSPTVAYSVLVVAKVEKGKSKKLKSVKELLGITIMERSSFEKNPIDFLEAKGYKEVKKDLIIKLPKYSLFELENGRKRMLASAGELQKGNELALPSKYVNFLYLASHYEKLKGSPEDNEQKQLFVEQHKHYLDEIIEQISEFSKRVILADANLDKVLSAYNKHRDKPIREQAENIIHLFTLTNLGAPAAFKYFDTTIDRKRYTSTKEVLDATLIHQSITGLYETRIDLSQLGGDGGPAPEAAAKGGSGGTAPLEEEYRLFLEAPIQNVTLLEQWKREIPKVWAEINPPGLASTQAPIHVQLLSTALPVRVRQYPITLEAKRSLRETIRKFRAAGILRPVHSPWNTPLLPVRKSGTSEYRMVQDLREVNKRVETIHPTVPNPYTLLSLLPPDRIWYSVLDLKDAFFCIPLAPESQLIFAFEWADAEEGESGQLTWTRLPQGFKNSPTLFNEALNRDLQGFRLDHPSVSLLQYVDDLLIAADTQAACLSATRDLLMTLAELGYRVSGKKAQLCQEEVTYLGFKIHKGSRSLSNSRTQAILQIPVPKTKRQVREFLGKIGYCRLFIPGFAELAQPLYAATRPGNDPLVWGEKEEEAFQSLKLALTQPPALALPSLDKPFQLFVEETSGAAKGVLTQALGPWKRPVAYLSKRLDPVAAGWPRCLRAIAAAALLTREASKLTFGQDIEITSSHNLESLLRSPPDKWLTNARITQYQVLLLDPPRVRFKQTAALNPATLLPETDDTLPIHHCLDTLDSLTSTRPDLTDQPLAQAEATLFTDGSSYIRDGKRYAGAAVVTLDSVIWAEPLPIGTSAQKAELIALTKALEWSKDKSVNIYTDSRYAFATLHVHGMIYRERGWLTAGGKAIKNAPEILALLTAVWLPKRVAVMHCKGHQKDDAPTSTGNRRADEVAREVAIRPLSTQATISAGKRTADGSEFEKRTADGSEFESPKKKAKVE

SEQ ID NO: 1378 - protein, 2092 aa, synthetic construct
MPAAKRVKLDGGDKKYSIGLDIGTNSVGWAVITDEYKVPSKKFKVLGNTDRHSIKKNLIGALLFDSGETAEATRLKRTARRRYTRRKNRICYLQEIFSNEMAKVDDSFFHRLEESFLVEEDKKHERHPIFGNIVDEVAYHEKYPTIYHLRKKLVDSTDKADLRLIYLALAHMIKFRGHFLIEGDLNPDNSDVDKLFIQLVQTYNQLFEENPINASGVDAKAILSARLSKSRRLENLIAQLPGEKKNGLFGNLIALSLGLTPNFKSNFDLAEDAKLQLSKDTYDDDLDNLLAQIGDQYADLFLAAKNLSDAILLSDILRVNTEITKAPLSASMIKRYDEHHQDLTLLKALVRQQLPEKYKEIFFDQSKNGYAGYIDGGASQEEFYKFIKPILEKMDGTEELLVKLNREDLLRKQRTFDNGSIPHQIHLGELHAILRRQEDFYPFLKDNREKIEKILTFRIPYYVGPLARGNSRFAWMTRKSEETITPWNFEEVVDKGASAQSFIERMTNFDKNLPNEKVLPKHSLLYEYFTVYNELTKVKYVTEGMRKPAFLSGEQKKAIVDLLFKTNRKVTVKQLKEDYFKKIECFDSVEISGVEDRFNASLGTYHDLLKIIKDKDFLDNEENEDILEDIVLTLTLFEDREMIEERLKTYAHLFDDKVMKQLKRRRYTGWGRLSRKLINGIRDKQSGKTILDFLKSDGFANRNFMQLIHDDSLTFKEDIQKAQVSGQGDSLHEHIANLAGSPAIKKGILQTVKVVDELVKVMGRHKPENIVIEMARENQTTQKGQKNSRERMKRIEEGIKELGSQILKEHPVENTQLQNEKLYLYYLQNGRDMYVDQELDINRLSDYDVDHIVPQSFLKDDSIDNKVLTRSDKARGKSDNVPSEEVVKKMKNYWRQLLNAKLITQRKFDNLTKAERGGLSELDKAGFIKRQLVETRQITKHVAQILDSRMNTKYDENDKLIREVKVITLKSKLVSDFRKDFQFYKVREINNYHHAHDAYLNAVVGTALIKKYPKLESEFVYGDYKVYDVRKMIAKSEQEIGKATAKYFFYSNIMNFFKTEITLANGEIRKRPLIETNGETGEIVWDKGRDFATVRKVLSMPQVNIVKKTEVQTGGFSKESILPKRNSDKLIARKKDWDPKKYGGFDSPTVAYSVLVVAKVEKGKSKKLKSVKELLGITIMERSSFEKNPIDFLEAKGYKEVKKDLIIKLPKYSLFELENGRKRMLASAGELQKGNELALPSKYVNFLYLASHYEKLKGSPEDNEQKQLFVEQHKHYLDEIIEQISEFSKRVILADANLDKVLSAYNKHRDKPIREQAENIIHLFTLTNLGAPAAFKYFDTTIDRKRYTSTKEVLDATLIHQSITGLYETRIDLSQLGGDGGPAPAPGGTAPLEEEYRLFLEAPIQNVTLLEQWKREIPKVWAEINPPGLASTQAPIHVQLLSTALPVRVRQYPITLEAKRSLRETIRKFRAAGILRPVHSPWNTPLLPVRKSGTSEYRMVQDLREVNKRVETIHPTVPNPYTLLSLLPPDRIWYSVLDLKDAFFCIPLAPESQLIFAFEWADAEEGESGQLTWTRLPQGFKNSPTLFNEALNRDLQGFRLDHPSVSLLQYVDDLLIAADTQAACLSATRDLLMTLAELGYRVSGKKAQLCQEEVTYLGFKIHKGSRSLSNSRTQAILQIPVPKTKRQVREFLGKIGYCRLFIPGFAELAQPLYAATRPGNDPLVWGEKEEEAFQSLKLALTQPPALALPSLDKPFQLFVEETSGAAKGVLTQALGPWKRPVAYLSKRLDPVAAGWPRCLRAIAAAALLTREASKLTFGQDIEITSSHNLESLLRSPPDKWLTNARITQYQVLLLDPPRVRFKQTAALNPATLLPETDDTLPIHHCLDTLDSLTSTRPDLTDQPLAQAEATLFTDGSSYIRDGKRYAGAAVVTLDSVIWAEPLPIGTSAQKAELIALTKALEWSKDKSVNIYTDSRYAFATLHVHGMIYRERGWLTAGGKAIKNAPEILALLTAVWLPKRVAVMHCKGHQKDDAPTSTGNRRADEVAREVAIRPLSTQATISAGKRTADGSEFEKRTADGSEFESPKKKAKVE

SEQ ID NO: 1379 - protein, 2098 aa, synthetic construct
MPAAKRVKLDGGDKKYSIGLDIGTNSVGWAVITDEYKVPSKKFKVLGNTDRHSIKKNLIGALLFDSGETAEATRLKRTARRRYTRRKNRICYLQEIFSNEMAKVDDSFFHRLEESFLVEEDKKHERHPIFGNIVDEVAYHEKYPTIYHLRKKLVDSTDKADLRLIYLALAHMIKFRGHFLIEGDLNPDNSDVDKLFIQLVQTYNQLFEENPINASGVDAKAILSARLSKSRRLENLIAQLPGEKKNGLFGNLIALSLGLTPNFKSNFDLAEDAKLQLSKDTYDDDLDNLLAQIGDQYADLFLAAKNLSDAILLSDILRVNTEITKAPLSASMIKRYDEHHQDLTLLKALVRQQLPEKYKEIFFDQSKNGYAGYIDGGASQEEFYKFIKPILEKMDGTEELLVKLNREDLLRKQRTFDNGSIPHQIHLGELHAILRRQEDFYPFLKDNREKIEKILTFRIPYYVGPLARGNSRFAWMTRKSEETITPWNFEEVVDKGASAQSFIERMTNFDKNLPNEKVLPKHSLLYEYFTVYNELTKVKYVTEGMRKPAFLSGEQKKAIVDLLFKTNRKVTVKQLKEDYFKKIECFDSVEISGVEDRFNASLGTYHDLLKIIKDKDFLDNEENEDILEDIVLTLTLFEDREMIEERLKTYAHLFDDKVMKQLKRRRYTGWGRLSRKLINGIRDKQSGKTILDFLKSDGFANRNFMQLIHDDSLTFKEDIQKAQVSGQGDSLHEHIANLAGSPAIKKGILQTVKVVDELVKVMGRHKPENIVIEMARENQTTQKGQKNSRERMKRIEEGIKELGSQILKEHPVENTQLQNEKLYLYYLQNGRDMYVDQELDINRLSDYDVDHIVPQSFLKDDSIDNKVLTRSDKARGKSDNVPSEEVVKKMKNYWRQLLNAKLITQRKFDNLTKAERGGLSELDKAGFIKRQLVETRQITKHVAQILDSRMNTKYDENDKLIREVKVITLKSKLVSDFRKDFQFYKVREINNYHHAHDAYLNAVVGTALIKKYPKLESEFVYGDYKVYDVRKMIAKSEQEIGKATAKYFFYSNIMNFFKTEITLANGEIRKRPLIETNGETGEIVWDKGRDFATVRKVLSMPQVNIVKKTEVQTGGFSKESILPKRNSDKLIARKKDWDPKKYGGFDSPTVAYSVLVVAKVEKGKSKKLKSVKELLGITIMERSSFEKNPIDFLEAKGYKEVKKDLIIKLPKYSLFELENGRKRMLASAGELQKGNELALPSKYVNFLYLASHYEKLKGSPEDNEQKQLFVEQHKHYLDEIIEQISEFSKRVILADANLDKVLSAYNKHRDKPIREQAENIIHLFTLTNLGAPAAFKYFDTTIDRKRYTSTKEVLDATLIHQSITGLYETRIDLSQLGGDGGGGGEAAAKGGSGGTAPLEEEYRLFLEAPIQNVTLLEQWKREIPKVWAEINPPGLASTQAPIHVQLLSTALPVRVRQYPITLEAKRSLRETIRKFRAAGILRPVHSPWNTPLLPVRKSGTSEYRMVQDLREVNKRVETIHPTVPNPYTLLSLLPPDRIWYSVLDLKDAFFCIPLAPESQLIFAFEWADAEEGESGQLTWTRLPQGFKNSPTLFNEALNRDLQGFRLDHPSVSLLQYVDDLLIAADTQAACLSATRDLLMTLAELGYRVSGKKAQLCQEEVTYLGFKIHKGSRSLSNSRTQAILQIPVPKTKRQVREFLGKIGYCRLFIPGFAELAQPLYAATRPGNDPLVWGEKEEEAFQSLKLALTQPPALALPSLDKPFQLFVEETSGAAKGVLTQALGPWKRPVAYLSKRLDPVAAGWPRCLRAIAAAALLTREASKLTFGQDIEITSSHNLESLLRSPPDKWLTNARITQYQVLLLDPPRVRFKQTAALNPATLLPETDDTLPIHHCLDTLDSLTSTRPDLTDQPLAQAEATLFTDGSSYIRDGKRYAGAAVVTLDSVIWAEPLPIGTSAQKAELIALTKALEWSKDKSVNIYTDSRYAFATLHVHGMIYRERGWLTAGGKAIKNAPEILALLTAVWLPKRVAVMHCKGHQKDDAPTSTGNRRADEVAREVAIRPLSTQATISAGKRTADGSEFEKRTADGSEFESPKKKAKVE

SEQ ID NO: 1380 - protein, 2092 aa, synthetic construct
MPAAKRVKLDGGDKKYSIGLDIGTNSVGWAVITDEYKVPSKKFKVLGNTDRHSIKKNLIGALLFDSGETAEATRLKRTARRRYTRRKNRICYLQEIFSNEMAKVDDSFFHRLEESFLVEEDKKHERHPIFGNIVDEVAYHEKYPTIYHLRKKLVDSTDKADLRLIYLALAHMIKFRGHFLIEGDLNPDNSDVDKLFIQLVQTYNQLFEENPINASGVDAKAILSARLSKSRRLENLIAQLPGEKKNGLFGNLIALSLGLTPNFKSNFDLAEDAKLQLSKDTYDDDLDNLLAQIGDQYADLFLAAKNLSDAILLSDILRVNTEITKAPLSASMIKRYDEHHQDLTLLKALVRQQLPEKYKEIFFDQSKNGYAGYIDGGASQEEFYKFIKPILEKMDGTEELLVKLNREDLLRKQRTFDNGSIPHQIHLGELHAILRRQEDFYPFLKDNREKIEKILTFRIPYYVGPLARGNSRFAWMTRKSEETITPWNFEEVVDKGASAQSFIERMTNFDKNLPNEKVLPKHSLLYEYFTVYNELTKVKYVTEGMRKPAFLSGEQKKAIVDLLFKTNRKVTVKQLKEDYFKKIECFDSVEISGVEDRFNASLGTYHDLLKIIKDKDFLDNEENEDILEDIVLTLTLFEDREMIEERLKTYAHLFDDKVMKQLKRRRYTGWGRLSRKLINGIRDKQSGKTILDFLKSDGFANRNFMQLIHDDSLTFKEDIQKAQVSGQGDSLHEHIANLAGSPAIKKGILQTVKVVDELVKVMGRHKPENIVIEMARENQTTQKGQKNSRERMKRIEEGIKELGSQILKEHPVENTQLQNEKLYLYYLQNGRDMYVDQELDINRLSDYDVDHIVPQSFLKDDSIDNKVLTRSDKARGKSDNVPSEEVVKKMKNYWRQLLNAKLITQRKFDNLTKAERGGLSELDKAGFIKRQLVETRQITKHVAQILDSRMNTKYDENDKLIREVKVITLKSKLVSDFRKDFQFYKVREINNYHHAHDAYLNAVVGTALIKKYPKLESEFVYGDYKVYDVRKMIAKSEQEIGKATAKYFFYSNIMNFFKTEITLANGEIRKRPLIETNGETGEIVWDKGRDFATVRKVLSMPQVNIVKKTEVQTGGFSKESILPKRNSDKLIARKKDWDPKKYGGFDSPTVAYSVLVVAKVEKGKSKKLKSVKELLGITIMERSSFEKNPIDFLEAKGYKEVKKDLIIKLPKYSLFELENGRKRMLASAGELQKGNELALPSKYVNFLYLASHYEKLKGSPEDNEQKQLFVEQHKHYLDEIIEQISEFSKRVILADANLDKVLSAYNKHRDKPIREQAENIIHLFTLTNLGAPAAFKYFDTTIDRKRYTSTKEVLDATLIHQSITGLYETRIDLSQLGGDGGEAAAKGGTAPLEEEYRLFLEAPIQNVTLLEQWKREIPKVWAEINPPGLASTQAPIHVQLLSTALPVRVRQYPITLEAKRSLRETIRKFRAAGILRPVHSPWNTPLLPVRKSGTSEYRMVQDLREVNKRVETIHPTVPNPYTLLSLLPPDRIWYSVLDLKDAFFCIPLAPESQLIFAFEWADAEEGESGQLTWTRLPQGFKNSPTLFNEALNRDLQGFRLDHPSVSLLQYVDDLLIAADTQAACLSATRDLLMTLAELGYRVSGKKAQLCQEEVTYLGFKIHKGSRSLSNSRTQAILQIPVPKTKRQVREFLGKIGYCRLFIPGFAELAQPLYAATRPGNDPLVWGEKEEEAFQSLKLALTQPPALALPSLDKPFQLFVEETSGAAKGVLTQALGPWKRPVAYLSKRLDPVAAGWPRCLRAIAAAALLTREASKLTFGQDIEITSSHNLESLLRSPPDKWLTNARITQYQVLLLDPPRVRFKQTAALNPATLLPETDDTLPIHHCLDTLDSLTSTRPDLTDQPLAQAEATLFTDGSSYIRDGKRYAGAAVVTLDSVIWAEPLPIGTSAQKAELIALTKALEWSKDKSVNIYTDSRYAFATLHVHGMIYRERGWLTAGGKAIKNAPEILALLTAVWLPKRVAVMHCKGHQKDDAPTSTGNRRADEVAREVAIRPLSTQATISAGKRTADGSEFEKRTADGSEFESPKKKAKVE

SEQ ID NO: 1381 - protein, 2098 aa, synthetic construct
MPAAKRVKLDGGDKKYSIGLDIGTNSVGWAVITDEYKVPSKKFKVLGNTDRHSIKKNLIGALLFDSGETAEATRLKRTARRRYTRRKNRICYLQEIFSNEMAKVDDSFFHRLEESFLVEEDKKHERHPIFGNIVDEVAYHEKYPTIYHLRKKLVDSTDKADLRLIYLALAHMIKFRGHFLIEGDLNPDNSDVDKLFIQLVQTYNQLFEENPINASGVDAKAILSARLSKSRRLENLIAQLPGEKKNGLFGNLIALSLGLTPNFKSNFDLAEDAKLQLSKDTYDDDLDNLLAQIGDQYADLFLAAKNLSDAILLSDILRVNTEITKAPLSASMIKRYDEHHQDLTLLKALVRQQLPEKYKEIFFDQSKNGYAGYIDGGASQEEFYKFIKPILEKMDGTEELLVKLNREDLLRKQRTFDNGSIPHQIHLGELHAILRRQEDFYPFLKDNREKIEKILTFRIPYYVGPLARGNSRFAWMTRKSEETITPWNFEEVVDKGASAQSFIERMTNFDKNLPNEKVLPKHSLLYEYFTVYNELTKVKYVTEGMRKPAFLSGEQKKAIVDLLFKTNRKVTVKQLKEDYFKKIECFDSVEISGVEDRFNASLGTYHDLLKIIKDKDFLDNEENEDILEDIVLTLTLFEDREMIEERLKTYAHLFDDKVMKQLKRRRYTGWGRLSRKLINGIRDKQSGKTILDFLKSDGFANRNFMQLIHDDSLTFKEDIQKAQVSGQGDSLHEHIANLAGSPAIKKGILQTVKVVDELVKVMGRHKPENIVIEMARENQTTQKGQKNSRERMKRIEEGIKELGSQILKEHPVENTQLQNEKLYLYYLQNGRDMYVDQELDINRLSDYDVDHIVPQSFLKDDSIDNKVLTRSDKARGKSDNVPSEEVVKKMKNYWRQLLNAKLITQRKFDNLTKAERGGLSELDKAGFIKRQLVETRQITKHVAQILDSRMNTKYDENDKLIREVKVITLKSKLVSDFRKDFQFYKVREINNYHHAHDAYLNAVVGTALIKKYPKLESEFVYGDYKVYDVRKMIAKSEQEIGKATAKYFFYSNIMNFFKTEITLANGEIRKRPLIETNGETGEIVWDKGRDFATVRKVLSMPQVNIVKKTEVQTGGFSKESILPKRNSDKLIARKKDWDPKKYGGFDSPTVAYSVLVVAKVEKGKSKKLKSVKELLGITIMERSSFEKNPIDFLEAKGYKEVKKDLIIKLPKYSLFELENGRKRMLASAGELQKGNELALPSKYVNFLYLASHYEKLKGSPEDNEQKQLFVEQHKHYLDEIIEQISEFSKRVILADANLDKVLSAYNKHRDKPIREQAENIIHLFTLTNLGAPAAFKYFDTTIDRKRYTSTKEVLDATLIHQSITGLYETRIDLSQLGGDGGGSSEAAAKPAPGGTAPLEEEYRLFLEAPIQNVTLLEQWKREIPKVWAEINPPGLASTQAPIHVQLLSTALPVRVRQYPITLEAKRSLRETIRKFRAAGILRPVHSPWNTPLLPVRKSGTSEYRMVQDLREVNKRVETIHPTVPNPYTLLSLLPPDRIWYSVLDLKDAFFCIPLAPESQLIFAFEWADAEEGESGQLTWTRLPQGFKNSPTLFNEALNRDLQGFRLDHPSVSLLQYVDDLLIAADTQAACLSATRDLLMTLAELGYRVSGKKAQLCQEEVTYLGFKIHKGSRSLSNSRTQAILQIPVPKTKRQVREFLGKIGYCRLFIPGFAELAQPLYAATRPGNDPLVWGEKEEEAFQSLKLALTQPPALALPSLDKPFQLFVEETSGAAKGVLTQALGPWKRPVAYLSKRLDPVAAGWPRCLRAIAAAALLTREASKLTFGQDIEITSSHNLESLLRSPPDKWLTNARITQYQVLLLDPPRVRFKQTAALNPATLLPETDDTLPIHHCLDTLDSLTSTRPDLTDQPLAQAEATLFTDGSSYIRDGKRYAGAAVVTLDSVIWAEPLPIGTSAQKAELIALTKALEWSKDKSVNIYTDSRYAFATLHVHGMIYRERGWLTAGGKAIKNAPEILALLTAVWLPKRVAVMHCKGHQKDDAPTSTGNRRADEVAREVAIRPLSTQATISAGKRTADGSEFEKRTADGSEFESPKKKAKVE

SEQ ID NO: 1382 - protein, 2105 aa, synthetic construct
MPAAKRVKLDGGDKKYSIGLDIGTNSVGWAVITDEYKVPSKKFKVLGNTDRHSIKKNLIGALLFDSGETAEATRLKRTARRRYTRRKNRICYLQEIFSNEMAKVDDSFFHRLEESFLVEEDKKHERHPIFGNIVDEVAYHEKYPTIYHLRKKLVDSTDKADLRLIYLALAHMIKFRGHFLIEGDLNPDNSDVDKLFIQLVQTYNQLFEENPINASGVDAKAILSARLSKSRRLENLIAQLPGEKKNGLFGNLIALSLGLTPNFKSNFDLAEDAKLQLSKDTYDDDLDNLLAQIGDQYADLFLAAKNLSDAILLSDILRVNTEITKAPLSASMIKRYDEHHQDLTLLKALVRQQLPEKYKEIFFDQSKNGYAGYIDGGASQEEFYKFIKPILEKMDGTEELLVKLNREDLLRKQRTFDNGSIPHQIHLGELHAILRRQEDFYPFLKDNREKIEKILTFRIPYYVGPLARGNSRFAWMTRKSEETITPWNFEEVVDKGASAQSFIERMTNFDKNLPNEKVLPKHSLLYEYFTVYNELTKVKYVTEGMRKPAFLSGEQKKAIVDLLFKTNRKVTVKQLKEDYFKKIECFDSVEISGVEDRFNASLGTYHDLLKIIKDKDFLDNEENEDILEDIVLTLTLFEDREMIEERLKTYAHLFDDKVMKQLKRRRYTGWGRLSRKLINGIRDKQSGKTILDFLKSDGFANRNFMQLIHDDSLTFKEDIQKAQVSGQGDSLHEHIANLAGSPAIKKGILQTVKVVDELVKVMGRHKPENIVIEMARENQTTQKGQKNSRERMKRIEEGIKELGSQILKEHPVENTQLQNEKLYLYYLQNGRDMYVDQELDINRLSDYDVDHIVPQSFLKDDSIDNKVLTRSDKARGKSDNVPSEEVVKKMKNYWRQLLNAKLITQRKFDNLTKAERGGLSELDKAGFIKRQLVETRQITKHVAQILDSRMNTKYDENDKLIREVKVITLKSKLVSDFRKDFQFYKVREINNYHHAHDAYLNAVVGTALIKKYPKLESEFVYGDYKVYDVRKMIAKSEQEIGKATAKYFFYSNIMNFFKTEITLANGEIRKRPLIETNGETGEIVWDKGRDFATVRKVLSMPQVNIVKKTEVQTGGFSKESILPKRNSDKLIARKKDWDPKKYGGFDSPTVAYSVLVVAKVEKGKSKKLKSVKELLGITIMERSSFEKNPIDFLEAKGYKEVKKDLIIKLPKYSLFELENGRKRMLASAGELQKGNELALPSKYVNFLYLASHYEKLKGSPEDNEQKQLFVEQHKHYLDEIIEQISEFSKRVILADANLDKVLSAYNKHRDKPIREQAENIIHLFTLTNLGAPAAFKYFDTTIDRKRYTSTKEVLDATLIHQSITGLYETRIDLSQLGGDGGGSSGSSGSSGSSGSSGSSGGTAPLEEEYRLFLEAPIQNVTLLEQWKREIPKVWAEINPPGLASTQAPIHVQLLSTALPVRVRQYPITLEAKRSLRETIRKFRAAGILRPVHSPWNTPLLPVRKSGTSEYRMVQDLREVNKRVETIHPTVPNPYTLLSLLPPDRIWYSVLDLKDAFFCIPLAPESQLIFAFEWADAEEGESGQLTWTRLPQGFKNSPTLFNEALNRDLQGFRLDHPSVSLLQYVDDLLIAADTQAACLSATRDLLMTLAELGYRVSGKKAQLCQEEVTYLGFKIHKGSRSLSNSRTQAILQIPVPKTKRQVREFLGKIGYCRLFIPGFAELAQPLYAATRPGNDPLVWGEKEEEAFQSLKLALTQPPALALPSLDKPFQLFVEETSGAAKGVLTQALGPWKRPVAYLSKRLDPVAAGWPRCLRAIAAAALLTREASKLTFGQDIEITSSHNLESLLRSPPDKWLTNARITQYQVLLLDPPRVRFKQTAALNPATLLPETDDTLPIHHCLDTLDSLTSTRPDLTDQPLAQAEATLFTDGSSYIRDGKRYAGAAVVTLDSVIWAEPLPIGTSAQKAELIALTKALEWSKDKSVNIYTDSRYAFATLHVHGMIYRERGWLTAGGKAIKNAPEILALLTAVWLPKRVAVMHCKGHQKDDAPTSTGNRRADEVAREVAIRPLSTQATISAGKRTADGSEFEKRTADGSEFESPKKKAKVE

SEQ ID NO: 1383 - protein, 2096 aa, synthetic construct
MPAAKRVKLDGGDKKYSIGLDIGTNSVGWAVITDEYKVPSKKFKVLGNTDRHSIKKNLIGALLFDSGETAEATRLKRTARRRYTRRKNRICYLQEIFSNEMAKVDDSFFHRLEESFLVEEDKKHERHPIFGNIVDEVAYHEKYPTIYHLRKKLVDSTDKADLRLIYLALAHMIKFRGHFLIEGDLNPDNSDVDKLFIQLVQTYNQLFEENPINASGVDAKAILSARLSKSRRLENLIAQLPGEKKNGLFGNLIALSLGLTPNFKSNFDLAEDAKLQLSKDTYDDDLDNLLAQIGDQYADLFLAAKNLSDAILLSDILRVNTEITKAPLSASMIKRYDEHHQDLTLLKALVRQQLPEKYKEIFFDQSKNGYAGYIDGGASQEEFYKFIKPILEKMDGTEELLVKLNREDLLRKQRTFDNGSIPHQIHLGELHAILRRQEDFYPFLKDNREKIEKILTFRIPYYVGPLARGNSRFAWMTRKSEETITPWNFEEVVDKGASAQSFIERMTNFDKNLPNEKVLPKHSLLYEYFTVYNELTKVKYVTEGMRKPAFLSGEQKKAIVDLLFKTNRKVTVKQLKEDYFKKIECFDSVEISGVEDRFNASLGTYHDLLKIIKDKDFLDNEENEDILEDIVLTLTLFEDREMIEERLKTYAHLFDDKVMKQLKRRRYTGWGRLSRKLINGIRDKQSGKTILDFLKSDGFANRNFMQLIHDDSLTFKEDIQKAQVSGQGDSLHEHIANLAGSPAIKKGILQTVKVVDELVKVMGRHKPENIVIEMARENQTTQKGQKNSRERMKRIEEGIKELGSQILKEHPVENTQLQNEKLYLYYLQNGRDMYVDQELDINRLSDYDVDHIVPQSFLKDDSIDNKVLTRSDKARGKSDNVPSEEVVKKMKNYWRQLLNAKLITQRKFDNLTKAERGGLSELDKAGFIKRQLVETRQITKHVAQILDSRMNTKYDENDKLIREVKVITLKSKLVSDFRKDFQFYKVREINNYHHAHDAYLNAVVGTALIKKYPKLESEFVYGDYKVYDVRKMIAKSEQEIGKATAKYFFYSNIMNFFKTEITLANGEIRKRPLIETNGETGEIVWDKGRDFATVRKVLSMPQVNIVKKTEVQTGGFSKESILPKRNSDKLIARKKDWDPKKYGGFDSPTVAYSVLVVAKVEKGKSKKLKSVKELLGITIMERSSFEKNPIDFLEAKGYKEVKKDLIIKLPKYSLFELENGRKRMLASAGELQKGNELALPSKYVNFLYLASHYEKLKGSPEDNEQKQLFVEQHKHYLDEIIEQISEFSKRVILADANLDKVLSAYNKHRDKPIREQAENIIHLFTLTNLGAPAAFKYFDTTIDRKRYTSTKEVLDATLIHQSITGLYETRIDLSQLGGDGGGGSPAPGGGGGTAPLEEEYRLFLEAPIQNVTLLEQWKREIPKVWAEINPPGLASTQAPIHVQLLSTALPVRVRQYPITLEAKRSLRETIRKFRAAGILRPVHSPWNTPLLPVRKSGTSEYRMVQDLREVNKRVETIHPTVPNPYTLLSLLPPDRIWYSVLDLKDAFFCIPLAPESQLIFAFEWADAEEGESGQLTWTRLPQGFKNSPTLFNEALNRDLQGFRLDHPSVSLLQYVDDLLIAADTQAACLSATRDLLMTLAELGYRVSGKKAQLCQEEVTYLGFKIHKGSRSLSNSRTQAILQIPVPKTKRQVREFLGKIGYCRLFIPGFAELAQPLYAATRPGNDPLVWGEKEEEAFQSLKLALTQPPALALPSLDKPFQLFVEETSGAAKGVLTQALGPWKRPVAYLSKRLDPVAAGWPRCLRAIAAAALLTREASKLTFGQDIEITSSHNLESLLRSPPDKWLTNARITQYQVLLLDPPRVRFKQTAALNPATLLPETDDTLPIHHCLDTLDSLTSTRPDLTDQPLAQAEATLFTDGSSYIRDGKRYAGAAVVTLDSVIWAEPLPIGTSAQKAELIALTKALEWSKDKSVNIYTDSRYAFATLHVHGMIYRERGWLTAGGKAIKNAPEILALLTAVWLPKRVAVMHCKGHQKDDAPTSTGNRRADEVAREVAIRPLSTQATISAGKRTADGSEFEKRTADGSEFESPKKKAKVE

SEQ ID NO: 1384 - protein, 2098 aa, synthetic construct
MPAAKRVKLDGGDKKYSIGLDIGTNSVGWAVITDEYKVPSKKFKVLGNTDRHSIKKNLIGALLFDSGETAEATRLKRTARRRYTRRKNRICYLQEIFSNEMAKVDDSFFHRLEESFLVEEDKKHERHPIFGNIVDEVAYHEKYPTIYHLRKKLVDSTDKADLRLIYLALAHMIKFRGHFLIEGDLNPDNSDVDKLFIQLVQTYNQLFEENPINASGVDAKAILSARLSKSRRLENLIAQLPGEKKNGLFGNLIALSLGLTPNFKSNFDLAEDAKLQLSKDTYDDDLDNLLAQIGDQYADLFLAAKNLSDAILLSDILRVNTEITKAPLSASMIKRYDEHHQDLTLLKALVRQQLPEKYKEIFFDQSKNGYAGYIDGGASQEEFYKFIKPILEKMDGTEELLVKLNREDLLRKQRTFDNGSIPHQIHLGELHAILRRQEDFYPFLKDNREKIEKILTFRIPYYVGPLARGNSRFAWMTRKSEETITPWNFEEVVDKGASAQSFIERMTNFDKNLPNEKVLPKHSLLYEYFTVYNELTKVKYVTEGMRKPAFLSGEQKKAIVDLLFKTNRKVTVKQLKEDYFKKIECFDSVEISGVEDRFNASLGTYHDLLKIIKDKDFLDNEENEDILEDIVLTLTLFEDREMIEERLKTYAHLFDDKVMKQLKRRRYTGWGRLSRKLINGIRDKQSGKTILDFLKSDGFANRNFMQLIHDDSLTFKEDIQKAQVSGQGDSLHEHIANLAGSPAIKKGILQTVKVVDELVKVMGRHKPENIVIEMARENQTTQKGQKNSRERMKRIEEGIKELGSQILKEHPVENTQLQNEKLYLYYLQNGRDMYVDQELDINRLSDYDVDHIVPQSFLKDDSIDNKVLTRSDKARGKSDNVPSEEVVKKMKNYWRQLLNAKLITQRKFDNLTKAERGGLSELDKAGFIKRQLVETRQITKHVAQILDSRMNTKYDENDKLIREVKVITLKSKLVSDFRKDFQFYKVREINNYHHAHDAYLNAVVGTALIKKYPKLESEFVYGDYKVYDVRKMIAKSEQEIGKATAKYFFYSNIMNFFKTEITLANGEIRKRPLIETNGETGEIVWDKGRDFATVRKVLSMPQVNIVKKTEVQTGGFSKESILPKRNSDKLIARKKDWDPKKYGGFDSPTVAYSVLVVAKVEKGKSKKLKSVKELLGITIMERSSFEKNPIDFLEAKGYKEVKKDLIIKLPKYSLFELENGRKRMLASAGELQKGNELALPSKYVNFLYLASHYEKLKGSPEDNEQKQLFVEQHKHYLDEIIEQISEFSKRVILADANLDKVLSAYNKHRDKPIREQAENIIHLFTLTNLGAPAAFKYFDTTIDRKRYTSTKEVLDATLIHQSITGLYETRIDLSQLGGDGGGGGEAAAKPAPGGTAPLEEEYRLFLEAPIQNVTLLEQWKREIPKVWAEINPPGLASTQAPIHVQLLSTALPVRVRQYPITLEAKRSLRETIRKFRAAGILRPVHSPWNTPLLPVRKSGTSEYRMVQDLREVNKRVETIHPTVPNPYTLLSLLPPDRIWYSVLDLKDAFFCIPLAPESQLIFAFEWADAEEGESGQLTWTRLPQGFKNSPTLFNEALNRDLQGFRLDHPSVSLLQYVDDLLIAADTQAACLSATRDLLMTLAELGYRVSGKKAQLCQEEVTYLGFKIHKGSRSLSNSRTQAILQIPVPKTKRQVREFLGKIGYCRLFIPGFAELAQPLYAATRPGNDPLVWGEKEEEAFQSLKLALTQPPALALPSLDKPFQLFVEETSGAAKGVLTQALGPWKRPVAYLSKRLDPVAAGWPRCLRAIAAAALLTREASKLTFGQDIEITSSHNLESLLRSPPDKWLTNARITQYQVLLLDPPRVRFKQTAALNPATLLPETDDTLPIHHCLDTLDSLTSTRPDLTDQPLAQAEATLFTDGSSYIRDGKRYAGAAVVTLDSVIWAEPLPIGTSAQKAELIALTKALEWSKDKSVNIYTDSRYAFATLHVHGMIYRERGWLTAGGKAIKNAPEILALLTAVWLPKRVAVMHCKGHQKDDAPTSTGNRRADEVAREVAIRPLSTQATISAGKRTADGSEFEKRTADGSEFESPKKKAKVE

SEQ ID NO: 1385 - protein, 2096 aa, synthetic construct
MPAAKRVKLDGGDKKYSIGLDIGTNSVGWAVITDEYKVPSKKFKVLGNTDRHSIKKNLIGALLFDSGETAEATRLKRTARRRYTRRKNRICYLQEIFSNEMAKVDDSFFHRLEESFLVEEDKKHERHPIFGNIVDEVAYHEKYPTIYHLRKKLVDSTDKADLRLIYLALAHMIKFRGHFLIEGDLNPDNSDVDKLFIQLVQTYNQLFEENPINASGVDAKAILSARLSKSRRLENLIAQLPGEKKNGLFGNLIALSLGLTPNFKSNFDLAEDAKLQLSKDTYDDDLDNLLAQIGDQYADLFLAAKNLSDAILLSDILRVNTEITKAPLSASMIKRYDEHHQDLTLLKALVRQQLPEKYKEIFFDQSKNGYAGYIDGGASQEEFYKFIKPILEKMDGTEELLVKLNREDLLRKQRTFDNGSIPHQIHLGELHAILRRQEDFYPFLKDNREKIEKILTFRIPYYVGPLARGNSRFAWMTRKSEETITPWNFEEVVDKGASAQSFIERMTNFDKNLPNEKVLPKHSLLYEYFTVYNELTKVKYVTEGMRKPAFLSGEQKKAIVDLLFKTNRKVTVKQLKEDYFKKIECFDSVEISGVEDRFNASLGTYHDLLKIIKDKDFLDNEENEDILEDIVLTLTLFEDREMIEERLKTYAHLFDDKVMKQLKRRRYTGWGRLSRKLINGIRDKQSGKTILDFLKSDGFANRNFMQLIHDDSLTFKEDIQKAQVSGQGDSLHEHIANLAGSPAIKKGILQTVKVVDELVKVMGRHKPENIVIEMARENQTTQKGQKNSRERMKRIEEGIKELGSQILKEHPVENTQLQNEKLYLYYLQNGRDMYVDQELDINRLSDYDVDHIVPQSFLKDDSIDNKVLTRSDKARGKSDNVPSEEVVKKMKNYWRQLLNAKLITQRKFDNLTKAERGGLSELDKAGFIKRQLVETRQITKHVAQILDSRMNTKYDENDKLIREVKVITLKSKLVSDFRKDFQFYKVREINNYHHAHDAYLNAVVGTALIKKYPKLESEFVYGDYKVYDVRKMIAKSEQEIGKATAKYFFYSNIMNFFKTEITLANGEIRKRPLIETNGETGEIVWDKGRDFATVRKVLSMPQVNIVKKTEVQTGGFSKESILPKRNSDKLIARKKDWDPKKYGGFDSPTVAYSVLVVAKVEKGKSKKLKSVKELLGITIMERSSFEKNPIDFLEAKGYKEVKKDLIIKLPKYSLFELENGRKRMLASAGELQKGNELALPSKYVNFLYLASHYEKLKGSPEDNEQKQLFVEQHKHYLDEIIEQISEFSKRVILADANLDKVLSAYNKHRDKPIREQAENIIHLFTLTNLGAPAAFKYFDTTIDRKRYTSTKEVLDATLIHQSITGLYETRIDLSQLGGDGGPAPGGSGSSGGTAPLEEEYRLFLEAPIQNVTLLEQWKREIPKVWAEINPPGLASTQAPIHVQLLSTALPVRVRQYPITLEAKRSLRETIRKFRAAGILRPVHSPWNTPLLPVRKSGTSEYRMVQDLREVNKRVETIHPTVPNPYTLLSLLPPDRIWYSVLDLKDAFFCIPLAPESQLIFAFEWADAEEGESGQLTWTRLPQGFKNSPTLFNEALNRDLQGFRLDHPSVSLLQYVDDLLIAADTQAACLSATRDLLMTLAELGYRVSGKKAQLCQEEVTYLGFKIHKGSRSLSNSRTQAILQIPVPKTKRQVREFLGKIGYCRLFIPGFAELAQPLYAATRPGNDPLVWGEKEEEAFQSLKLALTQPPALALPSLDKPFQLFVEETSGAAKGVLTQALGPWKRPVAYLSKRLDPVAAGWPRCLRAIAAAALLTREASKLTFGQDIEITSSHNLESLLRSPPDKWLTNARITQYQVLLLDPPRVRFKQTAALNPATLLPETDDTLPIHHCLDTLDSLTSTRPDLTDQPLAQAEATLFTDGSSYIRDGKRYAGAAVVTLDSVIWAEPLPIGTSAQKAELIALTKALEWSKDKSVNIYTDSRYAFATLHVHGMIYRERGWLTAGGKAIKNAPEILALLTAVWLPKRVAVMHCKGHQKDDAPTSTGNRRADEVAREVAIRPLSTQATISAGKRTADGSEFEKRTADGSEFESPKKKAKVE

SEQ ID NO: 1386 - protein, 2099 aa, synthetic construct
MPAAKRVKLDGGDKKYSIGLDIGTNSVGWAVITDEYKVPSKKFKVLGNTDRHSIKKNLIGALLFDSGETAEATRLKRTARRRYTRRKNRICYLQEIFSNEMAKVDDSFFHRLEESFLVEEDKKHERHPIFGNIVDEVAYHEKYPTIYHLRKKLVDSTDKADLRLIYLALAHMIKFRGHFLIEGDLNPDNSDVDKLFIQLVQTYNQLFEENPINASGVDAKAILSARLSKSRRLENLIAQLPGEKKNGLFGNLIALSLGLTPNFKSNFDLAEDAKLQLSKDTYDDDLDNLLAQIGDQYADLFLAAKNLSDAILLSDILRVNTEITKAPLSASMIKRYDEHHQDLTLLKALVRQQLPEKYKEIFFDQSKNGYAGYIDGGASQEEFYKFIKPILEKMDGTEELLVKLNREDLLRKQRTFDNGSIPHQIHLGELHAILRRQEDFYPFLKDNREKIEKILTFRIPYYVGPLARGNSRFAWMTRKSEETITPWNFEEVVDKGASAQSFIERMTNFDKNLPNEKVLPKHSLLYEYFTVYNELTKVKYVTEGMRKPAFLSGEQKKAIVDLLFKTNRKVTVKQLKEDYFKKIECFDSVEISGVEDRFNASLGTYHDLLKIIKDKDFLDNEENEDILEDIVLTLTLFEDREMIEERLKTYAHLFDDKVMKQLKRRRYTGWGRLSRKLINGIRDKQSGKTILDFLKSDGFANRNFMQLIHDDSLTFKEDIQKAQVSGQGDSLHEHIANLAGSPAIKKGILQTVKVVDELVKVMGRHKPENIVIEMARENQTTQKGQKNSRERMKRIEEGIKELGSQILKEHPVENTQLQNEKLYLYYLQNGRDMYVDQELDINRLSDYDVDHIVPQSFLKDDSIDNKVLTRSDKARGKSDNVPSEEVVKKMKNYWRQLLNAKLITQRKFDNLTKAERGGLSELDKAGFIKRQLVETRQITKHVAQILDSRMNTKYDENDKLIREVKVITLKSKLVSDFRKDFQFYKVREINNYHHAHDAYLNAVVGTALIKKYPKLESEFVYGDYKVYDVRKMIAKSEQEIGKATAKYFFYSNIMNFFKTEITLANGEIRKRPLIETNGETGEIVWDKGRDFATVRKVLSMPQVNIVKKTEVQTGGFSKESILPKRNSDKLIARKKDWDPKKYGGFDSPTVAYSVLVVAKVEKGKSKKLKSVKELLGITIMERSSFEKNPIDFLEAKGYKEVKKDLIIKLPKYSLFELENGRKRMLASAGELQKGNELALPSKYVNFLYLASHYEKLKGSPEDNEQKQLFVEQHKHYLDEIIEQISEFSKRVILADANLDKVLSAYNKHRDKPIREQAENIIHLFTLTNLGAPAAFKYFDTTIDRKRYTSTKEVLDATLIHQSITGLYETRIDLSQLGGDGGGSSGSSGSSGSSGGTAPLEEEYRLFLEAPIQNVTLLEQWKREIPKVWAEINPPGLASTQAPIHVQLLSTALPVRVRQYPITLEAKRSLRETIRKFRAAGILRPVHSPWNTPLLPVRKSGTSEYRMVQDLREVNKRVETIHPTVPNPYTLLSLLPPDRIWYSVLDLKDAFFCIPLAPESQLIFAFEWADAEEGESGQLTWTRLPQGFKNSPTLFNEALNRDLQGFRLDHPSVSLLQYVDDLLIAADTQAACLSATRDLLMTLAELGYRVSGKKAQLCQEEVTYLGFKIHKGSRSLSNSRTQAILQIPVPKTKRQVREFLGKIGYCRLFIPGFAELAQPLYAATRPGNDPLVWGEKEEEAFQSLKLALTQPPALALPSLDKPFQLFVEETSGAAKGVLTQALGPWKRPVAYLSKRLDPVAAGWPRCLRAIAAAALLTREASKLTFGQDIEITSSHNLESLLRSPPDKWLTNARITQYQVLLLDPPRVRFKQTAALNPATLLPETDDTLPIHHCLDTLDSLTSTRPDLTDQPLAQAEATLFTDGSSYIRDGKRYAGAAVVTLDSVIWAEPLPIGTSAQKAELIALTKALEWSKDKSVNIYTDSRYAFATLHVHGMIYRERGWLTAGGKAIKNAPEILALLTAVWLPKRVAVMHCKGHQKDDAPTSTGNRRADEVAREVAIRPLSTQATISAGKRTADGSEFEKRTADGSEFESPKKKAKVE

SEQ ID NO: 1387 - protein, 2098 aa, synthetic construct
MPAAKRVKLDGGDKKYSIGLDIGTNSVGWAVITDEYKVPSKKFKVLGNTDRHSIKKNLIGALLFDSGETAEATRLKRTARRRYTRRKNRICYLQEIFSNEMAKVDDSFFHRLEESFLVEEDKKHERHPIFGNIVDEVAYHEKYPTIYHLRKKLVDSTDKADLRLIYLALAHMIKFRGHFLIEGDLNPDNSDVDKLFIQLVQTYNQLFEENPINASGVDAKAILSARLSKSRRLENLIAQLPGEKKNGLFGNLIALSLGLTPNFKSNFDLAEDAKLQLSKDTYDDDLDNLLAQIGDQYADLFLAAKNLSDAILLSDILRVNTEITKAPLSASMIKRYDEHHQDLTLLKALVRQQLPEKYKEIFFDQSKNGYAGYIDGGASQEEFYKFIKPILEKMDGTEELLVKLNREDLLRKQRTFDNGSIPHQIHLGELHAILRRQEDFYPFLKDNREKIEKILTFRIPYYVGPLARGNSRFAWMTRKSEETITPWNFEEVVDKGASAQSFIERMTNFDKNLPNEKVLPKHSLLYEYFTVYNELTKVKYVTEGMRKPAFLSGEQKKAIVDLLFKTNRKVTVKQLKEDYFKKIECFDSVEISGVEDRFNASLGTYHDLLKIIKDKDFLDNEENEDILEDIVLTLTLFEDREMIEERLKTYAHLFDDKVMKQLKRRRYTGWGRLSRKLINGIRDKQSGKTILDFLKSDGFANRNFMQLIHDDSLTFKEDIQKAQVSGQGDSLHEHIANLAGSPAIKKGILQTVKVVDELVKVMGRHKPENIVIEMARENQTTQKGQKNSRERMKRIEEGIKELGSQILKEHPVENTQLQNEKLYLYYLQNGRDMYVDQELDINRLSDYDVDHIVPQSFLKDDSIDNKVLTRSDKARGKSDNVPSEEVVKKMKNYWRQLLNAKLITQRKFDNLTKAERGGLSELDKAGFIKRQLVETRQITKHVAQILDSRMNTKYDENDKLIREVKVITLKSKLVSDFRKDFQFYKVREINNYHHAHDAYLNAVVGTALIKKYPKLESEFVYGDYKVYDVRKMIAKSEQEIGKATAKYFFYSNIMNFFKTEITLANGEIRKRPLIETNGETGEIVWDKGRDFATVRKVLSMPQVNIVKKTEVQTGGFSKESILPKRNSDKLIARKKDWDPKKYGGFDSPTVAYSVLVVAKVEKGKSKKLKSVKELLGITIMERSSFEKNPIDFLEAKGYKEVKKDLIIKLPKYSLFELENGRKRMLASAGELQKGNELALPSKYVNFLYLASHYEKLKGSPEDNEQKQLFVEQHKHYLDEIIEQISEFSKRVILADANLDKVLSAYNKHRDKPIREQAENIIHLFTLTNLGAPAAFKYFDTTIDRKRYTSTKEVLDATLIHQSITGLYETRIDLSQLGGDGGPAPEAAAKGGGGGTAPLEEEYRLFLEAPIQNVTLLEQWKREIPKVWAEINPPGLASTQAPIHVQLLSTALPVRVRQYPITLEAKRSLRETIRKFRAAGILRPVHSPWNTPLLPVRKSGTSEYRMVQDLREVNKRVETIHPTVPNPYTLLSLLPPDRIWYSVLDLKDAFFCIPLAPESQLIFAFEWADAEEGESGQLTWTRLPQGFKNSPTLFNEALNRDLQGFRLDHPSVSLLQYVDDLLIAADTQAACLSATRDLLMTLAELGYRVSGKKAQLCQEEVTYLGFKIHKGSRSLSNSRTQAILQIPVPKTKRQVREFLGKIGYCRLFIPGFAELAQPLYAATRPGNDPLVWGEKEEEAFQSLKLALTQPPALALPSLDKPFQLFVEETSGAAKGVLTQALGPWKRPVAYLSKRLDPVAAGWPRCLRAIAAAALLTREASKLTFGQDIEITSSHNLESLLRSPPDKWLTNARITQYQVLLLDPPRVRFKQTAALNPATLLPETDDTLPIHHCLDTLDSLTSTRPDLTDQPLAQAEATLFTDGSSYIRDGKRYAGAAVVTLDSVIWAEPLPIGTSAQKAELIALTKALEWSKDKSVNIYTDSRYAFATLHVHGMIYRERGWLTAGGKAIKNAPEILALLTAVWLPKRVAVMHCKGHQKDDAPTSTGNRRADEVAREVAIRPLSTQATISAGKRTADGSEFEKRTADGSEFESPKKKAKVE

SEQ ID NO: 1388 - protein, 2098 aa, synthetic construct
MPAAKRVKLDGGDKKYSIGLDIGTNSVGWAVITDEYKVPSKKFKVLGNTDRHSIKKNLIGALLFDSGETAEATRLKRTARRRYTRRKNRICYLQEIFSNEMAKVDDSFFHRLEESFLVEEDKKHERHPIFGNIVDEVAYHEKYPTIYHLRKKLVDSTDKADLRLIYLALAHMIKFRGHFLIEGDLNPDNSDVDKLFIQLVQTYNQLFEENPINASGVDAKAILSARLSKSRRLENLIAQLPGEKKNGLFGNLIALSLGLTPNFKSNFDLAEDAKLQLSKDTYDDDLDNLLAQIGDQYADLFLAAKNLSDAILLSDILRVNTEITKAPLSASMIKRYDEHHQDLTLLKALVRQQLPEKYKEIFFDQSKNGYAGYIDGGASQEEFYKFIKPILEKMDGTEELLVKLNREDLLRKQRTFDNGSIPHQIHLGELHAILRRQEDFYPFLKDNREKIEKILTFRIPYYVGPLARGNSRFAWMTRKSEETITPWNFEEVVDKGASAQSFIERMTNFDKNLPNEKVLPKHSLLYEYFTVYNELTKVKYVTEGMRKPAFLSGEQKKAIVDLLFKTNRKVTVKQLKEDYFKKIECFDSVEISGVEDRFNASLGTYHDLLKIIKDKDFLDNEENEDILEDIVLTLTLFEDREMIEERLKTYAHLFDDKVMKQLKRRRYTGWGRLSRKLINGIRDKQSGKTILDFLKSDGFANRNFMQLIHDDSLTFKEDIQKAQVSGQGDSLHEHIANLAGSPAIKKGILQTVKVVDELVKVMGRHKPENIVIEMARENQTTQKGQKNSRERMKRIEEGIKELGSQILKEHPVENTQLQNEKLYLYYLQNGRDMYVDQELDINRLSDYDVDHIVPQSFLKDDSIDNKVLTRSDKARGKSDNVPSEEVVKKMKNYWRQLLNAKLITQRKFDNLTKAERGGLSELDKAGFIKRQLVETRQITKHVAQILDSRMNTKYDENDKLIREVKVITLKSKLVSDFRKDFQFYKVREINNYHHAHDAYLNAVVGTALIKKYPKLESEFVYGDYKVYDVRKMIAKSEQEIGKATAKYFFYSNIMNFFKTEITLANGEIRKRPLIETNGETGEIVWDKGRDFATVRKVLSMPQVNIVKKTEVQTGGFSKESILPKRNSDKLIARKKDWDPKKYGGFDSPTVAYSVLVVAKVEKGKSKKLKSVKELLGITIMERSSFEKNPIDFLEAKGYKEVKKDLIIKLPKYSLFELENGRKRMLASAGELQKGNELALPSKYVNFLYLASHYEKLKGSPEDNEQKQLFVEQHKHYLDEIIEQISEFSKRVILADANLDKVLSAYNKHRDKPIREQAENIIHLFTLTNLGAPAAFKYFDTTIDRKRYTSTKEVLDATLIHQSITGLYETRIDLSQLGGDGGPAPEAAAKGSSGGTAPLEEEYRLFLEAPIQNVTLLEQWKREIPKVWAEINPPGLASTQAPIHVQLLSTALPVRVRQYPITLEAKRSLRETIRKFRAAGILRPVHSPWNTPLLPVRKSGTSEYRMVQDLREVNKRVETIHPTVPNPYTLLSLLPPDRIWYSVLDLKDAFFCIPLAPESQLIFAFEWADAEEGESGQLTWTRLPQGFKNSPTLFNEALNRDLQGFRLDHPSVSLLQYVDDLLIAADTQAACLSATRDLLMTLAELGYRVSGKKAQLCQEEVTYLGFKIHKGSRSLSNSRTQAILQIPVPKTKRQVREFLGKIGYCRLFIPGFAELAQPLYAATRPGNDPLVWGEKEEEAFQSLKLALTQPPALALPSLDKPFQLFVEETSGAAKGVLTQALGPWKRPVAYLSKRLDPVAAGWPRCLRAIAAAALLTREASKLTFGQDIEITSSHNLESLLRSPPDKWLTNARITQYQVLLLDPPRVRFKQTAALNPATLLPETDDTLPIHHCLDTLDSLTSTRPDLTDQPLAQAEATLFTDGSSYIRDGKRYAGAAVVTLDSVIWAEPLPIGTSAQKAELIALTKALEWSKDKSVNIYTDSRYAFATLHVHGMIYRERGWLTAGGKAIKNAPEILALLTAVWLPKRVAVMHCKGHQKDDAPTSTGNRRADEVAREVAIRPLSTQATISAGKRTADGSEFEKRTADGSEFESPKKKAKVE

SEQ ID NO: 1389 - protein, 2090 aa, synthetic construct
MPAAKRVKLDGGDKKYSIGLDIGTNSVGWAVITDEYKVPSKKFKVLGNTDRHSIKKNLIGALLFDSGETAEATRLKRTARRRYTRRKNRICYLQEIFSNEMAKVDDSFFHRLEESFLVEEDKKHERHPIFGNIVDEVAYHEKYPTIYHLRKKLVDSTDKADLRLIYLALAHMIKFRGHFLIEGDLNPDNSDVDKLFIQLVQTYNQLFEENPINASGVDAKAILSARLSKSRRLENLIAQLPGEKKNGLFGNLIALSLGLTPNFKSNFDLAEDAKLQLSKDTYDDDLDNLLAQIGDQYADLFLAAKNLSDAILLSDILRVNTEITKAPLSASMIKRYDEHHQDLTLLKALVRQQLPEKYKEIFFDQSKNGYAGYIDGGASQEEFYKFIKPILEKMDGTEELLVKLNREDLLRKQRTFDNGSIPHQIHLGELHAILRRQEDFYPFLKDNREKIEKILTFRIPYYVGPLARGNSRFAWMTRKSEETITPWNFEEVVDKGASAQSFIERMTNFDKNLPNEKVLPKHSLLYEYFTVYNELTKVKYVTEGMRKPAFLSGEQKKAIVDLLFKTNRKVTVKQLKEDYFKKIECFDSVEISGVEDRFNASLGTYHDLLKIIKDKDFLDNEENEDILEDIVLTLTLFEDREMIEERLKTYAHLFDDKVMKQLKRRRYTGWGRLSRKLINGIRDKQSGKTILDFLKSDGFANRNFMQLIHDDSLTFKEDIQKAQVSGQGDSLHEHIANLAGSPAIKKGILQTVKVVDELVKVMGRHKPENIVIEMARENQTTQKGQKNSRERMKRIEEGIKELGSQILKEHPVENTQLQNEKLYLYYLQNGRDMYVDQELDINRLSDYDVDHIVPQSFLKDDSIDNKVLTRSDKARGKSDNVPSEEVVKKMKNYWRQLLNAKLITQRKFDNLTKAERGGLSELDKAGFIKRQLVETRQITKHVAQILDSRMNTKYDENDKLIREVKVITLKSKLVSDFRKDFQFYKVREINNYHHAHDAYLNAVVGTALIKKYPKLESEFVYGDYKVYDVRKMIAKSEQEIGKATAKYFFYSNIMNFFKTEITLANGEIRKRPLIETNGETGEIVWDKGRDFATVRKVLSMPQVNIVKKTEVQTGGFSKESILPKRNSDKLIARKKDWDPKKYGGFDSPTVAYSVLVVAKVEKGKSKKLKSVKELLGITIMERSSFEKNPIDFLEAKGYKEVKKDLIIKLPKYSLFELENGRKRMLASAGELQKGNELALPSKYVNFLYLASHYEKLKGSPEDNEQKQLFVEQHKHYLDEIIEQISEFSKRVILADANLDKVLSAYNKHRDKPIREQAENIIHLFTLTNLGAPAAFKYFDTTIDRKRYTSTKEVLDATLIHQSITGLYETRIDLSQLGGDGGGGGGGTAPLEEEYRLFLEAPIQNVTLLEQWKREIPKVWAEINPPGLASTQAPIHVQLLSTALPVRVRQYPITLEAKRSLRETIRKFRAAGILRPVHSPWNTPLLPVRKSGTSEYRMVQDLREVNKRVETIHPTVPNPYTLLSLLPPDRIWYSVLDLKDAFFCIPLAPESQLIFAFEWADAEEGESGQLTWTRLPQGFKNSPTLFNEALNRDLQGFRLDHPSVSLLQYVDDLLIAADTQAACLSATRDLLMTLAELGYRVSGKKAQLCQEEVTYLGFKIHKGSRSLSNSRTQAILQIPVPKTKRQVREFLGKIGYCRLFIPGFAELAQPLYAATRPGNDPLVWGEKEEEAFQSLKLALTQPPALALPSLDKPFQLFVEETSGAAKGVLTQALGPWKRPVAYLSKRLDPVAAGWPRCLRAIAAAALLTREASKLTFGQDIEITSSHNLESLLRSPPDKWLTNARITQYQVLLLDPPRVRFKQTAALNPATLLPETDDTLPIHHCLDTLDSLTSTRPDLTDQPLAQAEATLFTDGSSYIRDGKRYAGAAVVTLDSVIWAEPLPIGTSAQKAELIALTKALEWSKDKSVNIYTDSRYAFATLHVHGMIYRERGWLTAGGKAIKNAPEILALLTAVWLPKRVAVMHCKGHQKDDAPTSTGNRRADEVAREVAIRPLSTQATISAGKRTADGSEFEKRTADGSEFESPKKKAKVE

SEQ ID NO: 1390 - protein, 2098 aa, synthetic construct
MPAAKRVKLDGGDKKYSIGLDIGTNSVGWAVITDEYKVPSKKFKVLGNTDRHSIKKNLIGALLFDSGETAEATRLKRTARRRYTRRKNRICYLQEIFSNEMAKVDDSFFHRLEESFLVEEDKKHERHPIFGNIVDEVAYHEKYPTIYHLRKKLVDSTDKADLRLIYLALAHMIKFRGHFLIEGDLNPDNSDVDKLFIQLVQTYNQLFEENPINASGVDAKAILSARLSKSRRLENLIAQLPGEKKNGLFGNLIALSLGLTPNFKSNFDLAEDAKLQLSKDTYDDDLDNLLAQIGDQYADLFLAAKNLSDAILLSDILRVNTEITKAPLSASMIKRYDEHHQDLTLLKALVRQQLPEKYKEIFFDQSKNGYAGYIDGGASQEEFYKFIKPILEKMDGTEELLVKLNREDLLRKQRTFDNGSIPHQIHLGELHAILRRQEDFYPFLKDNREKIEKILTFRIPYYVGPLARGNSRFAWMTRKSEETITPWNFEEVVDKGASAQSFIERMTNFDKNLPNEKVLPKHSLLYEYFTVYNELTKVKYVTEGMRKPAFLSGEQKKAIVDLLFKTNRKVTVKQLKEDYFKKIECFDSVEISGVEDRFNASLGTYHDLLKIIKDKDFLDNEENEDILEDIVLTLTLFEDREMIEERLKTYAHLFDDKVMKQLKRRRYTGWGRLSRKLINGIRDKQSGKTILDFLKSDGFANRNFMQLIHDDSLTFKEDIQKAQVSGQGDSLHEHIANLAGSPAIKKGILQTVKVVDELVKVMGRHKPENIVIEMARENQTTQKGQKNSRERMKRIEEGIKELGSQILKEHPVENTQLQNEKLYLYYLQNGRDMYVDQELDINRLSDYDVDHIVPQSFLKDDSIDNKVLTRSDKARGKSDNVPSEEVVKKMKNYWRQLLNAKLITQRKFDNLTKAERGGLSELDKAGFIKRQLVETRQITKHVAQILDSRMNTKYDENDKLIREVKVITLKSKLVSDFRKDFQFYKVREINNYHHAHDAYLNAVVGTALIKKYPKLESEFVYGDYKVYDVRKMIAKSEQEIGKATAKYFFYSNIMNFFKTEITLANGEIRKRPLIETNGETGEIVWDKGRDFATVRKVLSMPQVNIVKKTEVQTGGFSKESILPKRNSDKLIARKKDWDPKKYGGFDSPTVAYSVLVVAKVEKGKSKKLKSVKELLGITIMERSSFEKNPIDFLEAKGYKEVKKDLIIKLPKYSLFELENGRKRMLASAGELQKGNELALPSKYVNFLYLASHYEKLKGSPEDNEQKQLFVEQHKHYLDEIIEQISEFSKRVILADANLDKVLSAYNKHRDKPIREQAENIIHLFTLTNLGAPAAFKYFDTTIDRKRYTSTKEVLDATLIHQSITGLYETRIDLSQLGGDGGEAAAKGGGGGSGGTAPLEEEYRLFLEAPIQNVTLLEQWKREIPKVWAEINPPGLASTQAPIHVQLLSTALPVRVRQYPITLEAKRSLRETIRKFRAAGILRPVHSPWNTPLLPVRKSGTSEYRMVQDLREVNKRVETIHPTVPNPYTLLSLLPPDRIWYSVLDLKDAFFCIPLAPESQLIFAFEWADAEEGESGQLTWTRLPQGFKNSPTLFNEALNRDLQGFRLDHPSVSLLQYVDDLLIAADTQAACLSATRDLLMTLAELGYRVSGKKAQLCQEEVTYLGFKIHKGSRSLSNSRTQAILQIPVPKTKRQVREFLGKIGYCRLFIPGFAELAQPLYAATRPGNDPLVWGEKEEEAFQSLKLALTQPPALALPSLDKPFQLFVEETSGAAKGVLTQALGPWKRPVAYLSKRLDPVAAGWPRCLRAIAAAALLTREASKLTFGQDIEITSSHNLESLLRSPPDKWLTNARITQYQVLLLDPPRVRFKQTAALNPATLLPETDDTLPIHHCLDTLDSLTSTRPDLTDQPLAQAEATLFTDGSSYIRDGKRYAGAAVVTLDSVIWAEPLPIGTSAQKAELIALTKALEWSKDKSVNIYTDSRYAFATLHVHGMIYRERGWLTAGGKAIKNAPEILALLTAVWLPKRVAVMHCKGHQKDDAPTSTGNRRADEVAREVAIRPLSTQATISAGKRTADGSEFEKRTADGSEFESPKKKAKVE

SEQ ID NO: 1391 - protein, 2093 aa, synthetic construct
MPAAKRVKLDGGDKKYSIGLDIGTNSVGWAVITDEYKVPSKKFKVLGNTDRHSIKKNLIGALLFDSGETAEATRLKRTARRRYTRRKNRICYLQEIFSNEMAKVDDSFFHRLEESFLVEEDKKHERHPIFGNIVDEVAYHEKYPTIYHLRKKLVDSTDKADLRLIYLALAHMIKFRGHFLIEGDLNPDNSDVDKLFIQLVQTYNQLFEENPINASGVDAKAILSARLSKSRRLENLIAQLPGEKKNGLFGNLIALSLGLTPNFKSNFDLAEDAKLQLSKDTYDDDLDNLLAQIGDQYADLFLAAKNLSDAILLSDILRVNTEITKAPLSASMIKRYDEHHQDLTLLKALVRQQLPEKYKEIFFDQSKNGYAGYIDGGASQEEFYKFIKPILEKMDGTEELLVKLNREDLLRKQRTFDNGSIPHQIHLGELHAILRRQEDFYPFLKDNREKIEKILTFRIPYYVGPLARGNSRFAWMTRKSEETITPWNFEEVVDKGASAQSFIERMTNFDKNLPNEKVLPKHSLLYEYFTVYNELTKVKYVTEGMRKPAFLSGEQKKAIVDLLFKTNRKVTVKQLKEDYFKKIECFDSVEISGVEDRFNASLGTYHDLLKIIKDKDFLDNEENEDILEDIVLTLTLFEDREMIEERLKTYAHLFDDKVMKQLKRRRYTGWGRLSRKLINGIRDKQSGKTILDFLKSDGFANRNFMQLIHDDSLTFKEDIQKAQVSGQGDSLHEHIANLAGSPAIKKGILQTVKVVDELVKVMGRHKPENIVIEMARENQTTQKGQKNSRERMKRIEEGIKELGSQILKEHPVENTQLQNEKLYLYYLQNGRDMYVDQELDINRLSDYDVDHIVPQSFLKDDSIDNKVLTRSDKARGKSDNVPSEEVVKKMKNYWRQLLNAKLITQRKFDNLTKAERGGLSELDKAGFIKRQLVETRQITKHVAQILDSRMNTKYDENDKLIREVKVITLKSKLVSDFRKDFQFYKVREINNYHHAHDAYLNAVVGTALIKKYPKLESEFVYGDYKVYDVRKMIAKSEQEIGKATAKYFFYSNIMNFFKTEITLANGEIRKRPLIETNGETGEIVWDKGRDFATVRKVLSMPQVNIVKKTEVQTGGFSKESILPKRNSDKLIARKKDWDPKKYGGFDSPTVAYSVLVVAKVEKGKSKKLKSVKELLGITIMERSSFEKNPIDFLEAKGYKEVKKDLIIKLPKYSLFELENGRKRMLASAGELQKGNELALPSKYVNFLYLASHYEKLKGSPEDNEQKQLFVEQHKHYLDEIIEQISEFSKRVILADANLDKVLSAYNKHRDKPIREQAENIIHLFTLTNLGAPAAFKYFDTTIDRKRYTSTKEVLDATLIHQSITGLYETRIDLSQLGGDGGGGSGGGGGTAPLEEEYRLFLEAPIQNVTLLEQWKREIPKVWAEINPPGLASTQAPIHVQLLSTALPVRVRQYPITLEAKRSLRETIRKFRAAGILRPVHSPWNTPLLPVRKSGTSEYRMVQDLREVNKRVETIHPTVPNPYTLLSLLPPDRIWYSVLDLKDAFFCIPLAPESQLIFAFEWADAEEGESGQLTWTRLPQGFKNSPTLFNEALNRDLQGFRLDHPSVSLLQYVDDLLIAADTQAACLSATRDLLMTLAELGYRVSGKKAQLCQEEVTYLGFKIHKGSRSLSNSRTQAILQIPVPKTKRQVREFLGKIGYCRLFIPGFAELAQPLYAATRPGNDPLVWGEKEEEAFQSLKLALTQPPALALPSLDKPFQLFVEETSGAAKGVLTQALGPWKRPVAYLSKRLDPVAAGWPRCLRAIAAAALLTREASKLTFGQDIEITSSHNLESLLRSPPDKWLTNARITQYQVLLLDPPRVRFKQTAALNPATLLPETDDTLPIHHCLDTLDSLTSTRPDLTDQPLAQAEATLFTDGSSYIRDGKRYAGAAVVTLDSVIWAEPLPIGTSAQKAELIALTKALEWSKDKSVNIYTDSRYAFATLHVHGMIYRERGWLTAGGKAIKNAPEILALLTAVWLPKRVAVMHCKGHQKDDAPTSTGNRRADEVAREVAIRPLSTQATISAGKRTADGSEFEKRTADGSEFESPKKKAKVE

SEQ ID NO: 1392 - protein, 2093 aa, synthetic construct
MPAAKRVKLDGGDKKYSIGLDIGTNSVGWAVITDEYKVPSKKFKVLGNTDRHSIKKNLIGALLFDSGETAEATRLKRTARRRYTRRKNRICYLQEIFSNEMAKVDDSFFHRLEESFLVEEDKKHERHPIFGNIVDEVAYHEKYPTIYHLRKKLVDSTDKADLRLIYLALAHMIKFRGHFLIEGDLNPDNSDVDKLFIQLVQTYNQLFEENPINASGVDAKAILSARLSKSRRLENLIAQLPGEKKNGLFGNLIALSLGLTPNFKSNFDLAEDAKLQLSKDTYDDDLDNLLAQIGDQYADLFLAAKNLSDAILLSDILRVNTEITKAPLSASMIKRYDEHHQDLTLLKALVRQQLPEKYKEIFFDQSKNGYAGYIDGGASQEEFYKFIKPILEKMDGTEELLVKLNREDLLRKQRTFDNGSIPHQIHLGELHAILRRQEDFYPFLKDNREKIEKILTFRIPYYVGPLARGNSRFAWMTRKSEETITPWNFEEVVDKGASAQSFIERMTNFDKNLPNEKVLPKHSLLYEYFTVYNELTKVKYVTEGMRKPAFLSGEQKKAIVDLLFKTNRKVTVKQLKEDYFKKIECFDSVEISGVEDRFNASLGTYHDLLKIIKDKDFLDNEENEDILEDIVLTLTLFEDREMIEERLKTYAHLFDDKVMKQLKRRRYTGWGRLSRKLINGIRDKQSGKTILDFLKSDGFANRNFMQLIHDDSLTFKEDIQKAQVSGQGDSLHEHIANLAGSPAIKKGILQTVKVVDELVKVMGRHKPENIVIEMARENQTTQKGQKNSRERMKRIEEGIKELGSQILKEHPVENTQLQNEKLYLYYLQNGRDMYVDQELDINRLSDYDVDHIVPQSFLKDDSIDNKVLTRSDKARGKSDNVPSEEVVKKMKNYWRQLLNAKLITQRKFDNLTKAERGGLSELDKAGFIKRQLVETRQITKHVAQILDSRMNTKYDENDKLIREVKVITLKSKLVSDFRKDFQFYKVREINNYHHAHDAYLNAVVGTALIKKYPKLESEFVYGDYKVYDVRKMIAKSEQEIGKATAKYFFYSNIMNFFKTEITLANGEIRKRPLIETNGETGEIVWDKGRDFATVRKVLSMPQVNIVKKTEVQTGGFSKESILPKRNSDKLIARKKDWDPKKYGGFDSPTVAYSVLVVAKVEKGKSKKLKSVKELLGITIMERSSFEKNPIDFLEAKGYKEVKKDLIIKLPKYSLFELENGRKRMLASAGELQKGNELALPSKYVNFLYLASHYEKLKGSPEDNEQKQLFVEQHKHYLDEIIEQISEFSKRVILADANLDKVLSAYNKHRDKPIREQAENIIHLFTLTNLGAPAAFKYFDTTIDRKRYTSTKEVLDATLIHQSITGLYETRIDLSQLGGDGGGGSPAPGGTAPLEEEYRLFLEAPIQNVTLLEQWKREIPKVWAEINPPGLASTQAPIHVQLLSTALPVRVRQYPITLEAKRSLRETIRKFRAAGILRPVHSPWNTPLLPVRKSGTSEYRMVQDLREVNKRVETIHPTVPNPYTLLSLLPPDRIWYSVLDLKDAFFCIPLAPESQLIFAFEWADAEEGESGQLTWTRLPQGFKNSPTLFNEALNRDLQGFRLDHPSVSLLQYVDDLLIAADTQAACLSATRDLLMTLAELGYRVSGKKAQLCQEEVTYLGFKIHKGSRSLSNSRTQAILQIPVPKTKRQVREFLGKIGYCRLFIPGFAELAQPLYAATRPGNDPLVWGEKEEEAFQSLKLALTQPPALALPSLDKPFQLFVEETSGAAKGVLTQALGPWKRPVAYLSKRLDPVAAGWPRCLRAIAAAALLTREASKLTFGQDIEITSSHNLESLLRSPPDKWLTNARITQYQVLLLDPPRVRFKQTAALNPATLLPETDDTLPIHHCLDTLDSLTSTRPDLTDQPLAQAEATLFTDGSSYIRDGKRYAGAAVVTLDSVIWAEPLPIGTSAQKAELIALTKALEWSKDKSVNIYTDSRYAFATLHVHGMIYRERGWLTAGGKAIKNAPEILALLTAVWLPKRVAVMHCKGHQKDDAPTSTGNRRADEVAREVAIRPLSTQATISAGKRTADGSEFEKRTADGSEFESPKKKAKVE

SEQ ID NO: 1393 - protein, 2102 aa, synthetic construct
MPAAKRVKLDGGDKKYSIGLDIGTNSVGWAVITDEYKVPSKKFKVLGNTDRHSIKKNLIGALLFDSGETAEATRLKRTARRRYTRRKNRICYLQEIFSNEMAKVDDSFFHRLEESFLVEEDKKHERHPIFGNIVDEVAYHEKYPTIYHLRKKLVDSTDKADLRLIYLALAHMIKFRGHFLIEGDLNPDNSDVDKLFIQLVQTYNQLFEENPINASGVDAKAILSARLSKSRRLENLIAQLPGEKKNGLFGNLIALSLGLTPNFKSNFDLAEDAKLQLSKDTYDDDLDNLLAQIGDQYADLFLAAKNLSDAILLSDILRVNTEITKAPLSASMIKRYDEHHQDLTLLKALVRQQLPEKYKEIFFDQSKNGYAGYIDGGASQEEFYKFIKPILEKMDGTEELLVKLNREDLLRKQRTFDNGSIPHQIHLGELHAILRRQEDFYPFLKDNREKIEKILTFRIPYYVGPLARGNSRFAWMTRKSEETITPWNFEEVVDKGASAQSFIERMTNFDKNLPNEKVLPKHSLLYEYFTVYNELTKVKYVTEGMRKPAFLSGEQKKAIVDLLFKTNRKVTVKQLKEDYFKKIECFDSVEISGVEDRFNASLGTYHDLLKIIKDKDFLDNEENEDILEDIVLTLTLFEDREMIEERLKTYAHLFDDKVMKQLKRRRYTGWGRLSRKLINGIRDKQSGKTILDFLKSDGFANRNFMQLIHDDSLTFKEDIQKAQVSGQGDSLHEHIANLAGSPAIKKGILQTVKVVDELVKVMGRHKPENIVIEMARENQTTQKGQKNSRERMKRIEEGIKELGSQILKEHPVENTQLQNEKLYLYYLQNGRDMYVDQELDINRLSDYDVDHIVPQSFLKDDSIDNKVLTRSDKARGKSDNVPSEEVVKKMKNYWRQLLNAKLITQRKFDNLTKAERGGLSELDKAGFIKRQLVETRQITKHVAQILDSRMNTKYDENDKLIREVKVITLKSKLVSDFRKDFQFYKVREINNYHHAHDAYLNAVVGTALIKKYPKLESEFVYGDYKVYDVRKMIAKSEQEIGKATAKYFFYSNIMNFFKTEITLANGEIRKRPLIETNGETGEIVWDKGRDFATVRKVLSMPQVNIVKKTEVQTGGFSKESILPKRNSDKLIARKKDWDPKKYGGFDSPTVAYSVLVVAKVEKGKSKKLKSVKELLGITIMERSSFEKNPIDFLEAKGYKEVKKDLIIKLPKYSLFELENGRKRMLASAGELQKGNELALPSKYVNFLYLASHYEKLKGSPEDNEQKQLFVEQHKHYLDEIIEQISEFSKRVILADANLDKVLSAYNKHRDKPIREQAENIIHLFTLTNLGAPAAFKYFDTTIDRKRYTSTKEVLDATLIHQSITGLYETRIDLSQLGGDGGGGGGSEAAAKGGGGSGGTAPLEEEYRLFLEAPIQNVTLLEQWKREIPKVWAEINPPGLASTQAPIHVQLLSTALPVRVRQYPITLEAKRSLRETIRKFRAAGILRPVHSPWNTPLLPVRKSGTSEYRMVQDLREVNKRVETIHPTVPNPYTLLSLLPPDRIWYSVLDLKDAFFCIPLAPESQLIFAFEWADAEEGESGQLTWTRLPQGFKNSPTLFNEALNRDLQGFRLDHPSVSLLQYVDDLLIAADTQAACLSATRDLLMTLAELGYRVSGKKAQLCQEEVTYLGFKIHKGSRSLSNSRTQAILQIPVPKTKRQVREFLGKIGYCRLFIPGFAELAQPLYAATRPGNDPLVWGEKEEEAFQSLKLALTQPPALALPSLDKPFQLFVEETSGAAKGVLTQALGPWKRPVAYLSKRLDPVAAGWPRCLRAIAAAALLTREASKLTFGQDIEITSSHNLESLLRSPPDKWLTNARITQYQVLLLDPPRVRFKQTAALNPATLLPETDDTLPIHHCLDTLDSLTSTRPDLTDQPLAQAEATLFTDGSSYIRDGKRYAGAAVVTLDSVIWAEPLPIGTSAQKAELIALTKALEWSKDKSVNIYTDSRYAFATLHVHGMIYRERGWLTAGGKAIKNAPEILALLTAVWLPKRVAVMHCKGHQKDDAPTSTGNRRADEVAREVAIRPLSTQATISAGKRTADGSEFEKRTADGSEFESPKKKAKVE

SEQ ID NO: 1394 - protein, 2098 aa, synthetic construct
MPAAKRVKLDGGDKKYSIGLDIGTNSVGWAVITDEYKVPSKKFKVLGNTDRHSIKKNLIGALLFDSGETAEATRLKRTARRRYTRRKNRICYLQEIFSNEMAKVDDSFFHRLEESFLVEEDKKHERHPIFGNIVDEVAYHEKYPTIYHLRKKLVDSTDKADLRLIYLALAHMIKFRGHFLIEGDLNPDNSDVDKLFIQLVQTYNQLFEENPINASGVDAKAILSARLSKSRRLENLIAQLPGEKKNGLFGNLIALSLGLTPNFKSNFDLAEDAKLQLSKDTYDDDLDNLLAQIGDQYADLFLAAKNLSDAILLSDILRVNTEITKAPLSASMIKRYDEHHQDLTLLKALVRQQLPEKYKEIFFDQSKNGYAGYIDGGASQEEFYKFIKPILEKMDGTEELLVKLNREDLLRKQRTFDNGSIPHQIHLGELHAILRRQEDFYPFLKDNREKIEKILTFRIPYYVGPLARGNSRFAWMTRKSEETITPWNFEEVVDKGASAQSFIERMTNFDKNLPNEKVLPKHSLLYEYFTVYNELTKVKYVTEGMRKPAFLSGEQKKAIVDLLFKTNRKVTVKQLKEDYFKKIECFDSVEISGVEDRFNASLGTYHDLLKIIKDKDFLDNEENEDILEDIVLTLTLFEDREMIEERLKTYAHLFDDKVMKQLKRRRYTGWGRLSRKLINGIRDKQSGKTILDFLKSDGFANRNFMQLIHDDSLTFKEDIQKAQVSGQGDSLHEHIANLAGSPAIKKGILQTVKVVDELVKVMGRHKPENIVIEMARENQTTQKGQKNSRERMKRIEEGIKELGSQILKEHPVENTQLQNEKLYLYYLQNGRDMYVDQELDINRLSDYDVDHIVPQSFLKDDSIDNKVLTRSDKARGKSDNVPSEEVVKKMKNYWRQLLNAKLITQRKFDNLTKAERGGLSELDKAGFIKRQLVETRQITKHVAQILDSRMNTKYDENDKLIREVKVITLKSKLVSDFRKDFQFYKVREINNYHHAHDAYLNAVVGTALIKKYPKLESEFVYGDYKVYDVRKMIAKSEQEIGKATAKYFFYSNIMNFFKTEITLANGEIRKRPLIETNGETGEIVWDKGRDFATVRKVLSMPQVNIVKKTEVQTGGFSKESILPKRNSDKLIARKKDWDPKKYGGFDSPTVAYSVLVVAKVEKGKSKKLKSVKELLGITIMERSSFEKNPIDFLEAKGYKEVKKDLIIKLPKYSLFELENGRKRMLASAGELQKGNELALPSKYVNFLYLASHYEKLKGSPEDNEQKQLFVEQHKHYLDEIIEQISEFSKRVILADANLDKVLSAYNKHRDKPIREQAENIIHLFTLTNLGAPAAFKYFDTTIDRKRYTSTKEVLDATLIHQSITGLYETRIDLSQLGGDGGGSSEAAAKGGGGGTAPLEEEYRLFLEAPIQNVTLLEQWKREIPKVWAEINPPGLASTQAPIHVQLLSTALPVRVRQYPITLEAKRSLRETIRKFRAAGILRPVHSPWNTPLLPVRKSGTSEYRMVQDLREVNKRVETIHPTVPNPYTLLSLLPPDRIWYSVLDLKDAFFCIPLAPESQLIFAFEWADAEEGESGQLTWTRLPQGFKNSPTLFNEALNRDLQGFRLDHPSVSLLQYVDDLLIAADTQAACLSATRDLLMTLAELGYRVSGKKAQLCQEEVTYLGFKIHKGSRSLSNSRTQAILQIPVPKTKRQVREFLGKIGYCRLFIPGFAELAQPLYAATRPGNDPLVWGEKEEEAFQSLKLALTQPPALALPSLDKPFQLFVEETSGAAKGVLTQALGPWKRPVAYLSKRLDPVAAGWPRCLRAIAAAALLTREASKLTFGQDIEITSSHNLESLLRSPPDKWLTNARITQYQVLLLDPPRVRFKQTAALNPATLLPETDDTLPIHHCLDTLDSLTSTRPDLTDQPLAQAEATLFTDGSSYIRDGKRYAGAAVVTLDSVIWAEPLPIGTSAQKAELIALTKALEWSKDKSVNIYTDSRYAFATLHVHGMIYRERGWLTAGGKAIKNAPEILALLTAVWLPKRVAVMHCKGHQKDDAPTSTGNRRADEVAREVAIRPLSTQATISAGKRTADGSEFEKRTADGSEFESPKKKAKVE

SEQ ID NO: 1395 - protein, 2098 aa, synthetic construct
MPAAKRVKLDGGDKKYSIGLDIGTNSVGWAVITDEYKVPSKKFKVLGNTDRHSIKKNLIGALLFDSGETAEATRLKRTARRRYTRRKNRICYLQEIFSNEMAKVDDSFFHRLEESFLVEEDKKHERHPIFGNIVDEVAYHEKYPTIYHLRKKLVDSTDKADLRLIYLALAHMIKFRGHFLIEGDLNPDNSDVDKLFIQLVQTYNQLFEENPINASGVDAKAILSARLSKSRRLENLIAQLPGEKKNGLFGNLIALSLGLTPNFKSNFDLAEDAKLQLSKDTYDDDLDNLLAQIGDQYADLFLAAKNLSDAILLSDILRVNTEITKAPLSASMIKRYDEHHQDLTLLKALVRQQLPEKYKEIFFDQSKNGYAGYIDGGASQEEFYKFIKPILEKMDGTEELLVKLNREDLLRKQRTFDNGSIPHQIHLGELHAILRRQEDFYPFLKDNREKIEKILTFRIPYYVGPLARGNSRFAWMTRKSEETITPWNFEEVVDKGASAQSFIERMTNFDKNLPNEKVLPKHSLLYEYFTVYNELTKVKYVTEGMRKPAFLSGEQKKAIVDLLFKTNRKVTVKQLKEDYFKKIECFDSVEISGVEDRFNASLGTYHDLLKIIKDKDFLDNEENEDILEDIVLTLTLFEDREMIEERLKTYAHLFDDKVMKQLKRRRYTGWGRLSRKLINGIRDKQSGKTILDFLKSDGFANRNFMQLIHDDSLTFKEDIQKAQVSGQGDSLHEHIANLAGSPAIKKGILQTVKVVDELVKVMGRHKPENIVIEMARENQTTQKGQKNSRERMKRIEEGIKELGSQILKEHPVENTQLQNEKLYLYYLQNGRDMYVDQELDINRLSDYDVDHIVPQSFLKDDSIDNKVLTRSDKARGKSDNVPSEEVVKKMKNYWRQLLNAKLITQRKFDNLTKAERGGLSELDKAGFIKRQLVETRQITKHVAQILDSRMNTKYDENDKLIREVKVITLKSKLVSDFRKDFQFYKVREINNYHHAHDAYLNAVVGTALIKKYPKLESEFVYGDYKVYDVRKMIAKSEQEIGKATAKYFFYSNIMNFFKTEITLANGEIRKRPLIETNGETGEIVWDKGRDFATVRKVLSMPQVNIVKKTEVQTGGFSKESILPKRNSDKLIARKKDWDPKKYGGFDSPTVAYSVLVVAKVEKGKSKKLKSVKELLGITIMERSSFEKNPIDFLEAKGYKEVKKDLIIKLPKYSLFELENGRKRMLASAGELQKGNELALPSKYVNFLYLASHYEKLKGSPEDNEQKQLFVEQHKHYLDEIIEQISEFSKRVILADANLDKVLSAYNKHRDKPIREQAENIIHLFTLTNLGAPAAFKYFDTTIDRKRYTSTKEVLDATLIHQSITGLYETRIDLSQLGGDGGGGGEAAAKGSSGGTAPLEEEYRLFLEAPIQNVTLLEQWKREIPKVWAEINPPGLASTQAPIHVQLLSTALPVRVRQYPITLEAKRSLRETIRKFRAAGILRPVHSPWNTPLLPVRKSGTSEYRMVQDLREVNKRVETIHPTVPNPYTLLSLLPPDRIWYSVLDLKDAFFCIPLAPESQLIFAFEWADAEEGESGQLTWTRLPQGFKNSPTLFNEALNRDLQGFRLDHPSVSLLQYVDDLLIAADTQAACLSATRDLLMTLAELGYRVSGKKAQLCQEEVTYLGFKIHKGSRSLSNSRTQAILQIPVPKTKRQVREFLGKIGYCRLFIPGFAELAQPLYAATRPGNDPLVWGEKEEEAFQSLKLALTQPPALALPSLDKPFQLFVEETSGAAKGVLTQALGPWKRPVAYLSKRLDPVAAGWPRCLRAIAAAALLTREASKLTFGQDIEITSSHNLESLLRSPPDKWLTNARITQYQVLLLDPPRVRFKQTAALNPATLLPETDDTLPIHHCLDTLDSLTSTRPDLTDQPLAQAEATLFTDGSSYIRDGKRYAGAAVVTLDSVIWAEPLPIGTSAQKAELIALTKALEWSKDKSVNIYTDSRYAFATLHVHGMIYRERGWLTAGGKAIKNAPEILALLTAVWLPKRVAVMHCKGHQKDDAPTSTGNRRADEVAREVAIRPLSTQATISAGKRTADGSEFEKRTADGSEFESPKKKAKVE

SEQ ID NO: 1396 - protein, 2093 aa, synthetic construct
MPAAKRVKLDGGDKKYSIGLDIGTNSVGWAVITDEYKVPSKKFKVLGNTDRHSIKKNLIGALLFDSGETAEATRLKRTARRRYTRRKNRICYLQEIFSNEMAKVDDSFFHRLEESFLVEEDKKHERHPIFGNIVDEVAYHEKYPTIYHLRKKLVDSTDKADLRLIYLALAHMIKFRGHFLIEGDLNPDNSDVDKLFIQLVQTYNQLFEENPINASGVDAKAILSARLSKSRRLENLIAQLPGEKKNGLFGNLIALSLGLTPNFKSNFDLAEDAKLQLSKDTYDDDLDNLLAQIGDQYADLFLAAKNLSDAILLSDILRVNTEITKAPLSASMIKRYDEHHQDLTLLKALVRQQLPEKYKEIFFDQSKNGYAGYIDGGASQEEFYKFIKPILEKMDGTEELLVKLNREDLLRKQRTFDNGSIPHQIHLGELHAILRRQEDFYPFLKDNREKIEKILTFRIPYYVGPLARGNSRFAWMTRKSEETITPWNFEEVVDKGASAQSFIERMTNFDKNLPNEKVLPKHSLLYEYFTVYNELTKVKYVTEGMRKPAFLSGEQKKAIVDLLFKTNRKVTVKQLKEDYFKKIECFDSVEISGVEDRFNASLGTYHDLLKIIKDKDFLDNEENEDILEDIVLTLTLFEDREMIEERLKTYAHLFDDKVMKQLKRRRYTGWGRLSRKLINGIRDKQSGKTILDFLKSDGFANRNFMQLIHDDSLTFKEDIQKAQVSGQGDSLHEHIANLAGSPAIKKGILQTVKVVDELVKVMGRHKPENIVIEMARENQTTQKGQKNSRERMKRIEEGIKELGSQILKEHPVENTQLQNEKLYLYYLQNGRDMYVDQELDINRLSDYDVDHIVPQSFLKDDSIDNKVLTRSDKARGKSDNVPSEEVVKKMKNYWRQLLNAKLITQRKFDNLTKAERGGLSELDKAGFIKRQLVETRQITKHVAQILDSRMNTKYDENDKLIREVKVITLKSKLVSDFRKDFQFYKVREINNYHHAHDAYLNAVVGTALIKKYPKLESEFVYGDYKVYDVRKMIAKSEQEIGKATAKYFFYSNIMNFFKTEITLANGEIRKRPLIETNGETGEIVWDKGRDFATVRKVLSMPQVNIVKKTEVQTGGFSKESILPKRNSDKLIARKKDWDPKKYGGFDSPTVAYSVLVVAKVEKGKSKKLKSVKELLGITIMERSSFEKNPIDFLEAKGYKEVKKDLIIKLPKYSLFELENGRKRMLASAGELQKGNELALPSKYVNFLYLASHYEKLKGSPEDNEQKQLFVEQHKHYLDEIIEQISEFSKRVILADANLDKVLSAYNKHRDKPIREQAENIIHLFTLTNLGAPAAFKYFDTTIDRKRYTSTKEVLDATLIHQSITGLYETRIDLSQLGGDGGGGGGGGGGTAPLEEEYRLFLEAPIQNVTLLEQWKREIPKVWAEINPPGLASTQAPIHVQLLSTALPVRVRQYPITLEAKRSLRETIRKFRAAGILRPVHSPWNTPLLPVRKSGTSEYRMVQDLREVNKRVETIHPTVPNPYTLLSLLPPDRIWYSVLDLKDAFFCIPLAPESQLIFAFEWADAEEGESGQLTWTRLPQGFKNSPTLFNEALNRDLQGFRLDHPSVSLLQYVDDLLIAADTQAACLSATRDLLMTLAELGYRVSGKKAQLCQEEVTYLGFKIHKGSRSLSNSRTQAILQIPVPKTKRQVREFLGKIGYCRLFIPGFAELAQPLYAATRPGNDPLVWGEKEEEAFQSLKLALTQPPALALPSLDKPFQLFVEETSGAAKGVLTQALGPWKRPVAYLSKRLDPVAAGWPRCLRAIAAAALLTREASKLTFGQDIEITSSHNLESLLRSPPDKWLTNARITQYQVLLLDPPRVRFKQTAALNPATLLPETDDTLPIHHCLDTLDSLTSTRPDLTDQPLAQAEATLFTDGSSYIRDGKRYAGAAVVTLDSVIWAEPLPIGTSAQKAELIALTKALEWSKDKSVNIYTDSRYAFATLHVHGMIYRERGWLTAGGKAIKNAPEILALLTAVWLPKRVAVMHCKGHQKDDAPTSTGNRRADEVAREVAIRPLSTQATISAGKRTADGSEFEKRTADGSEFESPKKKAKVE

SEQ ID NO: 1397 - protein, 2093 aa, synthetic construct
MPAAKRVKLDGGDKKYSIGLDIGTNSVGWAVITDEYKVPSKKFKVLGNTDRHSIKKNLIGALLFDSGETAEATRLKRTARRRYTRRKNRICYLQEIFSNEMAKVDDSFFHRLEESFLVEEDKKHERHPIFGNIVDEVAYHEKYPTIYHLRKKLVDSTDKADLRLIYLALAHMIKFRGHFLIEGDLNPDNSDVDKLFIQLVQTYNQLFEENPINASGVDAKAILSARLSKSRRLENLIAQLPGEKKNGLFGNLIALSLGLTPNFKSNFDLAEDAKLQLSKDTYDDDLDNLLAQIGDQYADLFLAAKNLSDAILLSDILRVNTEITKAPLSASMIKRYDEHHQDLTLLKALVRQQLPEKYKEIFFDQSKNGYAGYIDGGASQEEFYKFIKPILEKMDGTEELLVKLNREDLLRKQRTFDNGSIPHQIHLGELHAILRRQEDFYPFLKDNREKIEKILTFRIPYYVGPLARGNSRFAWMTRKSEETITPWNFEEVVDKGASAQSFIERMTNFDKNLPNEKVLPKHSLLYEYFTVYNELTKVKYVTEGMRKPAFLSGEQKKAIVDLLFKTNRKVTVKQLKEDYFKKIECFDSVEISGVEDRFNASLGTYHDLLKIIKDKDFLDNEENEDILEDIVLTLTLFEDREMIEERLKTYAHLFDDKVMKQLKRRRYTGWGRLSRKLINGIRDKQSGKTILDFLKSDGFANRNFMQLIHDDSLTFKEDIQKAQVSGQGDSLHEHIANLAGSPAIKKGILQTVKVVDELVKVMGRHKPENIVIEMARENQTTQKGQKNSRERMKRIEEGIKELGSQILKEHPVENTQLQNEKLYLYYLQNGRDMYVDQELDINRLSDYDVDHIVPQSFLKDDSIDNKVLTRSDKARGKSDNVPSEEVVKKMKNYWRQLLNAKLITQRKFDNLTKAERGGLSELDKAGFIKRQLVETRQITKHVAQILDSRMNTKYDENDKLIREVKVITLKSKLVSDFRKDFQFYKVREINNYHHAHDAYLNAVVGTALIKKYPKLESEFVYGDYKVYDVRKMIAKSEQEIGKATAKYFFYSNIMNFFKTEITLANGEIRKRPLIETNGETGEIVWDKGRDFATVRKVLSMPQVNIVKKTEVQTGGFSKESILPKRNSDKLIARKKDWDPKKYGGFDSPTVAYSVLVVAKVEKGKSKKLKSVKELLGITIMERSSFEKNPIDFLEAKGYKEVKKDLIIKLPKYSLFELENGRKRMLASAGELQKGNELALPSKYVNFLYLASHYEKLKGSPEDNEQKQLFVEQHKHYLDEIIEQISEFSKRVILADANLDKVLSAYNKHRDKPIREQAENIIHLFTLTNLGAPAAFKYFDTTIDRKRYTSTKEVLDATLIHQSITGLYETRIDLSQLGGDGGGGGPAPGGTAPLEEEYRLFLEAPIQNVTLLEQWKREIPKVWAEINPPGLASTQAPIHVQLLSTALPVRVRQYPITLEAKRSLRETIRKFRAAGILRPVHSPWNTPLLPVRKSGTSEYRMVQDLREVNKRVETIHPTVPNPYTLLSLLPPDRIWYSVLDLKDAFFCIPLAPESQLIFAFEWADAEEGESGQLTWTRLPQGFKNSPTLFNEALNRDLQGFRLDHPSVSLLQYVDDLLIAADTQAACLSATRDLLMTLAELGYRVSGKKAQLCQEEVTYLGFKIHKGSRSLSNSRTQAILQIPVPKTKRQVREFLGKIGYCRLFIPGFAELAQPLYAATRPGNDPLVWGEKEEEAFQSLKLALTQPPALALPSLDKPFQLFVEETSGAAKGVLTQALGPWKRPVAYLSKRLDPVAAGWPRCLRAIAAAALLTREASKLTFGQDIEITSSHNLESLLRSPPDKWLTNARITQYQVLLLDPPRVRFKQTAALNPATLLPETDDTLPIHHCLDTLDSLTSTRPDLTDQPLAQAEATLFTDGSSYIRDGKRYAGAAVVTLDSVIWAEPLPIGTSAQKAELIALTKALEWSKDKSVNIYTDSRYAFATLHVHGMIYRERGWLTAGGKAIKNAPEILALLTAVWLPKRVAVMHCKGHQKDDAPTSTGNRRADEVAREVAIRPLSTQATISAGKRTADGSEFEKRTADGSEFESPKKKAKVE

SEQ ID NO: 1398 - protein, 2099 aa, synthetic construct
MPAAKRVKLDGGDKKYSIGLDIGTNSVGWAVITDEYKVPSKKFKVLGNTDRHSIKKNLIGALLFDSGETAEATRLKRTARRRYTRRKNRICYLQEIFSNEMAKVDDSFFHRLEESFLVEEDKKHERHPIFGNIVDEVAYHEKYPTIYHLRKKLVDSTDKADLRLIYLALAHMIKFRGHFLIEGDLNPDNSDVDKLFIQLVQTYNQLFEENPINASGVDAKAILSARLSKSRRLENLIAQLPGEKKNGLFGNLIALSLGLTPNFKSNFDLAEDAKLQLSKDTYDDDLDNLLAQIGDQYADLFLAAKNLSDAILLSDILRVNTEITKAPLSASMIKRYDEHHQDLTLLKALVRQQLPEKYKEIFFDQSKNGYAGYIDGGASQEEFYKFIKPILEKMDGTEELLVKLNREDLLRKQRTFDNGSIPHQIHLGELHAILRRQEDFYPFLKDNREKIEKILTFRIPYYVGPLARGNSRFAWMTRKSEETITPWNFEEVVDKGASAQSFIERMTNFDKNLPNEKVLPKHSLLYEYFTVYNELTKVKYVTEGMRKPAFLSGEQKKAIVDLLFKTNRKVTVKQLKEDYFKKIECFDSVEISGVEDRFNASLGTYHDLLKIIKDKDFLDNEENEDILEDIVLTLTLFEDREMIEERLKTYAHLFDDKVMKQLKRRRYTGWGRLSRKLINGIRDKQSGKTILDFLKSDGFANRNFMQLIHDDSLTFKEDIQKAQVSGQGDSLHEHIANLAGSPAIKKGILQTVKVVDELVKVMGRHKPENIVIEMARENQTTQKGQKNSRERMKRIEEGIKELGSQILKEHPVENTQLQNEKLYLYYLQNGRDMYVDQELDINRLSDYDVDHIVPQSFLKDDSIDNKVLTRSDKARGKSDNVPSEEVVKKMKNYWRQLLNAKLITQRKFDNLTKAERGGLSELDKAGFIKRQLVETRQITKHVAQILDSRMNTKYDENDKLIREVKVITLKSKLVSDFRKDFQFYKVREINNYHHAHDAYLNAVVGTALIKKYPKLESEFVYGDYKVYDVRKMIAKSEQEIGKATAKYFFYSNIMNFFKTEITLANGEIRKRPLIETNGETGEIVWDKGRDFATVRKVLSMPQVNIVKKTEVQTGGFSKESILPKRNSDKLIARKKDWDPKKYGGFDSPTVAYSVLVVAKVEKGKSKKLKSVKELLGITIMERSSFEKNPIDFLEAKGYKEVKKDLIIKLPKYSLFELENGRKRMLASAGELQKGNELALPSKYVNFLYLASHYEKLKGSPEDNEQKQLFVEQHKHYLDEIIEQISEFSKRVILADANLDKVLSAYNKHRDKPIREQAENIIHLFTLTNLGAPAAFKYFDTTIDRKRYTSTKEVLDATLIHQSITGLYETRIDLSQLGGDGGGGSGGSGGSGGSGGTAPLEEEYRLFLEAPIQNVTLLEQWKREIPKVWAEINPPGLASTQAPIHVQLLSTALPVRVRQYPITLEAKRSLRETIRKFRAAGILRPVHSPWNTPLLPVRKSGTSEYRMVQDLREVNKRVETIHPTVPNPYTLLSLLPPDRIWYSVLDLKDAFFCIPLAPESQLIFAFEWADAEEGESGQLTWTRLPQGFKNSPTLFNEALNRDLQGFRLDHPSVSLLQYVDDLLIAADTQAACLSATRDLLMTLAELGYRVSGKKAQLCQEEVTYLGFKIHKGSRSLSNSRTQAILQIPVPKTKRQVREFLGKIGYCRLFIPGFAELAQPLYAATRPGNDPLVWGEKEEEAFQSLKLALTQPPALALPSLDKPFQLFVEETSGAAKGVLTQALGPWKRPVAYLSKRLDPVAAGWPRCLRAIAAAALLTREASKLTFGQDIEITSSHNLESLLRSPPDKWLTNARITQYQVLLLDPPRVRFKQTAALNPATLLPETDDTLPIHHCLDTLDSLTSTRPDLTDQPLAQAEATLFTDGSSYIRDGKRYAGAAVVTLDSVIWAEPLPIGTSAQKAELIALTKALEWSKDKSVNIYTDSRYAFATLHVHGMIYRERGWLTAGGKAIKNAPEILALLTAVWLPKRVAVMHCKGHQKDDAPTSTGNRRADEVAREVAIRPLSTQATISAGKRTADGSEFEKRTADGSEFESPKKKAKVE

SEQ ID NO: 1399 - protein, 2102 aa, synthetic construct
MPAAKRVKLDGGDKKYSIGLDIGTNSVGWAVITDEYKVPSKKFKVLGNTDRHSIKKNLIGALLFDSGETAEATRLKRTARRRYTRRKNRICYLQEIFSNEMAKVDDSFFHRLEESFLVEEDKKHERHPIFGNIVDEVAYHEKYPTIYHLRKKLVDSTDKADLRLIYLALAHMIKFRGHFLIEGDLNPDNSDVDKLFIQLVQTYNQLFEENPINASGVDAKAILSARLSKSRRLENLIAQLPGEKKNGLFGNLIALSLGLTPNFKSNFDLAEDAKLQLSKDTYDDDLDNLLAQIGDQYADLFLAAKNLSDAILLSDILRVNTEITKAPLSASMIKRYDEHHQDLTLLKALVRQQLPEKYKEIFFDQSKNGYAGYIDGGASQEEFYKFIKPILEKMDGTEELLVKLNREDLLRKQRTFDNGSIPHQIHLGELHAILRRQEDFYPFLKDNREKIEKILTFRIPYYVGPLARGNSRFAWMTRKSEETITPWNFEEVVDKGASAQSFIERMTNFDKNLPNEKVLPKHSLLYEYFTVYNELTKVKYVTEGMRKPAFLSGEQKKAIVDLLFKTNRKVTVKQLKEDYFKKIECFDSVEISGVEDRFNASLGTYHDLLKIIKDKDFLDNEENEDILEDIVLTLTLFEDREMIEERLKTYAHLFDDKVMKQLKRRRYTGWGRLSRKLINGIRDKQSGKTILDFLKSDGFANRNFMQLIHDDSLTFKEDIQKAQVSGQGDSLHEHIANLAGSPAIKKGILQTVKVVDELVKVMGRHKPENIVIEMARENQTTQKGQKNSRERMKRIEEGIKELGSQILKEHPVENTQLQNEKLYLYYLQNGRDMYVDQELDINRLSDYDVDHIVPQSFLKDDSIDNKVLTRSDKARGKSDNVPSEEVVKKMKNYWRQLLNAKLITQRKFDNLTKAERGGLSELDKAGFIKRQLVETRQITKHVAQILDSRMNTKYDENDKLIREVKVITLKSKLVSDFRKDFQFYKVREINNYHHAHDAYLNAVVGTALIKKYPKLESEFVYGDYKVYDVRKMIAKSEQEIGKATAKYFFYSNIMNFFKTEITLANGEIRKRPLIETNGETGEIVWDKGRDFATVRKVLSMPQVNIVKKTEVQTGGFSKESILPKRNSDKLIARKKDWDPKKYGGFDSPTVAYSVLVVAKVEKGKSKKLKSVKELLGITIMERSSFEKNPIDFLEAKGYKEVKKDLIIKLPKYSLFELENGRKRMLASAGELQKGNELALPSKYVNFLYLASHYEKLKGSPEDNEQKQLFVEQHKHYLDEIIEQISEFSKRVILADANLDKVLSAYNKHRDKPIREQAENIIHLFTLTNLGAPAAFKYFDTTIDRKRYTSTKEVLDATLIHQSITGLYETRIDLSQLGGDGGEAAAKGGGGSEAAAKGGTAPLEEEYRLFLEAPIQNVTLLEQWKREIPKVWAEINPPGLASTQAPIHVQLLSTALPVRVRQYPITLEAKRSLRETIRKFRAAGILRPVHSPWNTPLLPVRKSGTSEYRMVQDLREVNKRVETIHPTVPNPYTLLSLLPPDRIWYSVLDLKDAFFCIPLAPESQLIFAFEWADAEEGESGQLTWTRLPQGFKNSPTLFNEALNRDLQGFRLDHPSVSLLQYVDDLLIAADTQAACLSATRDLLMTLAELGYRVSGKKAQLCQEEVTYLGFKIHKGSRSLSNSRTQAILQIPVPKTKRQVREFLGKIGYCRLFIPGFAELAQPLYAATRPGNDPLVWGEKEEEAFQSLKLALTQPPALALPSLDKPFQLFVEETSGAAKGVLTQALGPWKRPVAYLSKRLDPVAAGWPRCLRAIAAAALLTREASKLTFGQDIEITSSHNLESLLRSPPDKWLTNARITQYQVLLLDPPRVRFKQTAALNPATLLPETDDTLPIHHCLDTLDSLTSTRPDLTDQPLAQAEATLFTDGSSYIRDGKRYAGAAVVTLDSVIWAEPLPIGTSAQKAELIALTKALEWSKDKSVNIYTDSRYAFATLHVHGMIYRERGWLTAGGKAIKNAPEILALLTAVWLPKRVAVMHCKGHQKDDAPTSTGNRRADEVAREVAIRPLSTQATISAGKRTADGSEFEKRTADGSEFESPKKKAKVE

SEQ ID NO: 1400 - protein, 2112 aa, synthetic construct
MPAAKRVKLDGGDKKYSIGLDIGTNSVGWAVITDEYKVPSKKFKVLGNTDRHSIKKNLIGALLFDSGETAEATRLKRTARRRYTRRKNRICYLQEIFSNEMAKVDDSFFHRLEESFLVEEDKKHERHPIFGNIVDEVAYHEKYPTIYHLRKKLVDSTDKADLRLIYLALAHMIKFRGHFLIEGDLNPDNSDVDKLFIQLVQTYNQLFEENPINASGVDAKAILSARLSKSRRLENLIAQLPGEKKNGLFGNLIALSLGLTPNFKSNFDLAEDAKLQLSKDTYDDDLDNLLAQIGDQYADLFLAAKNLSDAILLSDILRVNTEITKAPLSASMIKRYDEHHQDLTLLKALVRQQLPEKYKEIFFDQSKNGYAGYIDGGASQEEFYKFIKPILEKMDGTEELLVKLNREDLLRKQRTFDNGSIPHQIHLGELHAILRRQEDFYPFLKDNREKIEKILTFRIPYYVGPLARGNSRFAWMTRKSEETITPWNFEEVVDKGASAQSFIERMTNFDKNLPNEKVLPKHSLLYEYFTVYNELTKVKYVTEGMRKPAFLSGEQKKAIVDLLFKTNRKVTVKQLKEDYFKKIECFDSVEISGVEDRFNASLGTYHDLLKIIKDKDFLDNEENEDILEDIVLTLTLFEDREMIEERLKTYAHLFDDKVMKQLKRRRYTGWGRLSRKLINGIRDKQSGKTILDFLKSDGFANRNFMQLIHDDSLTFKEDIQKAQVSGQGDSLHEHIANLAGSPAIKKGILQTVKVVDELVKVMGRHKPENIVIEMARENQTTQKGQKNSRERMKRIEEGIKELGSQILKEHPVENTQLQNEKLYLYYLQNGRDMYVDQELDINRLSDYDVDHIVPQSFLKDDSIDNKVLTRSDKARGKSDNVPSEEVVKKMKNYWRQLLNAKLITQRKFDNLTKAERGGLSELDKAGFIKRQLVETRQITKHVAQILDSRMNTKYDENDKLIREVKVITLKSKLVSDFRKDFQFYKVREINNYHHAHDAYLNAVVGTALIKKYPKLESEFVYGDYKVYDVRKMIAKSEQEIGKATAKYFFYSNIMNFFKTEITLANGEIRKRPLIETNGETGEIVWDKGRDFATVRKVLSMPQVNIVKKTEVQTGGFSKESILPKRNSDKLIARKKDWDPKKYGGFDSPTVAYSVLVVAKVEKGKSKKLKSVKELLGITIMERSSFEKNPIDFLEAKGYKEVKKDLIIKLPKYSLFELENGRKRMLASAGELQKGNELALPSKYVNFLYLASHYEKLKGSPEDNEQKQLFVEQHKHYLDEIIEQISEFSKRVILADANLDKVLSAYNKHRDKPIREQAENIIHLFTLTNLGAPAAFKYFDTTIDRKRYTSTKEVLDATLIHQSITGLYETRIDLSQLGGDGGEAAAKEAAAKEAAAKEAAAKEAAAKGGTAPLEEEYRLFLEAPIQNVTLLEQWKREIPKVWAEINPPGLASTQAPIHVQLLSTALPVRVRQYPITLEAKRSLRETIRKFRAAGILRPVHSPWNTPLLPVRKSGTSEYRMVQDLREVNKRVETIHPTVPNPYTLLSLLPPDRIWYSVLDLKDAFFCIPLAPESQLIFAFEWADAEEGESGQLTWTRLPQGFKNSPTLFNEALNRDLQGFRLDHPSVSLLQYVDDLLIAADTQAACLSATRDLLMTLAELGYRVSGKKAQLCQEEVTYLGFKIHKGSRSLSNSRTQAILQIPVPKTKRQVREFLGKIGYCRLFIPGFAELAQPLYAATRPGNDPLVWGEKEEEAFQSLKLALTQPPALALPSLDKPFQLFVEETSGAAKGVLTQALGPWKRPVAYLSKRLDPVAAGWPRCLRAIAAAALLTREASKLTFGQDIEITSSHNLESLLRSPPDKWLTNARITQYQVLLLDPPRVRFKQTAALNPATLLPETDDTLPIHHCLDTLDSLTSTRPDLTDQPLAQAEATLFTDGSSYIRDGKRYAGAAVVTLDSVIWAEPLPIGTSAQKAELIALTKALEWSKDKSVNIYTDSRYAFATLHVHGMIYRERGWLTAGGKAIKNAPEILALLTAVWLPKRVAVMHCKGHQKDDAPTSTGNRRADEVAREVAIRPLSTQATISAGKRTADGSEFEKRTADGSEFESPKKKAKVE

SEQ ID NO: 1401 - protein, 2096 aa, synthetic construct
MPAAKRVKLDGGDKKYSIGLDIGTNSVGWAVITDEYKVPSKKFKVLGNTDRHSIKKNLIGALLFDSGETAEATRLKRTARRRYTRRKNRICYLQEIFSNEMAKVDDSFFHRLEESFLVEEDKKHERHPIFGNIVDEVAYHEKYPTIYHLRKKLVDSTDKADLRLIYLALAHMIKFRGHFLIEGDLNPDNSDVDKLFIQLVQTYNQLFEENPINASGVDAKAILSARLSKSRRLENLIAQLPGEKKNGLFGNLIALSLGLTPNFKSNFDLAEDAKLQLSKDTYDDDLDNLLAQIGDQYADLFLAAKNLSDAILLSDILRVNTEITKAPLSASMIKRYDEHHQDLTLLKALVRQQLPEKYKEIFFDQSKNGYAGYIDGGASQEEFYKFIKPILEKMDGTEELLVKLNREDLLRKQRTFDNGSIPHQIHLGELHAILRRQEDFYPFLKDNREKIEKILTFRIPYYVGPLARGNSRFAWMTRKSEETITPWNFEEVVDKGASAQSFIERMTNFDKNLPNEKVLPKHSLLYEYFTVYNELTKVKYVTEGMRKPAFLSGEQKKAIVDLLFKTNRKVTVKQLKEDYFKKIECFDSVEISGVEDRFNASLGTYHDLLKIIKDKDFLDNEENEDILEDIVLTLTLFEDREMIEERLKTYAHLFDDKVMKQLKRRRYTGWGRLSRKLINGIRDKQSGKTILDFLKSDGFANRNFMQLIHDDSLTFKEDIQKAQVSGQGDSLHEHIANLAGSPAIKKGILQTVKVVDELVKVMGRHKPENIVIEMARENQTTQKGQKNSRERMKRIEEGIKELGSQILKEHPVENTQLQNEKLYLYYLQNGRDMYVDQELDINRLSDYDVDHIVPQSFLKDDSIDNKVLTRSDKARGKSDNVPSEEVVKKMKNYWRQLLNAKLITQRKFDNLTKAERGGLSELDKAGFIKRQLVETRQITKHVAQILDSRMNTKYDENDKLIREVKVITLKSKLVSDFRKDFQFYKVREINNYHHAHDAYLNAVVGTALIKKYPKLESEFVYGDYKVYDVRKMIAKSEQEIGKATAKYFFYSNIMNFFKTEITLANGEIRKRPLIETNGETGEIVWDKGRDFATVRKVLSMPQVNIVKKTEVQTGGFSKESILPKRNSDKLIARKKDWDPKKYGGFDSPTVAYSVLVVAKVEKGKSKKLKSVKELLGITIMERSSFEKNPIDFLEAKGYKEVKKDLIIKLPKYSLFELENGRKRMLASAGELQKGNELALPSKYVNFLYLASHYEKLKGSPEDNEQKQLFVEQHKHYLDEIIEQISEFSKRVILADANLDKVLSAYNKHRDKPIREQAENIIHLFTLTNLGAPAAFKYFDTTIDRKRYTSTKEVLDATLIHQSITGLYETRIDLSQLGGDGGPAPGSSGGSGGTAPLEEEYRLFLEAPIQNVTLLEQWKREIPKVWAEINPPGLASTQAPIHVQLLSTALPVRVRQYPITLEAKRSLRETIRKFRAAGILRPVHSPWNTPLLPVRKSGTSEYRMVQDLREVNKRVETIHPTVPNPYTLLSLLPPDRIWYSVLDLKDAFFCIPLAPESQLIFAFEWADAEEGESGQLTWTRLPQGFKNSPTLFNEALNRDLQGFRLDHPSVSLLQYVDDLLIAADTQAACLSATRDLLMTLAELGYRVSGKKAQLCQEEVTYLGFKIHKGSRSLSNSRTQAILQIPVPKTKRQVREFLGKIGYCRLFIPGFAELAQPLYAATRPGNDPLVWGEKEEEAFQSLKLALTQPPALALPSLDKPFQLFVEETSGAAKGVLTQALGPWKRPVAYLSKRLDPVAAGWPRCLRAIAAAALLTREASKLTFGQDIEITSSHNLESLLRSPPDKWLTNARITQYQVLLLDPPRVRFKQTAALNPATLLPETDDTLPIHHCLDTLDSLTSTRPDLTDQPLAQAEATLFTDGSSYIRDGKRYAGAAVVTLDSVIWAEPLPIGTSAQKAELIALTKALEWSKDKSVNIYTDSRYAFATLHVHGMIYRERGWLTAGGKAIKNAPEILALLTAVWLPKRVAVMHCKGHQKDDAPTSTGNRRADEVAREVAIRPLSTQATISAGKRTADGSEFEKRTADGSEFESPKKKAKVE

SEQ ID NO: 1402 - protein, 2096 aa, synthetic construct
MPAAKRVKLDGGDKKYSIGLDIGTNSVGWAVITDEYKVPSKKFKVLGNTDRHSIKKNLIGALLFDSGETAEATRLKRTARRRYTRRKNRICYLQEIFSNEMAKVDDSFFHRLEESFLVEEDKKHERHPIFGNIVDEVAYHEKYPTIYHLRKKLVDSTDKADLRLIYLALAHMIKFRGHFLIEGDLNPDNSDVDKLFIQLVQTYNQLFEENPINASGVDAKAILSARLSKSRRLENLIAQLPGEKKNGLFGNLIALSLGLTPNFKSNFDLAEDAKLQLSKDTYDDDLDNLLAQIGDQYADLFLAAKNLSDAILLSDILRVNTEITKAPLSASMIKRYDEHHQDLTLLKALVRQQLPEKYKEIFFDQSKNGYAGYIDGGASQEEFYKFIKPILEKMDGTEELLVKLNREDLLRKQRTFDNGSIPHQIHLGELHAILRRQEDFYPFLKDNREKIEKILTFRIPYYVGPLARGNSRFAWMTRKSEETITPWNFEEVVDKGASAQSFIERMTNFDKNLPNEKVLPKHSLLYEYFTVYNELTKVKYVTEGMRKPAFLSGEQKKAIVDLLFKTNRKVTVKQLKEDYFKKIECFDSVEISGVEDRFNASLGTYHDLLKIIKDKDFLDNEENEDILEDIVLTLTLFEDREMIEERLKTYAHLFDDKVMKQLKRRRYTGWGRLSRKLINGIRDKQSGKTILDFLKSDGFANRNFMQLIHDDSLTFKEDIQKAQVSGQGDSLHEHIANLAGSPAIKKGILQTVKVVDELVKVMGRHKPENIVIEMARENQTTQKGQKNSRERMKRIEEGIKELGSQILKEHPVENTQLQNEKLYLYYLQNGRDMYVDQELDINRLSDYDVDHIVPQSFLKDDSIDNKVLTRSDKARGKSDNVPSEEVVKKMKNYWRQLLNAKLITQRKFDNLTKAERGGLSELDKAGFIKRQLVETRQITKHVAQILDSRMNTKYDENDKLIREVKVITLKSKLVSDFRKDFQFYKVREINNYHHAHDAYLNAVVGTALIKKYPKLESEFVYGDYKVYDVRKMIAKSEQEIGKATAKYFFYSNIMNFFKTEITLANGEIRKRPLIETNGETGEIVWDKGRDFATVRKVLSMPQVNIVKKTEVQTGGFSKESILPKRNSDKLIARKKDWDPKKYGGFDSPTVAYSVLVVAKVEKGKSKKLKSVKELLGITIMERSSFEKNPIDFLEAKGYKEVKKDLIIKLPKYSLFELENGRKRMLASAGELQKGNELALPSKYVNFLYLASHYEKLKGSPEDNEQKQLFVEQHKHYLDEIIEQISEFSKRVILADANLDKVLSAYNKHRDKPIREQAENIIHLFTLTNLGAPAAFKYFDTTIDRKRYTSTKEVLDATLIHQSITGLYETRIDLSQLGGDGGGGGPAPGGSGGTAPLEEEYRLFLEAPIQNVTLLEQWKREIPKVWAEINPPGLASTQAPIHVQLLSTALPVRVRQYPITLEAKRSLRETIRKFRAAGILRPVHSPWNTPLLPVRKSGTSEYRMVQDLREVNKRVETIHPTVPNPYTLLSLLPPDRIWYSVLDLKDAFFCIPLAPESQLIFAFEWADAEEGESGQLTWTRLPQGFKNSPTLFNEALNRDLQGFRLDHPSVSLLQYVDDLLIAADTQAACLSATRDLLMTLAELGYRVSGKKAQLCQEEVTYLGFKIHKGSRSLSNSRTQAILQIPVPKTKRQVREFLGKIGYCRLFIPGFAELAQPLYAATRPGNDPLVWGEKEEEAFQSLKLALTQPPALALPSLDKPFQLFVEETSGAAKGVLTQALGPWKRPVAYLSKRLDPVAAGWPRCLRAIAAAALLTREASKLTFGQDIEITSSHNLESLLRSPPDKWLTNARITQYQVLLLDPPRVRFKQTAALNPATLLPETDDTLPIHHCLDTLDSLTSTRPDLTDQPLAQAEATLFTDGSSYIRDGKRYAGAAVVTLDSVIWAEPLPIGTSAQKAELIALTKALEWSKDKSVNIYTDSRYAFATLHVHGMIYRERGWLTAGGKAIKNAPEILALLTAVWLPKRVAVMHCKGHQKDDAPTSTGNRRADEVAREVAIRPLSTQATISAGKRTADGSEFEKRTADGSEFESPKKKAKVE

SEQ ID NO: 1403 - protein, 2096 aa, synthetic construct
MPAAKRVKLDGGDKKYSIGLDIGTNSVGWAVITDEYKVPSKKFKVLGNTDRHSIKKNLIGALLFDSGETAEATRLKRTARRRYTRRKNRICYLQEIFSNEMAKVDDSFFHRLEESFLVEEDKKHERHPIFGNIVDEVAYHEKYPTIYHLRKKLVDSTDKADLRLIYLALAHMIKFRGHFLIEGDLNPDNSDVDKLFIQLVQTYNQLFEENPINASGVDAKAILSARLSKSRRLENLIAQLPGEKKNGLFGNLIALSLGLTPNFKSNFDLAEDAKLQLSKDTYDDDLDNLLAQIGDQYADLFLAAKNLSDAILLSDILRVNTEITKAPLSASMIKRYDEHHQDLTLLKALVRQQLPEKYKEIFFDQSKNGYAGYIDGGASQEEFYKFIKPILEKMDGTEELLVKLNREDLLRKQRTFDNGSIPHQIHLGELHAILRRQEDFYPFLKDNREKIEKILTFRIPYYVGPLARGNSRFAWMTRKSEETITPWNFEEVVDKGASAQSFIERMTNFDKNLPNEKVLPKHSLLYEYFTVYNELTKVKYVTEGMRKPAFLSGEQKKAIVDLLFKTNRKVTVKQLKEDYFKKIECFDSVEISGVEDRFNASLGTYHDLLKIIKDKDFLDNEENEDILEDIVLTLTLFEDREMIEERLKTYAHLFDDKVMKQLKRRRYTGWGRLSRKLINGIRDKQSGKTILDFLKSDGFANRNFMQLIHDDSLTFKEDIQKAQVSGQGDSLHEHIANLAGSPAIKKGILQTVKVVDELVKVMGRHKPENIVIEMARENQTTQKGQKNSRERMKRIEEGIKELGSQILKEHPVENTQLQNEKLYLYYLQNGRDMYVDQELDINRLSDYDVDHIVPQSFLKDDSIDNKVLTRSDKARGKSDNVPSEEVVKKMKNYWRQLLNAKLITQRKFDNLTKAERGGLSELDKAGFIKRQLVETRQITKHVAQILDSRMNTKYDENDKLIREVKVITLKSKLVSDFRKDFQFYKVREINNYHHAHDAYLNAVVGTALIKKYPKLESEFVYGDYKVYDVRKMIAKSEQEIGKATAKYFFYSNIMNFFKTEITLANGEIRKRPLIETNGETGEIVWDKGRDFATVRKVLSMPQVNIVKKTEVQTGGFSKESILPKRNSDKLIARKKDWDPKKYGGFDSPTVAYSVLVVAKVEKGKSKKLKSVKELLGITIMERSSFEKNPIDFLEAKGYKEVKKDLIIKLPKYSLFELENGRKRMLASAGELQKGNELALPSKYVNFLYLASHYEKLKGSPEDNEQKQLFVEQHKHYLDEIIEQISEFSKRVILADANLDKVLSAYNKHRDKPIREQAENIIHLFTLTNLGAPAAFKYFDTTIDRKRYTSTKEVLDATLIHQSITGLYETRIDLSQLGGDGGPAPGGSGGGGGTAPLEEEYRLFLEAPIQNVTLLEQWKREIPKVWAEINPPGLASTQAPIHVQLLSTALPVRVRQYPITLEAKRSLRETIRKFRAAGILRPVHSPWNTPLLPVRKSGTSEYRMVQDLREVNKRVETIHPTVPNPYTLLSLLPPDRIWYSVLDLKDAFFCIPLAPESQLIFAFEWADAEEGESGQLTWTRLPQGFKNSPTLFNEALNRDLQGFRLDHPSVSLLQYVDDLLIAADTQAACLSATRDLLMTLAELGYRVSGKKAQLCQEEVTYLGFKIHKGSRSLSNSRTQAILQIPVPKTKRQVREFLGKIGYCRLFIPGFAELAQPLYAATRPGNDPLVWGEKEEEAFQSLKLALTQPPALALPSLDKPFQLFVEETSGAAKGVLTQALGPWKRPVAYLSKRLDPVAAGWPRCLRAIAAAALLTREASKLTFGQDIEITSSHNLESLLRSPPDKWLTNARITQYQVLLLDPPRVRFKQTAALNPATLLPETDDTLPIHHCLDTLDSLTSTRPDLTDQPLAQAEATLFTDGSSYIRDGKRYAGAAVVTLDSVIWAEPLPIGTSAQKAELIALTKALEWSKDKSVNIYTDSRYAFATLHVHGMIYRERGWLTAGGKAIKNAPEILALLTAVWLPKRVAVMHCKGHQKDDAPTSTGNRRADEVAREVAIRPLSTQATISAGKRTADGSEFEKRTADGSEFESPKKKAKVE

SEQ ID NO: 1404 - protein, 2098 aa, synthetic construct
MPAAKRVKLDGGDKKYSIGLDIGTNSVGWAVITDEYKVPSKKFKVLGNTDRHSIKKNLIGALLFDSGETAEATRLKRTARRRYTRRKNRICYLQEIFSNEMAKVDDSFFHRLEESFLVEEDKKHERHPIFGNIVDEVAYHEKYPTIYHLRKKLVDSTDKADLRLIYLALAHMIKFRGHFLIEGDLNPDNSDVDKLFIQLVQTYNQLFEENPINASGVDAKAILSARLSKSRRLENLIAQLPGEKKNGLFGNLIALSLGLTPNFKSNFDLAEDAKLQLSKDTYDDDLDNLLAQIGDQYADLFLAAKNLSDAILLSDILRVNTEITKAPLSASMIKRYDEHHQDLTLLKALVRQQLPEKYKEIFFDQSKNGYAGYIDGGASQEEFYKFIKPILEKMDGTEELLVKLNREDLLRKQRTFDNGSIPHQIHLGELHAILRRQEDFYPFLKDNREKIEKILTFRIPYYVGPLARGNSRFAWMTRKSEETITPWNFEEVVDKGASAQSFIERMTNFDKNLPNEKVLPKHSLLYEYFTVYNELTKVKYVTEGMRKPAFLSGEQKKAIVDLLFKTNRKVTVKQLKEDYFKKIECFDSVEISGVEDRFNASLGTYHDLLKIIKDKDFLDNEENEDILEDIVLTLTLFEDREMIEERLKTYAHLFDDKVMKQLKRRRYTGWGRLSRKLINGIRDKQSGKTILDFLKSDGFANRNFMQLIHDDSLTFKEDIQKAQVSGQGDSLHEHIANLAGSPAIKKGILQTVKVVDELVKVMGRHKPENIVIEMARENQTTQKGQKNSRERMKRIEEGIKELGSQILKEHPVENTQLQNEKLYLYYLQNGRDMYVDQELDINRLSDYDVDHIVPQSFLKDDSIDNKVLTRSDKARGKSDNVPSEEVVKKMKNYWRQLLNAKLITQRKFDNLTKAERGGLSELDKAGFIKRQLVETRQITKHVAQILDSRMNTKYDENDKLIREVKVITLKSKLVSDFRKDFQFYKVREINNYHHAHDAYLNAVVGTALIKKYPKLESEFVYGDYKVYDVRKMIAKSEQEIGKATAKYFFYSNIMNFFKTEITLANGEIRKRPLIETNGETGEIVWDKGRDFATVRKVLSMPQVNIVKKTEVQTGGFSKESILPKRNSDKLIARKKDWDPKKYGGFDSPTVAYSVLVVAKVEKGKSKKLKSVKELLGITIMERSSFEKNPIDFLEAKGYKEVKKDLIIKLPKYSLFELENGRKRMLASAGELQKGNELALPSKYVNFLYLASHYEKLKGSPEDNEQKQLFVEQHKHYLDEIIEQISEFSKRVILADANLDKVLSAYNKHRDKPIREQAENIIHLFTLTNLGAPAAFKYFDTTIDRKRYTSTKEVLDATLIHQSITGLYETRIDLSQLGGDGGGGGGSSEAAAKGGTAPLEEEYRLFLEAPIQNVTLLEQWKREIPKVWAEINPPGLASTQAPIHVQLLSTALPVRVRQYPITLEAKRSLRETIRKFRAAGILRPVHSPWNTPLLPVRKSGTSEYRMVQDLREVNKRVETIHPTVPNPYTLLSLLPPDRIWYSVLDLKDAFFCIPLAPESQLIFAFEWADAEEGESGQLTWTRLPQGFKNSPTLFNEALNRDLQGFRLDHPSVSLLQYVDDLLIAADTQAACLSATRDLLMTLAELGYRVSGKKAQLCQEEVTYLGFKIHKGSRSLSNSRTQAILQIPVPKTKRQVREFLGKIGYCRLFIPGFAELAQPLYAATRPGNDPLVWGEKEEEAFQSLKLALTQPPALALPSLDKPFQLFVEETSGAAKGVLTQALGPWKRPVAYLSKRLDPVAAGWPRCLRAIAAAALLTREASKLTFGQDIEITSSHNLESLLRSPPDKWLTNARITQYQVLLLDPPRVRFKQTAALNPATLLPETDDTLPIHHCLDTLDSLTSTRPDLTDQPLAQAEATLFTDGSSYIRDGKRYAGAAVVTLDSVIWAEPLPIGTSAQKAELIALTKALEWSKDKSVNIYTDSRYAFATLHVHGMIYRERGWLTAGGKAIKNAPEILALLTAVWLPKRVAVMHCKGHQKDDAPTSTGNRRADEVAREVAIRPLSTQATISAGKRTADGSEFEKRTADGSEFESPKKKAKVE

SEQ ID NO: 1405 - protein, 2095 aa, synthetic construct
MPAAKRVKLDGGDKKYSIGLDIGTNSVGWAVITDEYKVPSKKFKVLGNTDRHSIKKNLIGALLFDSGETAEATRLKRTARRRYTRRKNRICYLQEIFSNEMAKVDDSFFHRLEESFLVEEDKKHERHPIFGNIVDEVAYHEKYPTIYHLRKKLVDSTDKADLRLIYLALAHMIKFRGHFLIEGDLNPDNSDVDKLFIQLVQTYNQLFEENPINASGVDAKAILSARLSKSRRLENLIAQLPGEKKNGLFGNLIALSLGLTPNFKSNFDLAEDAKLQLSKDTYDDDLDNLLAQIGDQYADLFLAAKNLSDAILLSDILRVNTEITKAPLSASMIKRYDEHHQDLTLLKALVRQQLPEKYKEIFFDQSKNGYAGYIDGGASQEEFYKFIKPILEKMDGTEELLVKLNREDLLRKQRTFDNGSIPHQIHLGELHAILRRQEDFYPFLKDNREKIEKILTFRIPYYVGPLARGNSRFAWMTRKSEETITPWNFEEVVDKGASAQSFIERMTNFDKNLPNEKVLPKHSLLYEYFTVYNELTKVKYVTEGMRKPAFLSGEQKKAIVDLLFKTNRKVTVKQLKEDYFKKIECFDSVEISGVEDRFNASLGTYHDLLKIIKDKDFLDNEENEDILEDIVLTLTLFEDREMIEERLKTYAHLFDDKVMKQLKRRRYTGWGRLSRKLINGIRDKQSGKTILDFLKSDGFANRNFMQLIHDDSLTFKEDIQKAQVSGQGDSLHEHIANLAGSPAIKKGILQTVKVVDELVKVMGRHKPENIVIEMARENQTTQKGQKNSRERMKRIEEGIKELGSQILKEHPVENTQLQNEKLYLYYLQNGRDMYVDQELDINRLSDYDVDHIVPQSFLKDDSIDNKVLTRSDKARGKSDNVPSEEVVKKMKNYWRQLLNAKLITQRKFDNLTKAERGGLSELDKAGFIKRQLVETRQITKHVAQILDSRMNTKYDENDKLIREVKVITLKSKLVSDFRKDFQFYKVREINNYHHAHDAYLNAVVGTALIKKYPKLESEFVYGDYKVYDVRKMIAKSEQEIGKATAKYFFYSNIMNFFKTEITLANGEIRKRPLIETNGETGEIVWDKGRDFATVRKVLSMPQVNIVKKTEVQTGGFSKESILPKRNSDKLIARKKDWDPKKYGGFDSPTVAYSVLVVAKVEKGKSKKLKSVKELLGITIMERSSFEKNPIDFLEAKGYKEVKKDLIIKLPKYSLFELENGRKRMLASAGELQKGNELALPSKYVNFLYLASHYEKLKGSPEDNEQKQLFVEQHKHYLDEIIEQISEFSKRVILADANLDKVLSAYNKHRDKPIREQAENIIHLFTLTNLGAPAAFKYFDTTIDRKRYTSTKEVLDATLIHQSITGLYETRIDLSQLGGDGGGSSEAAAKGGTAPLEEEYRLFLEAPIQNVTLLEQWKREIPKVWAEINPPGLASTQAPIHVQLLSTALPVRVRQYPITLEAKRSLRETIRKFRAAGILRPVHSPWNTPLLPVRKSGTSEYRMVQDLREVNKRVETIHPTVPNPYTLLSLLPPDRIWYSVLDLKDAFFCIPLAPESQLIFAFEWADAEEGESGQLTWTRLPQGFKNSPTLFNEALNRDLQGFRLDHPSVSLLQYVDDLLIAADTQAACLSATRDLLMTLAELGYRVSGKKAQLCQEEVTYLGFKIHKGSRSLSNSRTQAILQIPVPKTKRQVREFLGKIGYCRLFIPGFAELAQPLYAATRPGNDPLVWGEKEEEAFQSLKLALTQPPALALPSLDKPFQLFVEETSGAAKGVLTQALGPWKRPVAYLSKRLDPVAAGWPRCLRAIAAAALLTREASKLTFGQDIEITSSHNLESLLRSPPDKWLTNARITQYQVLLLDPPRVRFKQTAALNPATLLPETDDTLPIHHCLDTLDSLTSTRPDLTDQPLAQAEATLFTDGSSYIRDGKRYAGAAVVTLDSVIWAEPLPIGTSAQKAELIALTKALEWSKDKSVNIYTDSRYAFATLHVHGMIYRERGWLTAGGKAIKNAPEILALLTAVWLPKRVAVMHCKGHQKDDAPTSTGNRRADEVAREVAIRPLSTQATISAGKRTADGSEFEKRTADGSEFESPKKKAKVE

SEQ ID NO: 1406 - protein, 2098 aa, synthetic construct
MPAAKRVKLDGGDKKYSIGLDIGTNSVGWAVITDEYKVPSKKFKVLGNTDRHSIKKNLIGALLFDSGETAEATRLKRTARRRYTRRKNRICYLQEIFSNEMAKVDDSFFHRLEESFLVEEDKKHERHPIFGNIVDEVAYHEKYPTIYHLRKKLVDSTDKADLRLIYLALAHMIKFRGHFLIEGDLNPDNSDVDKLFIQLVQTYNQLFEENPINASGVDAKAILSARLSKSRRLENLIAQLPGEKKNGLFGNLIALSLGLTPNFKSNFDLAEDAKLQLSKDTYDDDLDNLLAQIGDQYADLFLAAKNLSDAILLSDILRVNTEITKAPLSASMIKRYDEHHQDLTLLKALVRQQLPEKYKEIFFDQSKNGYAGYIDGGASQEEFYKFIKPILEKMDGTEELLVKLNREDLLRKQRTFDNGSIPHQIHLGELHAILRRQEDFYPFLKDNREKIEKILTFRIPYYVGPLARGNSRFAWMTRKSEETITPWNFEEVVDKGASAQSFIERMTNFDKNLPNEKVLPKHSLLYEYFTVYNELTKVKYVTEGMRKPAFLSGEQKKAIVDLLFKTNRKVTVKQLKEDYFKKIECFDSVEISGVEDRFNASLGTYHDLLKIIKDKDFLDNEENEDILEDIVLTLTLFEDREMIEERLKTYAHLFDDKVMKQLKRRRYTGWGRLSRKLINGIRDKQSGKTILDFLKSDGFANRNFMQLIHDDSLTFKEDIQKAQVSGQGDSLHEHIANLAGSPAIKKGILQTVKVVDELVKVMGRHKPENIVIEMARENQTTQKGQKNSRERMKRIEEGIKELGSQILKEHPVENTQLQNEKLYLYYLQNGRDMYVDQELDINRLSDYDVDHIVPQSFLKDDSIDNKVLTRSDKARGKSDNVPSEEVVKKMKNYWRQLLNAKLITQRKFDNLTKAERGGLSELDKAGFIKRQLVETRQITKHVAQILDSRMNTKYDENDKLIREVKVITLKSKLVSDFRKDFQFYKVREINNYHHAHDAYLNAVVGTALIKKYPKLESEFVYGDYKVYDVRKMIAKSEQEIGKATAKYFFYSNIMNFFKTEITLANGEIRKRPLIETNGETGEIVWDKGRDFATVRKVLSMPQVNIVKKTEVQTGGFSKESILPKRNSDKLIARKKDWDPKKYGGFDSPTVAYSVLVVAKVEKGKSKKLKSVKELLGITIMERSSFEKNPIDFLEAKGYKEVKKDLIIKLPKYSLFELENGRKRMLASAGELQKGNELALPSKYVNFLYLASHYEKLKGSPEDNEQKQLFVEQHKHYLDEIIEQISEFSKRVILADANLDKVLSAYNKHRDKPIREQAENIIHLFTLTNLGAPAAFKYFDTTIDRKRYTSTKEVLDATLIHQSITGLYETRIDLSQLGGDGGEAAAKGGSGSSGGTAPLEEEYRLFLEAPIQNVTLLEQWKREIPKVWAEINPPGLASTQAPIHVQLLSTALPVRVRQYPITLEAKRSLRETIRKFRAAGILRPVHSPWNTPLLPVRKSGTSEYRMVQDLREVNKRVETIHPTVPNPYTLLSLLPPDRIWYSVLDLKDAFFCIPLAPESQLIFAFEWADAEEGESGQLTWTRLPQGFKNSPTLFNEALNRDLQGFRLDHPSVSLLQYVDDLLIAADTQAACLSATRDLLMTLAELGYRVSGKKAQLCQEEVTYLGFKIHKGSRSLSNSRTQAILQIPVPKTKRQVREFLGKIGYCRLFIPGFAELAQPLYAATRPGNDPLVWGEKEEEAFQSLKLALTQPPALALPSLDKPFQLFVEETSGAAKGVLTQALGPWKRPVAYLSKRLDPVAAGWPRCLRAIAAAALLTREASKLTFGQDIEITSSHNLESLLRSPPDKWLTNARITQYQVLLLDPPRVRFKQTAALNPATLLPETDDTLPIHHCLDTLDSLTSTRPDLTDQPLAQAEATLFTDGSSYIRDGKRYAGAAVVTLDSVIWAEPLPIGTSAQKAELIALTKALEWSKDKSVNIYTDSRYAFATLHVHGMIYRERGWLTAGGKAIKNAPEILALLTAVWLPKRVAVMHCKGHQKDDAPTSTGNRRADEVAREVAIRPLSTQATISAGKRTADGSEFEKRTADGSEFESPKKKAKVE

SEQ ID NO: 1407 - protein, 2095 aa, synthetic construct
MPAAKRVKLDGGDKKYSIGLDIGTNSVGWAVITDEYKVPSKKFKVLGNTDRHSIKKNLIGALLFDSGETAEATRLKRTARRRYTRRKNRICYLQEIFSNEMAKVDDSFFHRLEESFLVEEDKKHERHPIFGNIVDEVAYHEKYPTIYHLRKKLVDSTDKADLRLIYLALAHMIKFRGHFLIEGDLNPDNSDVDKLFIQLVQTYNQLFEENPINASGVDAKAILSARLSKSRRLENLIAQLPGEKKNGLFGNLIALSLGLTPNFKSNFDLAEDAKLQLSKDTYDDDLDNLLAQIGDQYADLFLAAKNLSDAILLSDILRVNTEITKAPLSASMIKRYDEHHQDLTLLKALVRQQLPEKYKEIFFDQSKNGYAGYIDGGASQEEFYKFIKPILEKMDGTEELLVKLNREDLLRKQRTFDNGSIPHQIHLGELHAILRRQEDFYPFLKDNREKIEKILTFRIPYYVGPLARGNSRFAWMTRKSEETITPWNFEEVVDKGASAQSFIERMTNFDKNLPNEKVLPKHSLLYEYFTVYNELTKVKYVTEGMRKPAFLSGEQKKAIVDLLFKTNRKVTVKQLKEDYFKKIECFDSVEISGVEDRFNASLGTYHDLLKIIKDKDFLDNEENEDILEDIVLTLTLFEDREMIEERLKTYAHLFDDKVMKQLKRRRYTGWGRLSRKLINGIRDKQSGKTILDFLKSDGFANRNFMQLIHDDSLTFKEDIQKAQVSGQGDSLHEHIANLAGSPAIKKGILQTVKVVDELVKVMGRHKPENIVIEMARENQTTQKGQKNSRERMKRIEEGIKELGSQILKEHPVENTQLQNEKLYLYYLQNGRDMYVDQELDINRLSDYDVDHIVPQSFLKDDSIDNKVLTRSDKARGKSDNVPSEEVVKKMKNYWRQLLNAKLITQRKFDNLTKAERGGLSELDKAGFIKRQLVETRQITKHVAQILDSRMNTKYDENDKLIREVKVITLKSKLVSDFRKDFQFYKVREINNYHHAHDAYLNAVVGTALIKKYPKLESEFVYGDYKVYDVRKMIAKSEQEIGKATAKYFFYSNIMNFFKTEITLANGEIRKRPLIETNGETGEIVWDKGRDFATVRKVLSMPQVNIVKKTEVQTGGFSKESILPKRNSDKLIARKKDWDPKKYGGFDSPTVAYSVLVVAKVEKGKSKKLKSVKELLGITIMERSSFEKNPIDFLEAKGYKEVKKDLIIKLPKYSLFELENGRKRMLASAGELQKGNELALPSKYVNFLYLASHYEKLKGSPEDNEQKQLFVEQHKHYLDEIIEQISEFSKRVILADANLDKVLSAYNKHRDKPIREQAENIIHLFTLTNLGAPAAFKYFDTTIDRKRYTSTKEVLDATLIHQSITGLYETRIDLSQLGGDGGPAPEAAAKGGTAPLEEEYRLFLEAPIQNVTLLEQWKREIPKVWAEINPPGLASTQAPIHVQLLSTALPVRVRQYPITLEAKRSLRETIRKFRAAGILRPVHSPWNTPLLPVRKSGTSEYRMVQDLREVNKRVETIHPTVPNPYTLLSLLPPDRIWYSVLDLKDAFFCIPLAPESQLIFAFEWADAEEGESGQLTWTRLPQGFKNSPTLFNEALNRDLQGFRLDHPSVSLLQYVDDLLIAADTQAACLSATRDLLMTLAELGYRVSGKKAQLCQEEVTYLGFKIHKGSRSLSNSRTQAILQIPVPKTKRQVREFLGKIGYCRLFIPGFAELAQPLYAATRPGNDPLVWGEKEEEAFQSLKLALTQPPALALPSLDKPFQLFVEETSGAAKGVLTQALGPWKRPVAYLSKRLDPVAAGWPRCLRAIAAAALLTREASKLTFGQDIEITSSHNLESLLRSPPDKWLTNARITQYQVLLLDPPRVRFKQTAALNPATLLPETDDTLPIHHCLDTLDSLTSTRPDLTDQPLAQAEATLFTDGSSYIRDGKRYAGAAVVTLDSVIWAEPLPIGTSAQKAELIALTKALEWSKDKSVNIYTDSRYAFATLHVHGMIYRERGWLTAGGKAIKNAPEILALLTAVWLPKRVAVMHCKGHQKDDAPTSTGNRRADEVAREVAIRPLSTQATISAGKRTADGSEFEKRTADGSEFESPKKKAKVE

SEQ ID NO: 1408 - protein, 2099 aa, synthetic construct
MPAAKRVKLDGGDKKYSIGLDIGTNSVGWAVITDEYKVPSKKFKVLGNTDRHSIKKNLIGALLFDSGETAEATRLKRTARRRYTRRKNRICYLQEIFSNEMAKVDDSFFHRLEESFLVEEDKKHERHPIFGNIVDEVAYHEKYPTIYHLRKKLVDSTDKADLRLIYLALAHMIKFRGHFLIEGDLNPDNSDVDKLFIQLVQTYNQLFEENPINASGVDAKAILSARLSKSRRLENLIAQLPGEKKNGLFGNLIALSLGLTPNFKSNFDLAEDAKLQLSKDTYDDDLDNLLAQIGDQYADLFLAAKNLSDAILLSDILRVNTEITKAPLSASMIKRYDEHHQDLTLLKALVRQQLPEKYKEIFFDQSKNGYAGYIDGGASQEEFYKFIKPILEKMDGTEELLVKLNREDLLRKQRTFDNGSIPHQIHLGELHAILRRQEDFYPFLKDNREKIEKILTFRIPYYVGPLARGNSRFAWMTRKSEETITPWNFEEVVDKGASAQSFIERMTNFDKNLPNEKVLPKHSLLYEYFTVYNELTKVKYVTEGMRKPAFLSGEQKKAIVDLLFKTNRKVTVKQLKEDYFKKIECFDSVEISGVEDRFNASLGTYHDLLKIIKDKDFLDNEENEDILEDIVLTLTLFEDREMIEERLKTYAHLFDDKVMKQLKRRRYTGWGRLSRKLINGIRDKQSGKTILDFLKSDGFANRNFMQLIHDDSLTFKEDIQKAQVSGQGDSLHEHIANLAGSPAIKKGILQTVKVVDELVKVMGRHKPENIVIEMARENQTTQKGQKNSRERMKRIEEGIKELGSQILKEHPVENTQLQNEKLYLYYLQNGRDMYVDQELDINRLSDYDVDHIVPQSFLKDDSIDNKVLTRSDKARGKSDNVPSEEVVKKMKNYWRQLLNAKLITQRKFDNLTKAERGGLSELDKAGFIKRQLVETRQITKHVAQILDSRMNTKYDENDKLIREVKVITLKSKLVSDFRKDFQFYKVREINNYHHAHDAYLNAVVGTALIKKYPKLESEFVYGDYKVYDVRKMIAKSEQEIGKATAKYFFYSNIMNFFKTEITLANGEIRKRPLIETNGETGEIVWDKGRDFATVRKVLSMPQVNIVKKTEVQTGGFSKESILPKRNSDKLIARKKDWDPKKYGGFDSPTVAYSVLVVAKVEKGKSKKLKSVKELLGITIMERSSFEKNPIDFLEAKGYKEVKKDLIIKLPKYSLFELENGRKRMLASAGELQKGNELALPSKYVNFLYLASHYEKLKGSPEDNEQKQLFVEQHKHYLDEIIEQISEFSKRVILADANLDKVLSAYNKHRDKPIREQAENIIHLFTLTNLGAPAAFKYFDTTIDRKRYTSTKEVLDATLIHQSITGLYETRIDLSQLGGDGGGSAGSAAGSGEFGGTAPLEEEYRLFLEAPIQNVTLLEQWKREIPKVWAEINPPGLASTQAPIHVQLLSTALPVRVRQYPITLEAKRSLRETIRKFRAAGILRPVHSPWNTPLLPVRKSGTSEYRMVQDLREVNKRVETIHPTVPNPYTLLSLLPPDRIWYSVLDLKDAFFCIPLAPESQLIFAFEWADAEEGESGQLTWTRLPQGFKNSPTLFNEALNRDLQGFRLDHPSVSLLQYVDDLLIAADTQAACLSATRDLLMTLAELGYRVSGKKAQLCQEEVTYLGFKIHKGSRSLSNSRTQAILQIPVPKTKRQVREFLGKIGYCRLFIPGFAELAQPLYAATRPGNDPLVWGEKEEEAFQSLKLALTQPPALALPSLDKPFQLFVEETSGAAKGVLTQALGPWKRPVAYLSKRLDPVAAGWPRCLRAIAAAALLTREASKLTFGQDIEITSSHNLESLLRSPPDKWLTNARITQYQVLLLDPPRVRFKQTAALNPATLLPETDDTLPIHHCLDTLDSLTSTRPDLTDQPLAQAEATLFTDGSSYIRDGKRYAGAAVVTLDSVIWAEPLPIGTSAQKAELIALTKALEWSKDKSVNIYTDSRYAFATLHVHGMIYRERGWLTAGGKAIKNAPEILALLTAVWLPKRVAVMHCKGHQKDDAPTSTGNRRADEVAREVAIRPLSTQATISAGKRTADGSEFEKRTADGSEFESPKKKAKVE

SEQ ID NO: 1409 - protein, 2096 aa, synthetic construct
MPAAKRVKLDGGDKKYSIGLDIGTNSVGWAVITDEYKVPSKKFKVLGNTDRHSIKKNLIGALLFDSGETAEATRLKRTARRRYTRRKNRICYLQEIFSNEMAKVDDSFFHRLEESFLVEEDKKHERHPIFGNIVDEVAYHEKYPTIYHLRKKLVDSTDKADLRLIYLALAHMIKFRGHFLIEGDLNPDNSDVDKLFIQLVQTYNQLFEENPINASGVDAKAILSARLSKSRRLENLIAQLPGEKKNGLFGNLIALSLGLTPNFKSNFDLAEDAKLQLSKDTYDDDLDNLLAQIGDQYADLFLAAKNLSDAILLSDILRVNTEITKAPLSASMIKRYDEHHQDLTLLKALVRQQLPEKYKEIFFDQSKNGYAGYIDGGASQEEFYKFIKPILEKMDGTEELLVKLNREDLLRKQRTFDNGSIPHQIHLGELHAILRRQEDFYPFLKDNREKIEKILTFRIPYYVGPLARGNSRFAWMTRKSEETITPWNFEEVVDKGASAQSFIERMTNFDKNLPNEKVLPKHSLLYEYFTVYNELTKVKYVTEGMRKPAFLSGEQKKAIVDLLFKTNRKVTVKQLKEDYFKKIECFDSVEISGVEDRFNASLGTYHDLLKIIKDKDFLDNEENEDILEDIVLTLTLFEDREMIEERLKTYAHLFDDKVMKQLKRRRYTGWGRLSRKLINGIRDKQSGKTILDFLKSDGFANRNFMQLIHDDSLTFKEDIQKAQVSGQGDSLHEHIANLAGSPAIKKGILQTVKVVDELVKVMGRHKPENIVIEMARENQTTQKGQKNSRERMKRIEEGIKELGSQILKEHPVENTQLQNEKLYLYYLQNGRDMYVDQELDINRLSDYDVDHIVPQSFLKDDSIDNKVLTRSDKARGKSDNVPSEEVVKKMKNYWRQLLNAKLITQRKFDNLTKAERGGLSELDKAGFIKRQLVETRQITKHVAQILDSRMNTKYDENDKLIREVKVITLKSKLVSDFRKDFQFYKVREINNYHHAHDAYLNAVVGTALIKKYPKLESEFVYGDYKVYDVRKMIAKSEQEIGKATAKYFFYSNIMNFFKTEITLANGEIRKRPLIETNGETGEIVWDKGRDFATVRKVLSMPQVNIVKKTEVQTGGFSKESILPKRNSDKLIARKKDWDPKKYGGFDSPTVAYSVLVVAKVEKGKSKKLKSVKELLGITIMERSSFEKNPIDFLEAKGYKEVKKDLIIKLPKYSLFELENGRKRMLASAGELQKGNELALPSKYVNFLYLASHYEKLKGSPEDNEQKQLFVEQHKHYLDEIIEQISEFSKRVILADANLDKVLSAYNKHRDKPIREQAENIIHLFTLTNLGAPAAFKYFDTTIDRKRYTSTKEVLDATLIHQSITGLYETRIDLSQLGGDGGGGSPAPGSSGGTAPLEEEYRLFLEAPIQNVTLLEQWKREIPKVWAEINPPGLASTQAPIHVQLLSTALPVRVRQYPITLEAKRSLRETIRKFRAAGILRPVHSPWNTPLLPVRKSGTSEYRMVQDLREVNKRVETIHPTVPNPYTLLSLLPPDRIWYSVLDLKDAFFCIPLAPESQLIFAFEWADAEEGESGQLTWTRLPQGFKNSPTLFNEALNRDLQGFRLDHPSVSLLQYVDDLLIAADTQAACLSATRDLLMTLAELGYRVSGKKAQLCQEEVTYLGFKIHKGSRSLSNSRTQAILQIPVPKTKRQVREFLGKIGYCRLFIPGFAELAQPLYAATRPGNDPLVWGEKEEEAFQSLKLALTQPPALALPSLDKPFQLFVEETSGAAKGVLTQALGPWKRPVAYLSKRLDPVAAGWPRCLRAIAAAALLTREASKLTFGQDIEITSSHNLESLLRSPPDKWLTNARITQYQVLLLDPPRVRFKQTAALNPATLLPETDDTLPIHHCLDTLDSLTSTRPDLTDQPLAQAEATLFTDGSSYIRDGKRYAGAAVVTLDSVIWAEPLPIGTSAQKAELIALTKALEWSKDKSVNIYTDSRYAFATLHVHGMIYRERGWLTAGGKAIKNAPEILALLTAVWLPKRVAVMHCKGHQKDDAPTSTGNRRADEVAREVAIRPLSTQATISAGKRTADGSEFEKRTADGSEFESPKKKAKVE

SEQ ID NO: 1410 - protein, 2093 aa, synthetic construct
MPAAKRVKLDGGDKKYSIGLDIGTNSVGWAVITDEYKVPSKKFKVLGNTDRHSIKKNLIGALLFDSGETAEATRLKRTARRRYTRRKNRICYLQEIFSNEMAKVDDSFFHRLEESFLVEEDKKHERHPIFGNIVDEVAYHEKYPTIYHLRKKLVDSTDKADLRLIYLALAHMIKFRGHFLIEGDLNPDNSDVDKLFIQLVQTYNQLFEENPINASGVDAKAILSARLSKSRRLENLIAQLPGEKKNGLFGNLIALSLGLTPNFKSNFDLAEDAKLQLSKDTYDDDLDNLLAQIGDQYADLFLAAKNLSDAILLSDILRVNTEITKAPLSASMIKRYDEHHQDLTLLKALVRQQLPEKYKEIFFDQSKNGYAGYIDGGASQEEFYKFIKPILEKMDGTEELLVKLNREDLLRKQRTFDNGSIPHQIHLGELHAILRRQEDFYPFLKDNREKIEKILTFRIPYYVGPLARGNSRFAWMTRKSEETITPWNFEEVVDKGASAQSFIERMTNFDKNLPNEKVLPKHSLLYEYFTVYNELTKVKYVTEGMRKPAFLSGEQKKAIVDLLFKTNRKVTVKQLKEDYFKKIECFDSVEISGVEDRFNASLGTYHDLLKIIKDKDFLDNEENEDILEDIVLTLTLFEDREMIEERLKTYAHLFDDKVMKQLKRRRYTGWGRLSRKLINGIRDKQSGKTILDFLKSDGFANRNFMQLIHDDSLTFKEDIQKAQVSGQGDSLHEHIANLAGSPAIKKGILQTVKVVDELVKVMGRHKPENIVIEMARENQTTQKGQKNSRERMKRIEEGIKELGSQILKEHPVENTQLQNEKLYLYYLQNGRDMYVDQELDINRLSDYDVDHIVPQSFLKDDSIDNKVLTRSDKARGKSDNVPSEEVVKKMKNYWRQLLNAKLITQRKFDNLTKAERGGLSELDKAGFIKRQLVETRQITKHVAQILDSRMNTKYDENDKLIREVKVITLKSKLVSDFRKDFQFYKVREINNYHHAHDAYLNAVVGTALIKKYPKLESEFVYGDYKVYDVRKMIAKSEQEIGKATAKYFFYSNIMNFFKTEITLANGEIRKRPLIETNGETGEIVWDKGRDFATVRKVLSMPQVNIVKKTEVQTGGFSKESILPKRNSDKLIARKKDWDPKKYGGFDSPTVAYSVLVVAKVEKGKSKKLKSVKELLGITIMERSSFEKNPIDFLEAKGYKEVKKDLIIKLPKYSLFELENGRKRMLASAGELQKGNELALPSKYVNFLYLASHYEKLKGSPEDNEQKQLFVEQHKHYLDEIIEQISEFSKRVILADANLDKVLSAYNKHRDKPIREQAENIIHLFTLTNLGAPAAFKYFDTTIDRKRYTSTKEVLDATLIHQSITGLYETRIDLSQLGGDGGPAPGGGGGTAPLEEEYRLFLEAPIQNVTLLEQWKREIPKVWAEINPPGLASTQAPIHVQLLSTALPVRVRQYPITLEAKRSLRETIRKFRAAGILRPVHSPWNTPLLPVRKSGTSEYRMVQDLREVNKRVETIHPTVPNPYTLLSLLPPDRIWYSVLDLKDAFFCIPLAPESQLIFAFEWADAEEGESGQLTWTRLPQGFKNSPTLFNEALNRDLQGFRLDHPSVSLLQYVDDLLIAADTQAACLSATRDLLMTLAELGYRVSGKKAQLCQEEVTYLGFKIHKGSRSLSNSRTQAILQIPVPKTKRQVREFLGKIGYCRLFIPGFAELAQPLYAATRPGNDPLVWGEKEEEAFQSLKLALTQPPALALPSLDKPFQLFVEETSGAAKGVLTQALGPWKRPVAYLSKRLDPVAAGWPRCLRAIAAAALLTREASKLTFGQDIEITSSHNLESLLRSPPDKWLTNARITQYQVLLLDPPRVRFKQTAALNPATLLPETDDTLPIHHCLDTLDSLTSTRPDLTDQPLAQAEATLFTDGSSYIRDGKRYAGAAVVTLDSVIWAEPLPIGTSAQKAELIALTKALEWSKDKSVNIYTDSRYAFATLHVHGMIYRERGWLTAGGKAIKNAPEILALLTAVWLPKRVAVMHCKGHQKDDAPTSTGNRRADEVAREVAIRPLSTQATISAGKRTADGSEFEKRTADGSEFESPKKKAKVE

SEQ ID NO: 1411 - protein, 2096 aa, synthetic construct
MPAAKRVKLDGGDKKYSIGLDIGTNSVGWAVITDEYKVPSKKFKVLGNTDRHSIKKNLIGALLFDSGETAEATRLKRTARRRYTRRKNRICYLQEIFSNEMAKVDDSFFHRLEESFLVEEDKKHERHPIFGNIVDEVAYHEKYPTIYHLRKKLVDSTDKADLRLIYLALAHMIKFRGHFLIEGDLNPDNSDVDKLFIQLVQTYNQLFEENPINASGVDAKAILSARLSKSRRLENLIAQLPGEKKNGLFGNLIALSLGLTPNFKSNFDLAEDAKLQLSKDTYDDDLDNLLAQIGDQYADLFLAAKNLSDAILLSDILRVNTEITKAPLSASMIKRYDEHHQDLTLLKALVRQQLPEKYKEIFFDQSKNGYAGYIDGGASQEEFYKFIKPILEKMDGTEELLVKLNREDLLRKQRTFDNGSIPHQIHLGELHAILRRQEDFYPFLKDNREKIEKILTFRIPYYVGPLARGNSRFAWMTRKSEETITPWNFEEVVDKGASAQSFIERMTNFDKNLPNEKVLPKHSLLYEYFTVYNELTKVKYVTEGMRKPAFLSGEQKKAIVDLLFKTNRKVTVKQLKEDYFKKIECFDSVEISGVEDRFNASLGTYHDLLKIIKDKDFLDNEENEDILEDIVLTLTLFEDREMIEERLKTYAHLFDDKVMKQLKRRRYTGWGRLSRKLINGIRDKQSGKTILDFLKSDGFANRNFMQLIHDDSLTFKEDIQKAQVSGQGDSLHEHIANLAGSPAIKKGILQTVKVVDELVKVMGRHKPENIVIEMARENQTTQKGQKNSRERMKRIEEGIKELGSQILKEHPVENTQLQNEKLYLYYLQNGRDMYVDQELDINRLSDYDVDHIVPQSFLKDDSIDNKVLTRSDKARGKSDNVPSEEVVKKMKNYWRQLLNAKLITQRKFDNLTKAERGGLSELDKAGFIKRQLVETRQITKHVAQILDSRMNTKYDENDKLIREVKVITLKSKLVSDFRKDFQFYKVREINNYHHAHDAYLNAVVGTALIKKYPKLESEFVYGDYKVYDVRKMIAKSEQEIGKATAKYFFYSNIMNFFKTEITLANGEIRKRPLIETNGETGEIVWDKGRDFATVRKVLSMPQVNIVKKTEVQTGGFSKESILPKRNSDKLIARKKDWDPKKYGGFDSPTVAYSVLVVAKVEKGKSKKLKSVKELLGITIMERSSFEKNPIDFLEAKGYKEVKKDLIIKLPKYSLFELENGRKRMLASAGELQKGNELALPSKYVNFLYLASHYEKLKGSPEDNEQKQLFVEQHKHYLDEIIEQISEFSKRVILADANLDKVLSAYNKHRDKPIREQAENIIHLFTLTNLGAPAAFKYFDTTIDRKRYTSTKEVLDATLIHQSITGLYETRIDLSQLGGDGGGGGPAPGSSGGTAPLEEEYRLFLEAPIQNVTLLEQWKREIPKVWAEINPPGLASTQAPIHVQLLSTALPVRVRQYPITLEAKRSLRETIRKFRAAGILRPVHSPWNTPLLPVRKSGTSEYRMVQDLREVNKRVETIHPTVPNPYTLLSLLPPDRIWYSVLDLKDAFFCIPLAPESQLIFAFEWADAEEGESGQLTWTRLPQGFKNSPTLFNEALNRDLQGFRLDHPSVSLLQYVDDLLIAADTQAACLSATRDLLMTLAELGYRVSGKKAQLCQEEVTYLGFKIHKGSRSLSNSRTQAILQIPVPKTKRQVREFLGKIGYCRLFIPGFAELAQPLYAATRPGNDPLVWGEKEEEAFQSLKLALTQPPALALPSLDKPFQLFVEETSGAAKGVLTQALGPWKRPVAYLSKRLDPVAAGWPRCLRAIAAAALLTREASKLTFGQDIEITSSHNLESLLRSPPDKWLTNARITQYQVLLLDPPRVRFKQTAALNPATLLPETDDTLPIHHCLDTLDSLTSTRPDLTDQPLAQAEATLFTDGSSYIRDGKRYAGAAVVTLDSVIWAEPLPIGTSAQKAELIALTKALEWSKDKSVNIYTDSRYAFATLHVHGMIYRERGWLTAGGKAIKNAPEILALLTAVWLPKRVAVMHCKGHQKDDAPTSTGNRRADEVAREVAIRPLSTQATISAGKRTADGSEFEKRTADGSEFESPKKKAKVE

SEQ ID NO: 1412 - protein, 2093 aa, synthetic construct
MPAAKRVKLDGGDKKYSIGLDIGTNSVGWAVITDEYKVPSKKFKVLGNTDRHSIKKNLIGALLFDSGETAEATRLKRTARRRYTRRKNRICYLQEIFSNEMAKVDDSFFHRLEESFLVEEDKKHERHPIFGNIVDEVAYHEKYPTIYHLRKKLVDSTDKADLRLIYLALAHMIKFRGHFLIEGDLNPDNSDVDKLFIQLVQTYNQLFEENPINASGVDAKAILSARLSKSRRLENLIAQLPGEKKNGLFGNLIALSLGLTPNFKSNFDLAEDAKLQLSKDTYDDDLDNLLAQIGDQYADLFLAAKNLSDAILLSDILRVNTEITKAPLSASMIKRYDEHHQDLTLLKALVRQQLPEKYKEIFFDQSKNGYAGYIDGGASQEEFYKFIKPILEKMDGTEELLVKLNREDLLRKQRTFDNGSIPHQIHLGELHAILRRQEDFYPFLKDNREKIEKILTFRIPYYVGPLARGNSRFAWMTRKSEETITPWNFEEVVDKGASAQSFIERMTNFDKNLPNEKVLPKHSLLYEYFTVYNELTKVKYVTEGMRKPAFLSGEQKKAIVDLLFKTNRKVTVKQLKEDYFKKIECFDSVEISGVEDRFNASLGTYHDLLKIIKDKDFLDNEENEDILEDIVLTLTLFEDREMIEERLKTYAHLFDDKVMKQLKRRRYTGWGRLSRKLINGIRDKQSGKTILDFLKSDGFANRNFMQLIHDDSLTFKEDIQKAQVSGQGDSLHEHIANLAGSPAIKKGILQTVKVVDELVKVMGRHKPENIVIEMARENQTTQKGQKNSRERMKRIEEGIKELGSQILKEHPVENTQLQNEKLYLYYLQNGRDMYVDQELDINRLSDYDVDHIVPQSFLKDDSIDNKVLTRSDKARGKSDNVPSEEVVKKMKNYWRQLLNAKLITQRKFDNLTKAERGGLSELDKAGFIKRQLVETRQITKHVAQILDSRMNTKYDENDKLIREVKVITLKSKLVSDFRKDFQFYKVREINNYHHAHDAYLNAVVGTALIKKYPKLESEFVYGDYKVYDVRKMIAKSEQEIGKATAKYFFYSNIMNFFKTEITLANGEIRKRPLIETNGETGEIVWDKGRDFATVRKVLSMPQVNIVKKTEVQTGGFSKESILPKRNSDKLIARKKDWDPKKYGGFDSPTVAYSVLVVAKVEKGKSKKLKSVKELLGITIMERSSFEKNPIDFLEAKGYKEVKKDLIIKLPKYSLFELENGRKRMLASAGELQKGNELALPSKYVNFLYLASHYEKLKGSPEDNEQKQLFVEQHKHYLDEIIEQISEFSKRVILADANLDKVLSAYNKHRDKPIREQAENIIHLFTLTNLGAPAAFKYFDTTIDRKRYTSTKEVLDATLIHQSITGLYETRIDLSQLGGDGGGGSGSSGGTAPLEEEYRLFLEAPIQNVTLLEQWKREIPKVWAEINPPGLASTQAPIHVQLLSTALPVRVRQYPITLEAKRSLRETIRKFRAAGILRPVHSPWNTPLLPVRKSGTSEYRMVQDLREVNKRVETIHPTVPNPYTLLSLLPPDRIWYSVLDLKDAFFCIPLAPESQLIFAFEWADAEEGESGQLTWTRLPQGFKNSPTLFNEALNRDLQGFRLDHPSVSLLQYVDDLLIAADTQAACLSATRDLLMTLAELGYRVSGKKAQLCQEEVTYLGFKIHKGSRSLSNSRTQAILQIPVPKTKRQVREFLGKIGYCRLFIPGFAELAQPLYAATRPGNDPLVWGEKEEEAFQSLKLALTQPPALALPSLDKPFQLFVEETSGAAKGVLTQALGPWKRPVAYLSKRLDPVAAGWPRCLRAIAAAALLTREASKLTFGQDIEITSSHNLESLLRSPPDKWLTNARITQYQVLLLDPPRVRFKQTAALNPATLLPETDDTLPIHHCLDTLDSLTSTRPDLTDQPLAQAEATLFTDGSSYIRDGKRYAGAAVVTLDSVIWAEPLPIGTSAQKAELIALTKALEWSKDKSVNIYTDSRYAFATLHVHGMIYRERGWLTAGGKAIKNAPEILALLTAVWLPKRVAVMHCKGHQKDDAPTSTGNRRADEVAREVAIRPLSTQATISAGKRTADGSEFEKRTADGSEFESPKKKAKVE

SEQ ID NO: 1413 - protein, 2096 aa, synthetic construct
MPAAKRVKLDGGDKKYSIGLDIGTNSVGWAVITDEYKVPSKKFKVLGNTDRHSIKKNLIGALLFDSGETAEATRLKRTARRRYTRRKNRICYLQEIFSNEMAKVDDSFFHRLEESFLVEEDKKHERHPIFGNIVDEVAYHEKYPTIYHLRKKLVDSTDKADLRLIYLALAHMIKFRGHFLIEGDLNPDNSDVDKLFIQLVQTYNQLFEENPINASGVDAKAILSARLSKSRRLENLIAQLPGEKKNGLFGNLIALSLGLTPNFKSNFDLAEDAKLQLSKDTYDDDLDNLLAQIGDQYADLFLAAKNLSDAILLSDILRVNTEITKAPLSASMIKRYDEHHQDLTLLKALVRQQLPEKYKEIFFDQSKNGYAGYIDGGASQEEFYKFIKPILEKMDGTEELLVKLNREDLLRKQRTFDNGSIPHQIHLGELHAILRRQEDFYPFLKDNREKIEKILTFRIPYYVGPLARGNSRFAWMTRKSEETITPWNFEEVVDKGASAQSFIERMTNFDKNLPNEKVLPKHSLLYEYFTVYNELTKVKYVTEGMRKPAFLSGEQKKAIVDLLFKTNRKVTVKQLKEDYFKKIECFDSVEISGVEDRFNASLGTYHDLLKIIKDKDFLDNEENEDILEDIVLTLTLFEDREMIEERLKTYAHLFDDKVMKQLKRRRYTGWGRLSRKLINGIRDKQSGKTILDFLKSDGFANRNFMQLIHDDSLTFKEDIQKAQVSGQGDSLHEHIANLAGSPAIKKGILQTVKVVDELVKVMGRHKPENIVIEMARENQTTQKGQKNSRERMKRIEEGIKELGSQILKEHPVENTQLQNEKLYLYYLQNGRDMYVDQELDINRLSDYDVDHIVPQSFLKDDSIDNKVLTRSDKARGKSDNVPSEEVVKKMKNYWRQLLNAKLITQRKFDNLTKAERGGLSELDKAGFIKRQLVETRQITKHVAQILDSRMNTKYDENDKLIREVKVITLKSKLVSDFRKDFQFYKVREINNYHHAHDAYLNAVVGTALIKKYPKLESEFVYGDYKVYDVRKMIAKSEQEIGKATAKYFFYSNIMNFFKTEITLANGEIRKRPLIETNGETGEIVWDKGRDFATVRKVLSMPQVNIVKKTEVQTGGFSKESILPKRNSDKLIARKKDWDPKKYGGFDSPTVAYSVLVVAKVEKGKSKKLKSVKELLGITIMERSSFEKNPIDFLEAKGYKEVKKDLIIKLPKYSLFELENGRKRMLASAGELQKGNELALPSKYVNFLYLASHYEKLKGSPEDNEQKQLFVEQHKHYLDEIIEQISEFSKRVILADANLDKVLSAYNKHRDKPIREQAENIIHLFTLTNLGAPAAFKYFDTTIDRKRYTSTKEVLDATLIHQSITGLYETRIDLSQLGGDGGGSSGGGGGSGGTAPLEEEYRLFLEAPIQNVTLLEQWKREIPKVWAEINPPGLASTQAPIHVQLLSTALPVRVRQYPITLEAKRSLRETIRKFRAAGILRPVHSPWNTPLLPVRKSGTSEYRMVQDLREVNKRVETIHPTVPNPYTLLSLLPPDRIWYSVLDLKDAFFCIPLAPESQLIFAFEWADAEEGESGQLTWTRLPQGFKNSPTLFNEALNRDLQGFRLDHPSVSLLQYVDDLLIAADTQAACLSATRDLLMTLAELGYRVSGKKAQLCQEEVTYLGFKIHKGSRSLSNSRTQAILQIPVPKTKRQVREFLGKIGYCRLFIPGFAELAQPLYAATRPGNDPLVWGEKEEEAFQSLKLALTQPPALALPSLDKPFQLFVEETSGAAKGVLTQALGPWKRPVAYLSKRLDPVAAGWPRCLRAIAAAALLTREASKLTFGQDIEITSSHNLESLLRSPPDKWLTNARITQYQVLLLDPPRVRFKQTAALNPATLLPETDDTLPIHHCLDTLDSLTSTRPDLTDQPLAQAEATLFTDGSSYIRDGKRYAGAAVVTLDSVIWAEPLPIGTSAQKAELIALTKALEWSKDKSVNIYTDSRYAFATLHVHGMIYRERGWLTAGGKAIKNAPEILALLTAVWLPKRVAVMHCKGHQKDDAPTSTGNRRADEVAREVAIRPLSTQATISAGKRTADGSEFEKRTADGSEFESPKKKAKVE

SEQ ID NO: 1414 - protein, 2090 aa, synthetic construct
MPAAKRVKLDGGDKKYSIGLDIGTNSVGWAVITDEYKVPSKKFKVLGNTDRHSIKKNLIGALLFDSGETAEATRLKRTARRRYTRRKNRICYLQEIFSNEMAKVDDSFFHRLEESFLVEEDKKHERHPIFGNIVDEVAYHEKYPTIYHLRKKLVDSTDKADLRLIYLALAHMIKFRGHFLIEGDLNPDNSDVDKLFIQLVQTYNQLFEENPINASGVDAKAILSARLSKSRRLENLIAQLPGEKKNGLFGNLIALSLGLTPNFKSNFDLAEDAKLQLSKDTYDDDLDNLLAQIGDQYADLFLAAKNLSDAILLSDILRVNTEITKAPLSASMIKRYDEHHQDLTLLKALVRQQLPEKYKEIFFDQSKNGYAGYIDGGASQEEFYKFIKPILEKMDGTEELLVKLNREDLLRKQRTFDNGSIPHQIHLGELHAILRRQEDFYPFLKDNREKIEKILTFRIPYYVGPLARGNSRFAWMTRKSEETITPWNFEEVVDKGASAQSFIERMTNFDKNLPNEKVLPKHSLLYEYFTVYNELTKVKYVTEGMRKPAFLSGEQKKAIVDLLFKTNRKVTVKQLKEDYFKKIECFDSVEISGVEDRFNASLGTYHDLLKIIKDKDFLDNEENEDILEDIVLTLTLFEDREMIEERLKTYAHLFDDKVMKQLKRRRYTGWGRLSRKLINGIRDKQSGKTILDFLKSDGFANRNFMQLIHDDSLTFKEDIQKAQVSGQGDSLHEHIANLAGSPAIKKGILQTVKVVDELVKVMGRHKPENIVIEMARENQTTQKGQKNSRERMKRIEEGIKELGSQILKEHPVENTQLQNEKLYLYYLQNGRDMYVDQELDINRLSDYDVDHIVPQSFLKDDSIDNKVLTRSDKARGKSDNVPSEEVVKKMKNYWRQLLNAKLITQRKFDNLTKAERGGLSELDKAGFIKRQLVETRQITKHVAQILDSRMNTKYDENDKLIREVKVITLKSKLVSDFRKDFQFYKVREINNYHHAHDAYLNAVVGTALIKKYPKLESEFVYGDYKVYDVRKMIAKSEQEIGKATAKYFFYSNIMNFFKTEITLANGEIRKRPLIETNGETGEIVWDKGRDFATVRKVLSMPQVNIVKKTEVQTGGFSKESILPKRNSDKLIARKKDWDPKKYGGFDSPTVAYSVLVVAKVEKGKSKKLKSVKELLGITIMERSSFEKNPIDFLEAKGYKEVKKDLIIKLPKYSLFELENGRKRMLASAGELQKGNELALPSKYVNFLYLASHYEKLKGSPEDNEQKQLFVEQHKHYLDEIIEQISEFSKRVILADANLDKVLSAYNKHRDKPIREQAENIIHLFTLTNLGAPAAFKYFDTTIDRKRYTSTKEVLDATLIHQSITGLYETRIDLSQLGGDGGPAPGGTAPLEEEYRLFLEAPIQNVTLLEQWKREIPKVWAEINPPGLASTQAPIHVQLLSTALPVRVRQYPITLEAKRSLRETIRKFRAAGILRPVHSPWNTPLLPVRKSGTSEYRMVQDLREVNKRVETIHPTVPNPYTLLSLLPPDRIWYSVLDLKDAFFCIPLAPESQLIFAFEWADAEEGESGQLTWTRLPQGFKNSPTLFNEALNRDLQGFRLDHPSVSLLQYVDDLLIAADTQAACLSATRDLLMTLAELGYRVSGKKAQLCQEEVTYLGFKIHKGSRSLSNSRTQAILQIPVPKTKRQVREFLGKIGYCRLFIPGFAELAQPLYAATRPGNDPLVWGEKEEEAFQSLKLALTQPPALALPSLDKPFQLFVEETSGAAKGVLTQALGPWKRPVAYLSKRLDPVAAGWPRCLRAIAAAALLTREASKLTFGQDIEITSSHNLESLLRSPPDKWLTNARITQYQVLLLDPPRVRFKQTAALNPATLLPETDDTLPIHHCLDTLDSLTSTRPDLTDQPLAQAEATLFTDGSSYIRDGKRYAGAAVVTLDSVIWAEPLPIGTSAQKAELIALTKALEWSKDKSVNIYTDSRYAFATLHVHGMIYRERGWLTAGGKAIKNAPEILALLTAVWLPKRVAVMHCKGHQKDDAPTSTGNRRADEVAREVAIRPLSTQATISAGKRTADGSEFEKRTADGSEFESPKKKAKVE

SEQ ID NO: 1415 - protein, 2098 aa, synthetic construct
MPAAKRVKLDGGDKKYSIGLDIGTNSVGWAVITDEYKVPSKKFKVLGNTDRHSIKKNLIGALLFDSGETAEATRLKRTARRRYTRRKNRICYLQEIFSNEMAKVDDSFFHRLEESFLVEEDKKHERHPIFGNIVDEVAYHEKYPTIYHLRKKLVDSTDKADLRLIYLALAHMIKFRGHFLIEGDLNPDNSDVDKLFIQLVQTYNQLFEENPINASGVDAKAILSARLSKSRRLENLIAQLPGEKKNGLFGNLIALSLGLTPNFKSNFDLAEDAKLQLSKDTYDDDLDNLLAQIGDQYADLFLAAKNLSDAILLSDILRVNTEITKAPLSASMIKRYDEHHQDLTLLKALVRQQLPEKYKEIFFDQSKNGYAGYIDGGASQEEFYKFIKPILEKMDGTEELLVKLNREDLLRKQRTFDNGSIPHQIHLGELHAILRRQEDFYPFLKDNREKIEKILTFRIPYYVGPLARGNSRFAWMTRKSEETITPWNFEEVVDKGASAQSFIERMTNFDKNLPNEKVLPKHSLLYEYFTVYNELTKVKYVTEGMRKPAFLSGEQKKAIVDLLFKTNRKVTVKQLKEDYFKKIECFDSVEISGVEDRFNASLGTYHDLLKIIKDKDFLDNEENEDILEDIVLTLTLFEDREMIEERLKTYAHLFDDKVMKQLKRRRYTGWGRLSRKLINGIRDKQSGKTILDFLKSDGFANRNFMQLIHDDSLTFKEDIQKAQVSGQGDSLHEHIANLAGSPAIKKGILQTVKVVDELVKVMGRHKPENIVIEMARENQTTQKGQKNSRERMKRIEEGIKELGSQILKEHPVENTQLQNEKLYLYYLQNGRDMYVDQELDINRLSDYDVDHIVPQSFLKDDSIDNKVLTRSDKARGKSDNVPSEEVVKKMKNYWRQLLNAKLITQRKFDNLTKAERGGLSELDKAGFIKRQLVETRQITKHVAQILDSRMNTKYDENDKLIREVKVITLKSKLVSDFRKDFQFYKVREINNYHHAHDAYLNAVVGTALIKKYPKLESEFVYGDYKVYDVRKMIAKSEQEIGKATAKYFFYSNIMNFFKTEITLANGEIRKRPLIETNGETGEIVWDKGRDFATVRKVLSMPQVNIVKKTEVQTGGFSKESILPKRNSDKLIARKKDWDPKKYGGFDSPTVAYSVLVVAKVEKGKSKKLKSVKELLGITIMERSSFEKNPIDFLEAKGYKEVKKDLIIKLPKYSLFELENGRKRMLASAGELQKGNELALPSKYVNFLYLASHYEKLKGSPEDNEQKQLFVEQHKHYLDEIIEQISEFSKRVILADANLDKVLSAYNKHRDKPIREQAENIIHLFTLTNLGAPAAFKYFDTTIDRKRYTSTKEVLDATLIHQSITGLYETRIDLSQLGGDGGGGGPAPEAAAKGGTAPLEEEYRLFLEAPIQNVTLLEQWKREIPKVWAEINPPGLASTQAPIHVQLLSTALPVRVRQYPITLEAKRSLRETIRKFRAAGILRPVHSPWNTPLLPVRKSGTSEYRMVQDLREVNKRVETIHPTVPNPYTLLSLLPPDRIWYSVLDLKDAFFCIPLAPESQLIFAFEWADAEEGESGQLTWTRLPQGFKNSPTLFNEALNRDLQGFRLDHPSVSLLQYVDDLLIAADTQAACLSATRDLLMTLAELGYRVSGKKAQLCQEEVTYLGFKIHKGSRSLSNSRTQAILQIPVPKTKRQVREFLGKIGYCRLFIPGFAELAQPLYAATRPGNDPLVWGEKEEEAFQSLKLALTQPPALALPSLDKPFQLFVEETSGAAKGVLTQALGPWKRPVAYLSKRLDPVAAGWPRCLRAIAAAALLTREASKLTFGQDIEITSSHNLESLLRSPPDKWLTNARITQYQVLLLDPPRVRFKQTAALNPATLLPETDDTLPIHHCLDTLDSLTSTRPDLTDQPLAQAEATLFTDGSSYIRDGKRYAGAAVVTLDSVIWAEPLPIGTSAQKAELIALTKALEWSKDKSVNIYTDSRYAFATLHVHGMIYRERGWLTAGGKAIKNAPEILALLTAVWLPKRVAVMHCKGHQKDDAPTSTGNRRADEVAREVAIRPLSTQATISAGKRTADGSEFEKRTADGSEFESPKKKAKVE

SEQ ID NO: 1416 - protein, 2098 aa, synthetic construct
MPAAKRVKLDGGDKKYSIGLDIGTNSVGWAVITDEYKVPSKKFKVLGNTDRHSIKKNLIGALLFDSGETAEATRLKRTARRRYTRRKNRICYLQEIFSNEMAKVDDSFFHRLEESFLVEEDKKHERHPIFGNIVDEVAYHEKYPTIYHLRKKLVDSTDKADLRLIYLALAHMIKFRGHFLIEGDLNPDNSDVDKLFIQLVQTYNQLFEENPINASGVDAKAILSARLSKSRRLENLIAQLPGEKKNGLFGNLIALSLGLTPNFKSNFDLAEDAKLQLSKDTYDDDLDNLLAQIGDQYADLFLAAKNLSDAILLSDILRVNTEITKAPLSASMIKRYDEHHQDLTLLKALVRQQLPEKYKEIFFDQSKNGYAGYIDGGASQEEFYKFIKPILEKMDGTEELLVKLNREDLLRKQRTFDNGSIPHQIHLGELHAILRRQEDFYPFLKDNREKIEKILTFRIPYYVGPLARGNSRFAWMTRKSEETITPWNFEEVVDKGASAQSFIERMTNFDKNLPNEKVLPKHSLLYEYFTVYNELTKVKYVTEGMRKPAFLSGEQKKAIVDLLFKTNRKVTVKQLKEDYFKKIECFDSVEISGVEDRFNASLGTYHDLLKIIKDKDFLDNEENEDILEDIVLTLTLFEDREMIEERLKTYAHLFDDKVMKQLKRRRYTGWGRLSRKLINGIRDKQSGKTILDFLKSDGFANRNFMQLIHDDSLTFKEDIQKAQVSGQGDSLHEHIANLAGSPAIKKGILQTVKVVDELVKVMGRHKPENIVIEMARENQTTQKGQKNSRERMKRIEEGIKELGSQILKEHPVENTQLQNEKLYLYYLQNGRDMYVDQELDINRLSDYDVDHIVPQSFLKDDSIDNKVLTRSDKARGKSDNVPSEEVVKKMKNYWRQLLNAKLITQRKFDNLTKAERGGLSELDKAGFIKRQLVETRQITKHVAQILDSRMNTKYDENDKLIREVKVITLKSKLVSDFRKDFQFYKVREINNYHHAHDAYLNAVVGTALIKKYPKLESEFVYGDYKVYDVRKMIAKSEQEIGKATAKYFFYSNIMNFFKTEITLANGEIRKRPLIETNGETGEIVWDKGRDFATVRKVLSMPQVNIVKKTEVQTGGFSKESILPKRNSDKLIARKKDWDPKKYGGFDSPTVAYSVLVVAKVEKGKSKKLKSVKELLGITIMERSSFEKNPIDFLEAKGYKEVKKDLIIKLPKYSLFELENGRKRMLASAGELQKGNELALPSKYVNFLYLASHYEKLKGSPEDNEQKQLFVEQHKHYLDEIIEQISEFSKRVILADANLDKVLSAYNKHRDKPIREQAENIIHLFTLTNLGAPAAFKYFDTTIDRKRYTSTKEVLDATLIHQSITGLYETRIDLSQLGGDGGEAAAKGSSPAPGGTAPLEEEYRLFLEAPIQNVTLLEQWKREIPKVWAEINPPGLASTQAPIHVQLLSTALPVRVRQYPITLEAKRSLRETIRKFRAAGILRPVHSPWNTPLLPVRKSGTSEYRMVQDLREVNKRVETIHPTVPNPYTLLSLLPPDRIWYSVLDLKDAFFCIPLAPESQLIFAFEWADAEEGESGQLTWTRLPQGFKNSPTLFNEALNRDLQGFRLDHPSVSLLQYVDDLLIAADTQAACLSATRDLLMTLAELGYRVSGKKAQLCQEEVTYLGFKIHKGSRSLSNSRTQAILQIPVPKTKRQVREFLGKIGYCRLFIPGFAELAQPLYAATRPGNDPLVWGEKEEEAFQSLKLALTQPPALALPSLDKPFQLFVEETSGAAKGVLTQALGPWKRPVAYLSKRLDPVAAGWPRCLRAIAAAALLTREASKLTFGQDIEITSSHNLESLLRSPPDKWLTNARITQYQVLLLDPPRVRFKQTAALNPATLLPETDDTLPIHHCLDTLDSLTSTRPDLTDQPLAQAEATLFTDGSSYIRDGKRYAGAAVVTLDSVIWAEPLPIGTSAQKAELIALTKALEWSKDKSVNIYTDSRYAFATLHVHGMIYRERGWLTAGGKAIKNAPEILALLTAVWLPKRVAVMHCKGHQKDDAPTSTGNRRADEVAREVAIRPLSTQATISAGKRTADGSEFEKRTADGSEFESPKKKAKVE

SEQ ID NO: 1417 - protein, 2090 aa, synthetic construct
MPAAKRVKLDGGDKKYSIGLDIGTNSVGWAVITDEYKVPSKKFKVLGNTDRHSIKKNLIGALLFDSGETAEATRLKRTARRRYTRRKNRICYLQEIFSNEMAKVDDSFFHRLEESFLVEEDKKHERHPIFGNIVDEVAYHEKYPTIYHLRKKLVDSTDKADLRLIYLALAHMIKFRGHFLIEGDLNPDNSDVDKLFIQLVQTYNQLFEENPINASGVDAKAILSARLSKSRRLENLIAQLPGEKKNGLFGNLIALSLGLTPNFKSNFDLAEDAKLQLSKDTYDDDLDNLLAQIGDQYADLFLAAKNLSDAILLSDILRVNTEITKAPLSASMIKRYDEHHQDLTLLKALVRQQLPEKYKEIFFDQSKNGYAGYIDGGASQEEFYKFIKPILEKMDGTEELLVKLNREDLLRKQRTFDNGSIPHQIHLGELHAILRRQEDFYPFLKDNREKIEKILTFRIPYYVGPLARGNSRFAWMTRKSEETITPWNFEEVVDKGASAQSFIERMTNFDKNLPNEKVLPKHSLLYEYFTVYNELTKVKYVTEGMRKPAFLSGEQKKAIVDLLFKTNRKVTVKQLKEDYFKKIECFDSVEISGVEDRFNASLGTYHDLLKIIKDKDFLDNEENEDILEDIVLTLTLFEDREMIEERLKTYAHLFDDKVMKQLKRRRYTGWGRLSRKLINGIRDKQSGKTILDFLKSDGFANRNFMQLIHDDSLTFKEDIQKAQVSGQGDSLHEHIANLAGSPAIKKGILQTVKVVDELVKVMGRHKPENIVIEMARENQTTQKGQKNSRERMKRIEEGIKELGSQILKEHPVENTQLQNEKLYLYYLQNGRDMYVDQELDINRLSDYDVDHIVPQSFLKDDSIDNKVLTRSDKARGKSDNVPSEEVVKKMKNYWRQLLNAKLITQRKFDNLTKAERGGLSELDKAGFIKRQLVETRQITKHVAQILDSRMNTKYDENDKLIREVKVITLKSKLVSDFRKDFQFYKVREINNYHHAHDAYLNAVVGTALIKKYPKLESEFVYGDYKVYDVRKMIAKSEQEIGKATAKYFFYSNIMNFFKTEITLANGEIRKRPLIETNGETGEIVWDKGRDFATVRKVLSMPQVNIVKKTEVQTGGFSKESILPKRNSDKLIARKKDWDPKKYGGFDSPTVAYSVLVVAKVEKGKSKKLKSVKELLGITIMERSSFEKNPIDFLEAKGYKEVKKDLIIKLPKYSLFELENGRKRMLASAGELQKGNELALPSKYVNFLYLASHYEKLKGSPEDNEQKQLFVEQHKHYLDEIIEQISEFSKRVILADANLDKVLSAYNKHRDKPIREQAENIIHLFTLTNLGAPAAFKYFDTTIDRKRYTSTKEVLDATLIHQSITGLYETRIDLSQLGGDGGGSSGGTAPLEEEYRLFLEAPIQNVTLLEQWKREIPKVWAEINPPGLASTQAPIHVQLLSTALPVRVRQYPITLEAKRSLRETIRKFRAAGILRPVHSPWNTPLLPVRKSGTSEYRMVQDLREVNKRVETIHPTVPNPYTLLSLLPPDRIWYSVLDLKDAFFCIPLAPESQLIFAFEWADAEEGESGQLTWTRLPQGFKNSPTLFNEALNRDLQGFRLDHPSVSLLQYVDDLLIAADTQAACLSATRDLLMTLAELGYRVSGKKAQLCQEEVTYLGFKIHKGSRSLSNSRTQAILQIPVPKTKRQVREFLGKIGYCRLFIPGFAELAQPLYAATRPGNDPLVWGEKEEEAFQSLKLALTQPPALALPSLDKPFQLFVEETSGAAKGVLTQALGPWKRPVAYLSKRLDPVAAGWPRCLRAIAAAALLTREASKLTFGQDIEITSSHNLESLLRSPPDKWLTNARITQYQVLLLDPPRVRFKQTAALNPATLLPETDDTLPIHHCLDTLDSLTSTRPDLTDQPLAQAEATLFTDGSSYIRDGKRYAGAAVVTLDSVIWAEPLPIGTSAQKAELIALTKALEWSKDKSVNIYTDSRYAFATLHVHGMIYRERGWLTAGGKAIKNAPEILALLTAVWLPKRVAVMHCKGHQKDDAPTSTGNRRADEVAREVAIRPLSTQATISAGKRTADGSEFEKRTADGSEFESPKKKAKVE

SEQ ID NO: 1418 - protein, 2096 aa, synthetic construct
MPAAKRVKLDGGDKKYSIGLDIGTNSVGWAVITDEYKVPSKKFKVLGNTDRHSIKKNLIGALLFDSGETAEATRLKRTARRRYTRRKNRICYLQEIFSNEMAKVDDSFFHRLEESFLVEEDKKHERHPIFGNIVDEVAYHEKYPTIYHLRKKLVDSTDKADLRLIYLALAHMIKFRGHFLIEGDLNPDNSDVDKLFIQLVQTYNQLFEENPINASGVDAKAILSARLSKSRRLENLIAQLPGEKKNGLFGNLIALSLGLTPNFKSNFDLAEDAKLQLSKDTYDDDLDNLLAQIGDQYADLFLAAKNLSDAILLSDILRVNTEITKAPLSASMIKRYDEHHQDLTLLKALVRQQLPEKYKEIFFDQSKNGYAGYIDGGASQEEFYKFIKPILEKMDGTEELLVKLNREDLLRKQRTFDNGSIPHQIHLGELHAILRRQEDFYPFLKDNREKIEKILTFRIPYYVGPLARGNSRFAWMTRKSEETITPWNFEEVVDKGASAQSFIERMTNFDKNLPNEKVLPKHSLLYEYFTVYNELTKVKYVTEGMRKPAFLSGEQKKAIVDLLFKTNRKVTVKQLKEDYFKKIECFDSVEISGVEDRFNASLGTYHDLLKIIKDKDFLDNEENEDILEDIVLTLTLFEDREMIEERLKTYAHLFDDKVMKQLKRRRYTGWGRLSRKLINGIRDKQSGKTILDFLKSDGFANRNFMQLIHDDSLTFKEDIQKAQVSGQGDSLHEHIANLAGSPAIKKGILQTVKVVDELVKVMGRHKPENIVIEMARENQTTQKGQKNSRERMKRIEEGIKELGSQILKEHPVENTQLQNEKLYLYYLQNGRDMYVDQELDINRLSDYDVDHIVPQSFLKDDSIDNKVLTRSDKARGKSDNVPSEEVVKKMKNYWRQLLNAKLITQRKFDNLTKAERGGLSELDKAGFIKRQLVETRQITKHVAQILDSRMNTKYDENDKLIREVKVITLKSKLVSDFRKDFQFYKVREINNYHHAHDAYLNAVVGTALIKKYPKLESEFVYGDYKVYDVRKMIAKSEQEIGKATAKYFFYSNIMNFFKTEITLANGEIRKRPLIETNGETGEIVWDKGRDFATVRKVLSMPQVNIVKKTEVQTGGFSKESILPKRNSDKLIARKKDWDPKKYGGFDSPTVAYSVLVVAKVEKGKSKKLKSVKELLGITIMERSSFEKNPIDFLEAKGYKEVKKDLIIKLPKYSLFELENGRKRMLASAGELQKGNELALPSKYVNFLYLASHYEKLKGSPEDNEQKQLFVEQHKHYLDEIIEQISEFSKRVILADANLDKVLSAYNKHRDKPIREQAENIIHLFTLTNLGAPAAFKYFDTTIDRKRYTSTKEVLDATLIHQSITGLYETRIDLSQLGGDGGGGSGSSGGGGGTAPLEEEYRLFLEAPIQNVTLLEQWKREIPKVWAEINPPGLASTQAPIHVQLLSTALPVRVRQYPITLEAKRSLRETIRKFRAAGILRPVHSPWNTPLLPVRKSGTSEYRMVQDLREVNKRVETIHPTVPNPYTLLSLLPPDRIWYSVLDLKDAFFCIPLAPESQLIFAFEWADAEEGESGQLTWTRLPQGFKNSPTLFNEALNRDLQGFRLDHPSVSLLQYVDDLLIAADTQAACLSATRDLLMTLAELGYRVSGKKAQLCQEEVTYLGFKIHKGSRSLSNSRTQAILQIPVPKTKRQVREFLGKIGYCRLFIPGFAELAQPLYAATRPGNDPLVWGEKEEEAFQSLKLALTQPPALALPSLDKPFQLFVEETSGAAKGVLTQALGPWKRPVAYLSKRLDPVAAGWPRCLRAIAAAALLTREASKLTFGQDIEITSSHNLESLLRSPPDKWLTNARITQYQVLLLDPPRVRFKQTAALNPATLLPETDDTLPIHHCLDTLDSLTSTRPDLTDQPLAQAEATLFTDGSSYIRDGKRYAGAAVVTLDSVIWAEPLPIGTSAQKAELIALTKALEWSKDKSVNIYTDSRYAFATLHVHGMIYRERGWLTAGGKAIKNAPEILALLTAVWLPKRVAVMHCKGHQKDDAPTSTGNRRADEVAREVAIRPLSTQATISAGKRTADGSEFEKRTADGSEFESPKKKAKVE

SEQ ID NO: 1419 - protein, 2098 aa, synthetic construct
MPAAKRVKLDGGDKKYSIGLDIGTNSVGWAVITDEYKVPSKKFKVLGNTDRHSIKKNLIGALLFDSGETAEATRLKRTARRRYTRRKNRICYLQEIFSNEMAKVDDSFFHRLEESFLVEEDKKHERHPIFGNIVDEVAYHEKYPTIYHLRKKLVDSTDKADLRLIYLALAHMIKFRGHFLIEGDLNPDNSDVDKLFIQLVQTYNQLFEENPINASGVDAKAILSARLSKSRRLENLIAQLPGEKKNGLFGNLIALSLGLTPNFKSNFDLAEDAKLQLSKDTYDDDLDNLLAQIGDQYADLFLAAKNLSDAILLSDILRVNTEITKAPLSASMIKRYDEHHQDLTLLKALVRQQLPEKYKEIFFDQSKNGYAGYIDGGASQEEFYKFIKPILEKMDGTEELLVKLNREDLLRKQRTFDNGSIPHQIHLGELHAILRRQEDFYPFLKDNREKIEKILTFRIPYYVGPLARGNSRFAWMTRKSEETITPWNFEEVVDKGASAQSFIERMTNFDKNLPNEKVLPKHSLLYEYFTVYNELTKVKYVTEGMRKPAFLSGEQKKAIVDLLFKTNRKVTVKQLKEDYFKKIECFDSVEISGVEDRFNASLGTYHDLLKIIKDKDFLDNEENEDILEDIVLTLTLFEDREMIEERLKTYAHLFDDKVMKQLKRRRYTGWGRLSRKLINGIRDKQSGKTILDFLKSDGFANRNFMQLIHDDSLTFKEDIQKAQVSGQGDSLHEHIANLAGSPAIKKGILQTVKVVDELVKVMGRHKPENIVIEMARENQTTQKGQKNSRERMKRIEEGIKELGSQILKEHPVENTQLQNEKLYLYYLQNGRDMYVDQELDINRLSDYDVDHIVPQSFLKDDSIDNKVLTRSDKARGKSDNVPSEEVVKKMKNYWRQLLNAKLITQRKFDNLTKAERGGLSELDKAGFIKRQLVETRQITKHVAQILDSRMNTKYDENDKLIREVKVITLKSKLVSDFRKDFQFYKVREINNYHHAHDAYLNAVVGTALIKKYPKLESEFVYGDYKVYDVRKMIAKSEQEIGKATAKYFFYSNIMNFFKTEITLANGEIRKRPLIETNGETGEIVWDKGRDFATVRKVLSMPQVNIVKKTEVQTGGFSKESILPKRNSDKLIARKKDWDPKKYGGFDSPTVAYSVLVVAKVEKGKSKKLKSVKELLGITIMERSSFEKNPIDFLEAKGYKEVKKDLIIKLPKYSLFELENGRKRMLASAGELQKGNELALPSKYVNFLYLASHYEKLKGSPEDNEQKQLFVEQHKHYLDEIIEQISEFSKRVILADANLDKVLSAYNKHRDKPIREQAENIIHLFTLTNLGAPAAFKYFDTTIDRKRYTSTKEVLDATLIHQSITGLYETRIDLSQLGGDGGEAAAKGSSGGGGGTAPLEEEYRLFLEAPIQNVTLLEQWKREIPKVWAEINPPGLASTQAPIHVQLLSTALPVRVRQYPITLEAKRSLRETIRKFRAAGILRPVHSPWNTPLLPVRKSGTSEYRMVQDLREVNKRVETIHPTVPNPYTLLSLLPPDRIWYSVLDLKDAFFCIPLAPESQLIFAFEWADAEEGESGQLTWTRLPQGFKNSPTLFNEALNRDLQGFRLDHPSVSLLQYVDDLLIAADTQAACLSATRDLLMTLAELGYRVSGKKAQLCQEEVTYLGFKIHKGSRSLSNSRTQAILQIPVPKTKRQVREFLGKIGYCRLFIPGFAELAQPLYAATRPGNDPLVWGEKEEEAFQSLKLALTQPPALALPSLDKPFQLFVEETSGAAKGVLTQALGPWKRPVAYLSKRLDPVAAGWPRCLRAIAAAALLTREASKLTFGQDIEITSSHNLESLLRSPPDKWLTNARITQYQVLLLDPPRVRFKQTAALNPATLLPETDDTLPIHHCLDTLDSLTSTRPDLTDQPLAQAEATLFTDGSSYIRDGKRYAGAAVVTLDSVIWAEPLPIGTSAQKAELIALTKALEWSKDKSVNIYTDSRYAFATLHVHGMIYRERGWLTAGGKAIKNAPEILALLTAVWLPKRVAVMHCKGHQKDDAPTSTGNRRADEVAREVAIRPLSTQATISAGKRTADGSEFEKRTADGSEFESPKKKAKVE

SEQ ID NO: 1420 - protein, 2096 aa, synthetic construct
MPAAKRVKLDGGDKKYSIGLDIGTNSVGWAVITDEYKVPSKKFKVLGNTDRHSIKKNLIGALLFDSGETAEATRLKRTARRRYTRRKNRICYLQEIFSNEMAKVDDSFFHRLEESFLVEEDKKHERHPIFGNIVDEVAYHEKYPTIYHLRKKLVDSTDKADLRLIYLALAHMIKFRGHFLIEGDLNPDNSDVDKLFIQLVQTYNQLFEENPINASGVDAKAILSARLSKSRRLENLIAQLPGEKKNGLFGNLIALSLGLTPNFKSNFDLAEDAKLQLSKDTYDDDLDNLLAQIGDQYADLFLAAKNLSDAILLSDILRVNTEITKAPLSASMIKRYDEHHQDLTLLKALVRQQLPEKYKEIFFDQSKNGYAGYIDGGASQEEFYKFIKPILEKMDGTEELLVKLNREDLLRKQRTFDNGSIPHQIHLGELHAILRRQEDFYPFLKDNREKIEKILTFRIPYYVGPLARGNSRFAWMTRKSEETITPWNFEEVVDKGASAQSFIERMTNFDKNLPNEKVLPKHSLLYEYFTVYNELTKVKYVTEGMRKPAFLSGEQKKAIVDLLFKTNRKVTVKQLKEDYFKKIECFDSVEISGVEDRFNASLGTYHDLLKIIKDKDFLDNEENEDILEDIVLTLTLFEDREMIEERLKTYAHLFDDKVMKQLKRRRYTGWGRLSRKLINGIRDKQSGKTILDFLKSDGFANRNFMQLIHDDSLTFKEDIQKAQVSGQGDSLHEHIANLAGSPAIKKGILQTVKVVDELVKVMGRHKPENIVIEMARENQTTQKGQKNSRERMKRIEEGIKELGSQILKEHPVENTQLQNEKLYLYYLQNGRDMYVDQELDINRLSDYDVDHIVPQSFLKDDSIDNKVLTRSDKARGKSDNVPSEEVVKKMKNYWRQLLNAKLITQRKFDNLTKAERGGLSELDKAGFIKRQLVETRQITKHVAQILDSRMNTKYDENDKLIREVKVITLKSKLVSDFRKDFQFYKVREINNYHHAHDAYLNAVVGTALIKKYPKLESEFVYGDYKVYDVRKMIAKSEQEIGKATAKYFFYSNIMNFFKTEITLANGEIRKRPLIETNGETGEIVWDKGRDFATVRKVLSMPQVNIVKKTEVQTGGFSKESILPKRNSDKLIARKKDWDPKKYGGFDSPTVAYSVLVVAKVEKGKSKKLKSVKELLGITIMERSSFEKNPIDFLEAKGYKEVKKDLIIKLPKYSLFELENGRKRMLASAGELQKGNELALPSKYVNFLYLASHYEKLKGSPEDNEQKQLFVEQHKHYLDEIIEQISEFSKRVILADANLDKVLSAYNKHRDKPIREQAENIIHLFTLTNLGAPAAFKYFDTTIDRKRYTSTKEVLDATLIHQSITGLYETRIDLSQLGGDGGGGGGSSGGSGGTAPLEEEYRLFLEAPIQNVTLLEQWKREIPKVWAEINPPGLASTQAPIHVQLLSTALPVRVRQYPITLEAKRSLRETIRKFRAAGILRPVHSPWNTPLLPVRKSGTSEYRMVQDLREVNKRVETIHPTVPNPYTLLSLLPPDRIWYSVLDLKDAFFCIPLAPESQLIFAFEWADAEEGESGQLTWTRLPQGFKNSPTLFNEALNRDLQGFRLDHPSVSLLQYVDDLLIAADTQAACLSATRDLLMTLAELGYRVSGKKAQLCQEEVTYLGFKIHKGSRSLSNSRTQAILQIPVPKTKRQVREFLGKIGYCRLFIPGFAELAQPLYAATRPGNDPLVWGEKEEEAFQSLKLALTQPPALALPSLDKPFQLFVEETSGAAKGVLTQALGPWKRPVAYLSKRLDPVAAGWPRCLRAIAAAALLTREASKLTFGQDIEITSSHNLESLLRSPPDKWLTNARITQYQVLLLDPPRVRFKQTAALNPATLLPETDDTLPIHHCLDTLDSLTSTRPDLTDQPLAQAEATLFTDGSSYIRDGKRYAGAAVVTLDSVIWAEPLPIGTSAQKAELIALTKALEWSKDKSVNIYTDSRYAFATLHVHGMIYRERGWLTAGGKAIKNAPEILALLTAVWLPKRVAVMHCKGHQKDDAPTSTGNRRADEVAREVAIRPLSTQATISAGKRTADGSEFEKRTADGSEFESPKKKAKVE

SEQ ID NO: 1421 - protein, 2100 aa, synthetic construct
MPAAKRVKLDGGDKKYSIGLDIGTNSVGWAVITDEYKVPSKKFKVLGNTDRHSIKKNLIGALLFDSGETAEATRLKRTARRRYTRRKNRICYLQEIFSNEMAKVDDSFFHRLEESFLVEEDKKHERHPIFGNIVDEVAYHEKYPTIYHLRKKLVDSTDKADLRLIYLALAHMIKFRGHFLIEGDLNPDNSDVDKLFIQLVQTYNQLFEENPINASGVDAKAILSARLSKSRRLENLIAQLPGEKKNGLFGNLIALSLGLTPNFKSNFDLAEDAKLQLSKDTYDDDLDNLLAQIGDQYADLFLAAKNLSDAILLSDILRVNTEITKAPLSASMIKRYDEHHQDLTLLKALVRQQLPEKYKEIFFDQSKNGYAGYIDGGASQEEFYKFIKPILEKMDGTEELLVKLNREDLLRKQRTFDNGSIPHQIHLGELHAILRRQEDFYPFLKDNREKIEKILTFRIPYYVGPLARGNSRFAWMTRKSEETITPWNFEEVVDKGASAQSFIERMTNFDKNLPNEKVLPKHSLLYEYFTVYNELTKVKYVTEGMRKPAFLSGEQKKAIVDLLFKTNRKVTVKQLKEDYFKKIECFDSVEISGVEDRFNASLGTYHDLLKIIKDKDFLDNEENEDILEDIVLTLTLFEDREMIEERLKTYAHLFDDKVMKQLKRRRYTGWGRLSRKLINGIRDKQSGKTILDFLKSDGFANRNFMQLIHDDSLTFKEDIQKAQVSGQGDSLHEHIANLAGSPAIKKGILQTVKVVDELVKVMGRHKPENIVIEMARENQTTQKGQKNSRERMKRIEEGIKELGSQILKEHPVENTQLQNEKLYLYYLQNGRDMYVDQELDINRLSDYDVDHIVPQSFLKDDSIDNKVLTRSDKARGKSDNVPSEEVVKKMKNYWRQLLNAKLITQRKFDNLTKAERGGLSELDKAGFIKRQLVETRQITKHVAQILDSRMNTKYDENDKLIREVKVITLKSKLVSDFRKDFQFYKVREINNYHHAHDAYLNAVVGTALIKKYPKLESEFVYGDYKVYDVRKMIAKSEQEIGKATAKYFFYSNIMNFFKTEITLANGEIRKRPLIETNGETGEIVWDKGRDFATVRKVLSMPQVNIVKKTEVQTGGFSKESILPKRNSDKLIARKKDWDPKKYGGFDSPTVAYSVLVVAKVEKGKSKKLKSVKELLGITIMERSSFEKNPIDFLEAKGYKEVKKDLIIKLPKYSLFELENGRKRMLASAGELQKGNELALPSKYVNFLYLASHYEKLKGSPEDNEQKQLFVEQHKHYLDEIIEQISEFSKRVILADANLDKVLSAYNKHRDKPIREQAENIIHLFTLTNLGAPAAFKYFDTTIDRKRYTSTKEVLDATLIHQSITGLYETRIDLSQLGGDGGPAPAPAPAPAPAPGGTAPLEEEYRLFLEAPIQNVTLLEQWKREIPKVWAEINPPGLASTQAPIHVQLLSTALPVRVRQYPITLEAKRSLRETIRKFRAAGILRPVHSPWNTPLLPVRKSGTSEYRMVQDLREVNKRVETIHPTVPNPYTLLSLLPPDRIWYSVLDLKDAFFCIPLAPESQLIFAFEWADAEEGESGQLTWTRLPQGFKNSPTLFNEALNRDLQGFRLDHPSVSLLQYVDDLLIAADTQAACLSATRDLLMTLAELGYRVSGKKAQLCQEEVTYLGFKIHKGSRSLSNSRTQAILQIPVPKTKRQVREFLGKIGYCRLFIPGFAELAQPLYAATRPGNDPLVWGEKEEEAFQSLKLALTQPPALALPSLDKPFQLFVEETSGAAKGVLTQALGPWKRPVAYLSKRLDPVAAGWPRCLRAIAAAALLTREASKLTFGQDIEITSSHNLESLLRSPPDKWLTNARITQYQVLLLDPPRVRFKQTAALNPATLLPETDDTLPIHHCLDTLDSLTSTRPDLTDQPLAQAEATLFTDGSSYIRDGKRYAGAAVVTLDSVIWAEPLPIGTSAQKAELIALTKALEWSKDKSVNIYTDSRYAFATLHVHGMIYRERGWLTAGGKAIKNAPEILALLTAVWLPKRVAVMHCKGHQKDDAPTSTGNRRADEVAREVAIRPLSTQATISAGKRTADGSEFEKRTADGSEFESPKKKAKVE

SEQ ID NO: 1422 - protein, 2095 aa, synthetic construct
MPAAKRVKLDGGDKKYSIGLDIGTNSVGWAVITDEYKVPSKKFKVLGNTDRHSIKKNLIGALLFDSGETAEATRLKRTARRRYTRRKNRICYLQEIFSNEMAKVDDSFFHRLEESFLVEEDKKHERHPIFGNIVDEVAYHEKYPTIYHLRKKLVDSTDKADLRLIYLALAHMIKFRGHFLIEGDLNPDNSDVDKLFIQLVQTYNQLFEENPINASGVDAKAILSARLSKSRRLENLIAQLPGEKKNGLFGNLIALSLGLTPNFKSNFDLAEDAKLQLSKDTYDDDLDNLLAQIGDQYADLFLAAKNLSDAILLSDILRVNTEITKAPLSASMIKRYDEHHQDLTLLKALVRQQLPEKYKEIFFDQSKNGYAGYIDGGASQEEFYKFIKPILEKMDGTEELLVKLNREDLLRKQRTFDNGSIPHQIHLGELHAILRRQEDFYPFLKDNREKIEKILTFRIPYYVGPLARGNSRFAWMTRKSEETITPWNFEEVVDKGASAQSFIERMTNFDKNLPNEKVLPKHSLLYEYFTVYNELTKVKYVTEGMRKPAFLSGEQKKAIVDLLFKTNRKVTVKQLKEDYFKKIECFDSVEISGVEDRFNASLGTYHDLLKIIKDKDFLDNEENEDILEDIVLTLTLFEDREMIEERLKTYAHLFDDKVMKQLKRRRYTGWGRLSRKLINGIRDKQSGKTILDFLKSDGFANRNFMQLIHDDSLTFKEDIQKAQVSGQGDSLHEHIANLAGSPAIKKGILQTVKVVDELVKVMGRHKPENIVIEMARENQTTQKGQKNSRERMKRIEEGIKELGSQILKEHPVENTQLQNEKLYLYYLQNGRDMYVDQELDINRLSDYDVDHIVPQSFLKDDSIDNKVLTRSDKARGKSDNVPSEEVVKKMKNYWRQLLNAKLITQRKFDNLTKAERGGLSELDKAGFIKRQLVETRQITKHVAQILDSRMNTKYDENDKLIREVKVITLKSKLVSDFRKDFQFYKVREINNYHHAHDAYLNAVVGTALIKKYPKLESEFVYGDYKVYDVRKMIAKSEQEIGKATAKYFFYSNIMNFFKTEITLANGEIRKRPLIETNGETGEIVWDKGRDFATVRKVLSMPQVNIVKKTEVQTGGFSKESILPKRNSDKLIARKKDWDPKKYGGFDSPTVAYSVLVVAKVEKGKSKKLKSVKELLGITIMERSSFEKNPIDFLEAKGYKEVKKDLIIKLPKYSLFELENGRKRMLASAGELQKGNELALPSKYVNFLYLASHYEKLKGSPEDNEQKQLFVEQHKHYLDEIIEQISEFSKRVILADANLDKVLSAYNKHRDKPIREQAENIIHLFTLTNLGAPAAFKYFDTTIDRKRYTSTKEVLDATLIHQSITGLYETRIDLSQLGGDGGEAAAKGGGGGTAPLEEEYRLFLEAPIQNVTLLEQWKREIPKVWAEINPPGLASTQAPIHVQLLSTALPVRVRQYPITLEAKRSLRETIRKFRAAGILRPVHSPWNTPLLPVRKSGTSEYRMVQDLREVNKRVETIHPTVPNPYTLLSLLPPDRIWYSVLDLKDAFFCIPLAPESQLIFAFEWADAEEGESGQLTWTRLPQGFKNSPTLFNEALNRDLQGFRLDHPSVSLLQYVDDLLIAADTQAACLSATRDLLMTLAELGYRVSGKKAQLCQEEVTYLGFKIHKGSRSLSNSRTQAILQIPVPKTKRQVREFLGKIGYCRLFIPGFAELAQPLYAATRPGNDPLVWGEKEEEAFQSLKLALTQPPALALPSLDKPFQLFVEETSGAAKGVLTQALGPWKRPVAYLSKRLDPVAAGWPRCLRAIAAAALLTREASKLTFGQDIEITSSHNLESLLRSPPDKWLTNARITQYQVLLLDPPRVRFKQTAALNPATLLPETDDTLPIHHCLDTLDSLTSTRPDLTDQPLAQAEATLFTDGSSYIRDGKRYAGAAVVTLDSVIWAEPLPIGTSAQKAELIALTKALEWSKDKSVNIYTDSRYAFATLHVHGMIYRERGWLTAGGKAIKNAPEILALLTAVWLPKRVAVMHCKGHQKDDAPTSTGNRRADEVAREVAIRPLSTQATISAGKRTADGSEFEKRTADGSEFESPKKKAKVE

SEQ ID NO: 1423 - protein, 2097 aa, synthetic construct
MPAAKRVKLDGGDKKYSIGLDIGTNSVGWAVITDEYKVPSKKFKVLGNTDRHSIKKNLIGALLFDSGETAEATRLKRTARRRYTRRKNRICYLQEIFSNEMAKVDDSFFHRLEESFLVEEDKKHERHPIFGNIVDEVAYHEKYPTIYHLRKKLVDSTDKADLRLIYLALAHMIKFRGHFLIEGDLNPDNSDVDKLFIQLVQTYNQLFEENPINASGVDAKAILSARLSKSRRLENLIAQLPGEKKNGLFGNLIALSLGLTPNFKSNFDLAEDAKLQLSKDTYDDDLDNLLAQIGDQYADLFLAAKNLSDAILLSDILRVNTEITKAPLSASMIKRYDEHHQDLTLLKALVRQQLPEKYKEIFFDQSKNGYAGYIDGGASQEEFYKFIKPILEKMDGTEELLVKLNREDLLRKQRTFDNGSIPHQIHLGELHAILRRQEDFYPFLKDNREKIEKILTFRIPYYVGPLARGNSRFAWMTRKSEETITPWNFEEVVDKGASAQSFIERMTNFDKNLPNEKVLPKHSLLYEYFTVYNELTKVKYVTEGMRKPAFLSGEQKKAIVDLLFKTNRKVTVKQLKEDYFKKIECFDSVEISGVEDRFNASLGTYHDLLKIIKDKDFLDNEENEDILEDIVLTLTLFEDREMIEERLKTYAHLFDDKVMKQLKRRRYTGWGRLSRKLINGIRDKQSGKTILDFLKSDGFANRNFMQLIHDDSLTFKEDIQKAQVSGQGDSLHEHIANLAGSPAIKKGILQTVKVVDELVKVMGRHKPENIVIEMARENQTTQKGQKNSRERMKRIEEGIKELGSQILKEHPVENTQLQNEKLYLYYLQNGRDMYVDQELDINRLSDYDVDHIVPQSFLKDDSIDNKVLTRSDKARGKSDNVPSEEVVKKMKNYWRQLLNAKLITQRKFDNLTKAERGGLSELDKAGFIKRQLVETRQITKHVAQILDSRMNTKYDENDKLIREVKVITLKSKLVSDFRKDFQFYKVREINNYHHAHDAYLNAVVGTALIKKYPKLESEFVYGDYKVYDVRKMIAKSEQEIGKATAKYFFYSNIMNFFKTEITLANGEIRKRPLIETNGETGEIVWDKGRDFATVRKVLSMPQVNIVKKTEVQTGGFSKESILPKRNSDKLIARKKDWDPKKYGGFDSPTVAYSVLVVAKVEKGKSKKLKSVKELLGITIMERSSFEKNPIDFLEAKGYKEVKKDLIIKLPKYSLFELENGRKRMLASAGELQKGNELALPSKYVNFLYLASHYEKLKGSPEDNEQKQLFVEQHKHYLDEIIEQISEFSKRVILADANLDKVLSAYNKHRDKPIREQAENIIHLFTLTNLGAPAAFKYFDTTIDRKRYTSTKEVLDATLIHQSITGLYETRIDLSQLGGDGGGGGGSGGGGSGGTAPLEEEYRLFLEAPIQNVTLLEQWKREIPKVWAEINPPGLASTQAPIHVQLLSTALPVRVRQYPITLEAKRSLRETIRKFRAAGILRPVHSPWNTPLLPVRKSGTSEYRMVQDLREVNKRVETIHPTVPNPYTLLSLLPPDRIWYSVLDLKDAFFCIPLAPESQLIFAFEWADAEEGESGQLTWTRLPQGFKNSPTLFNEALNRDLQGFRLDHPSVSLLQYVDDLLIAADTQAACLSATRDLLMTLAELGYRVSGKKAQLCQEEVTYLGFKIHKGSRSLSNSRTQAILQIPVPKTKRQVREFLGKIGYCRLFIPGFAELAQPLYAATRPGNDPLVWGEKEEEAFQSLKLALTQPPALALPSLDKPFQLFVEETSGAAKGVLTQALGPWKRPVAYLSKRLDPVAAGWPRCLRAIAAAALLTREASKLTFGQDIEITSSHNLESLLRSPPDKWLTNARITQYQVLLLDPPRVRFKQTAALNPATLLPETDDTLPIHHCLDTLDSLTSTRPDLTDQPLAQAEATLFTDGSSYIRDGKRYAGAAVVTLDSVIWAEPLPIGTSAQKAELIALTKALEWSKDKSVNIYTDSRYAFATLHVHGMIYRERGWLTAGGKAIKNAPEILALLTAVWLPKRVAVMHCKGHQKDDAPTSTGNRRADEVAREVAIRPLSTQATISAGKRTADGSEFEKRTADGSEFESPKKKAKVE

SEQ ID NO: 1424 - protein, 2098 aa, synthetic construct
MPAAKRVKLDGGDKKYSIGLDIGTNSVGWAVITDEYKVPSKKFKVLGNTDRHSIKKNLIGALLFDSGETAEATRLKRTARRRYTRRKNRICYLQEIFSNEMAKVDDSFFHRLEESFLVEEDKKHERHPIFGNIVDEVAYHEKYPTIYHLRKKLVDSTDKADLRLIYLALAHMIKFRGHFLIEGDLNPDNSDVDKLFIQLVQTYNQLFEENPINASGVDAKAILSARLSKSRRLENLIAQLPGEKKNGLFGNLIALSLGLTPNFKSNFDLAEDAKLQLSKDTYDDDLDNLLAQIGDQYADLFLAAKNLSDAILLSDILRVNTEITKAPLSASMIKRYDEHHQDLTLLKALVRQQLPEKYKEIFFDQSKNGYAGYIDGGASQEEFYKFIKPILEKMDGTEELLVKLNREDLLRKQRTFDNGSIPHQIHLGELHAILRRQEDFYPFLKDNREKIEKILTFRIPYYVGPLARGNSRFAWMTRKSEETITPWNFEEVVDKGASAQSFIERMTNFDKNLPNEKVLPKHSLLYEYFTVYNELTKVKYVTEGMRKPAFLSGEQKKAIVDLLFKTNRKVTVKQLKEDYFKKIECFDSVEISGVEDRFNASLGTYHDLLKIIKDKDFLDNEENEDILEDIVLTLTLFEDREMIEERLKTYAHLFDDKVMKQLKRRRYTGWGRLSRKLINGIRDKQSGKTILDFLKSDGFANRNFMQLIHDDSLTFKEDIQKAQVSGQGDSLHEHIANLAGSPAIKKGILQTVKVVDELVKVMGRHKPENIVIEMARENQTTQKGQKNSRERMKRIEEGIKELGSQILKEHPVENTQLQNEKLYLYYLQNGRDMYVDQELDINRLSDYDVDHIVPQSFLKDDSIDNKVLTRSDKARGKSDNVPSEEVVKKMKNYWRQLLNAKLITQRKFDNLTKAERGGLSELDKAGFIKRQLVETRQITKHVAQILDSRMNTKYDENDKLIREVKVITLKSKLVSDFRKDFQFYKVREINNYHHAHDAYLNAVVGTALIKKYPKLESEFVYGDYKVYDVRKMIAKSEQEIGKATAKYFFYSNIMNFFKTEITLANGEIRKRPLIETNGETGEIVWDKGRDFATVRKVLSMPQVNIVKKTEVQTGGFSKESILPKRNSDKLIARKKDWDPKKYGGFDSPTVAYSVLVVAKVEKGKSKKLKSVKELLGITIMERSSFEKNPIDFLEAKGYKEVKKDLIIKLPKYSLFELENGRKRMLASAGELQKGNELALPSKYVNFLYLASHYEKLKGSPEDNEQKQLFVEQHKHYLDEIIEQISEFSKRVILADANLDKVLSAYNKHRDKPIREQAENIIHLFTLTNLGAPAAFKYFDTTIDRKRYTSTKEVLDATLIHQSITGLYETRIDLSQLGGDGGGSSGGGEAAAKGGTAPLEEEYRLFLEAPIQNVTLLEQWKREIPKVWAEINPPGLASTQAPIHVQLLSTALPVRVRQYPITLEAKRSLRETIRKFRAAGILRPVHSPWNTPLLPVRKSGTSEYRMVQDLREVNKRVETIHPTVPNPYTLLSLLPPDRIWYSVLDLKDAFFCIPLAPESQLIFAFEWADAEEGESGQLTWTRLPQGFKNSPTLFNEALNRDLQGFRLDHPSVSLLQYVDDLLIAADTQAACLSATRDLLMTLAELGYRVSGKKAQLCQEEVTYLGFKIHKGSRSLSNSRTQAILQIPVPKTKRQVREFLGKIGYCRLFIPGFAELAQPLYAATRPGNDPLVWGEKEEEAFQSLKLALTQPPALALPSLDKPFQLFVEETSGAAKGVLTQALGPWKRPVAYLSKRLDPVAAGWPRCLRAIAAAALLTREASKLTFGQDIEITSSHNLESLLRSPPDKWLTNARITQYQVLLLDPPRVRFKQTAALNPATLLPETDDTLPIHHCLDTLDSLTSTRPDLTDQPLAQAEATLFTDGSSYIRDGKRYAGAAVVTLDSVIWAEPLPIGTSAQKAELIALTKALEWSKDKSVNIYTDSRYAFATLHVHGMIYRERGWLTAGGKAIKNAPEILALLTAVWLPKRVAVMHCKGHQKDDAPTSTGNRRADEVAREVAIRPLSTQATISAGKRTADGSEFEKRTADGSEFESPKKKAKVE

SEQ ID NO: 1425 - protein, 2098 aa, synthetic construct
MPAAKRVKLDGGDKKYSIGLDIGTNSVGWAVITDEYKVPSKKFKVLGNTDRHSIKKNLIGALLFDSGETAEATRLKRTARRRYTRRKNRICYLQEIFSNEMAKVDDSFFHRLEESFLVEEDKKHERHPIFGNIVDEVAYHEKYPTIYHLRKKLVDSTDKADLRLIYLALAHMIKFRGHFLIEGDLNPDNSDVDKLFIQLVQTYNQLFEENPINASGVDAKAILSARLSKSRRLENLIAQLPGEKKNGLFGNLIALSLGLTPNFKSNFDLAEDAKLQLSKDTYDDDLDNLLAQIGDQYADLFLAAKNLSDAILLSDILRVNTEITKAPLSASMIKRYDEHHQDLTLLKALVRQQLPEKYKEIFFDQSKNGYAGYIDGGASQEEFYKFIKPILEKMDGTEELLVKLNREDLLRKQRTFDNGSIPHQIHLGELHAILRRQEDFYPFLKDNREKIEKILTFRIPYYVGPLARGNSRFAWMTRKSEETITPWNFEEVVDKGASAQSFIERMTNFDKNLPNEKVLPKHSLLYEYFTVYNELTKVKYVTEGMRKPAFLSGEQKKAIVDLLFKTNRKVTVKQLKEDYFKKIECFDSVEISGVEDRFNASLGTYHDLLKIIKDKDFLDNEENEDILEDIVLTLTLFEDREMIEERLKTYAHLFDDKVMKQLKRRRYTGWGRLSRKLINGIRDKQSGKTILDFLKSDGFANRNFMQLIHDDSLTFKEDIQKAQVSGQGDSLHEHIANLAGSPAIKKGILQTVKVVDELVKVMGRHKPENIVIEMARENQTTQKGQKNSRERMKRIEEGIKELGSQILKEHPVENTQLQNEKLYLYYLQNGRDMYVDQELDINRLSDYDVDHIVPQSFLKDDSIDNKVLTRSDKARGKSDNVPSEEVVKKMKNYWRQLLNAKLITQRKFDNLTKAERGGLSELDKAGFIKRQLVETRQITKHVAQILDSRMNTKYDENDKLIREVKVITLKSKLVSDFRKDFQFYKVREINNYHHAHDAYLNAVVGTALIKKYPKLESEFVYGDYKVYDVRKMIAKSEQEIGKATAKYFFYSNIMNFFKTEITLANGEIRKRPLIETNGETGEIVWDKGRDFATVRKVLSMPQVNIVKKTEVQTGGFSKESILPKRNSDKLIARKKDWDPKKYGGFDSPTVAYSVLVVAKVEKGKSKKLKSVKELLGITIMERSSFEKNPIDFLEAKGYKEVKKDLIIKLPKYSLFELENGRKRMLASAGELQKGNELALPSKYVNFLYLASHYEKLKGSPEDNEQKQLFVEQHKHYLDEIIEQISEFSKRVILADANLDKVLSAYNKHRDKPIREQAENIIHLFTLTNLGAPAAFKYFDTTIDRKRYTSTKEVLDATLIHQSITGLYETRIDLSQLGGDGGGGSEAAAKGGGGGTAPLEEEYRLFLEAPIQNVTLLEQWKREIPKVWAEINPPGLASTQAPIHVQLLSTALPVRVRQYPITLEAKRSLRETIRKFRAAGILRPVHSPWNTPLLPVRKSGTSEYRMVQDLREVNKRVETIHPTVPNPYTLLSLLPPDRIWYSVLDLKDAFFCIPLAPESQLIFAFEWADAEEGESGQLTWTRLPQGFKNSPTLFNEALNRDLQGFRLDHPSVSLLQYVDDLLIAADTQAACLSATRDLLMTLAELGYRVSGKKAQLCQEEVTYLGFKIHKGSRSLSNSRTQAILQIPVPKTKRQVREFLGKIGYCRLFIPGFAELAQPLYAATRPGNDPLVWGEKEEEAFQSLKLALTQPPALALPSLDKPFQLFVEETSGAAKGVLTQALGPWKRPVAYLSKRLDPVAAGWPRCLRAIAAAALLTREASKLTFGQDIEITSSHNLESLLRSPPDKWLTNARITQYQVLLLDPPRVRFKQTAALNPATLLPETDDTLPIHHCLDTLDSLTSTRPDLTDQPLAQAEATLFTDGSSYIRDGKRYAGAAVVTLDSVIWAEPLPIGTSAQKAELIALTKALEWSKDKSVNIYTDSRYAFATLHVHGMIYRERGWLTAGGKAIKNAPEILALLTAVWLPKRVAVMHCKGHQKDDAPTSTGNRRADEVAREVAIRPLSTQATISAGKRTADGSEFEKRTADGSEFESPKKKAKVE

SEQ ID NO: 1426 - protein, 2117 aa, synthetic construct
MPAAKRVKLDGGDKKYSIGLDIGTNSVGWAVITDEYKVPSKKFKVLGNTDRHSIKKNLIGALLFDSGETAEATRLKRTARRRYTRRKNRICYLQEIFSNEMAKVDDSFFHRLEESFLVEEDKKHERHPIFGNIVDEVAYHEKYPTIYHLRKKLVDSTDKADLRLIYLALAHMIKFRGHFLIEGDLNPDNSDVDKLFIQLVQTYNQLFEENPINASGVDAKAILSARLSKSRRLENLIAQLPGEKKNGLFGNLIALSLGLTPNFKSNFDLAEDAKLQLSKDTYDDDLDNLLAQIGDQYADLFLAAKNLSDAILLSDILRVNTEITKAPLSASMIKRYDEHHQDLTLLKALVRQQLPEKYKEIFFDQSKNGYAGYIDGGASQEEFYKFIKPILEKMDGTEELLVKLNREDLLRKQRTFDNGSIPHQIHLGELHAILRRQEDFYPFLKDNREKIEKILTFRIPYYVGPLARGNSRFAWMTRKSEETITPWNFEEVVDKGASAQSFIERMTNFDKNLPNEKVLPKHSLLYEYFTVYNELTKVKYVTEGMRKPAFLSGEQKKAIVDLLFKTNRKVTVKQLKEDYFKKIECFDSVEISGVEDRFNASLGTYHDLLKIIKDKDFLDNEENEDILEDIVLTLTLFEDREMIEERLKTYAHLFDDKVMKQLKRRRYTGWGRLSRKLINGIRDKQSGKTILDFLKSDGFANRNFMQLIHDDSLTFKEDIQKAQVSGQGDSLHEHIANLAGSPAIKKGILQTVKVVDELVKVMGRHKPENIVIEMARENQTTQKGQKNSRERMKRIEEGIKELGSQILKEHPVENTQLQNEKLYLYYLQNGRDMYVDQELDINRLSDYDVDHIVPQSFLKDDSIDNKVLTRSDKARGKSDNVPSEEVVKKMKNYWRQLLNAKLITQRKFDNLTKAERGGLSELDKAGFIKRQLVETRQITKHVAQILDSRMNTKYDENDKLIREVKVITLKSKLVSDFRKDFQFYKVREINNYHHAHDAYLNAVVGTALIKKYPKLESEFVYGDYKVYDVRKMIAKSEQEIGKATAKYFFYSNIMNFFKTEITLANGEIRKRPLIETNGETGEIVWDKGRDFATVRKVLSMPQVNIVKKTEVQTGGFSKESILPKRNSDKLIARKKDWDPKKYGGFDSPTVAYSVLVVAKVEKGKSKKLKSVKELLGITIMERSSFEKNPIDFLEAKGYKEVKKDLIIKLPKYSLFELENGRKRMLASAGELQKGNELALPSKYVNFLYLASHYEKLKGSPEDNEQKQLFVEQHKHYLDEIIEQISEFSKRVILADANLDKVLSAYNKHRDKPIREQAENIIHLFTLTNLGAPAAFKYFDTTIDRKRYTSTKEVLDATLIHQSITGLYETRIDLSQLGGDGGEAAAKEAAAKEAAAKEAAAKEAAAKEAAAKGGTAPLEEEYRLFLEAPIQNVTLLEQWKREIPKVWAEINPPGLASTQAPIHVQLLSTALPVRVRQYPITLEAKRSLRETIRKFRAAGILRPVHSPWNTPLLPVRKSGTSEYRMVQDLREVNKRVETIHPTVPNPYTLLSLLPPDRIWYSVLDLKDAFFCIPLAPESQLIFAFEWADAEEGESGQLTWTRLPQGFKNSPTLFNEALNRDLQGFRLDHPSVSLLQYVDDLLIAADTQAACLSATRDLLMTLAELGYRVSGKKAQLCQEEVTYLGFKIHKGSRSLSNSRTQAILQIPVPKTKRQVREFLGKIGYCRLFIPGFAELAQPLYAATRPGNDPLVWGEKEEEAFQSLKLALTQPPALALPSLDKPFQLFVEETSGAAKGVLTQALGPWKRPVAYLSKRLDPVAAGWPRCLRAIAAAALLTREASKLTFGQDIEITSSHNLESLLRSPPDKWLTNARITQYQVLLLDPPRVRFKQTAALNPATLLPETDDTLPIHHCLDTLDSLTSTRPDLTDQPLAQAEATLFTDGSSYIRDGKRYAGAAVVTLDSVIWAEPLPIGTSAQKAELIALTKALEWSKDKSVNIYTDSRYAFATLHVHGMIYRERGWLTAGGKAIKNAPEILALLTAVWLPKRVAVMHCKGHQKDDAPTSTGNRRADEVAREVAIRPLSTQATISAGKRTADGSEFEKRTADGSEFESPKKKAKVE

SEQ ID NO: 1427 - protein, 2098 aa, synthetic construct
MPAAKRVKLDGGDKKYSIGLDIGTNSVGWAVITDEYKVPSKKFKVLGNTDRHSIKKNLIGALLFDSGETAEATRLKRTARRRYTRRKNRICYLQEIFSNEMAKVDDSFFHRLEESFLVEEDKKHERHPIFGNIVDEVAYHEKYPTIYHLRKKLVDSTDKADLRLIYLALAHMIKFRGHFLIEGDLNPDNSDVDKLFIQLVQTYNQLFEENPINASGVDAKAILSARLSKSRRLENLIAQLPGEKKNGLFGNLIALSLGLTPNFKSNFDLAEDAKLQLSKDTYDDDLDNLLAQIGDQYADLFLAAKNLSDAILLSDILRVNTEITKAPLSASMIKRYDEHHQDLTLLKALVRQQLPEKYKEIFFDQSKNGYAGYIDGGASQEEFYKFIKPILEKMDGTEELLVKLNREDLLRKQRTFDNGSIPHQIHLGELHAILRRQEDFYPFLKDNREKIEKILTFRIPYYVGPLARGNSRFAWMTRKSEETITPWNFEEVVDKGASAQSFIERMTNFDKNLPNEKVLPKHSLLYEYFTVYNELTKVKYVTEGMRKPAFLSGEQKKAIVDLLFKTNRKVTVKQLKEDYFKKIECFDSVEISGVEDRFNASLGTYHDLLKIIKDKDFLDNEENEDILEDIVLTLTLFEDREMIEERLKTYAHLFDDKVMKQLKRRRYTGWGRLSRKLINGIRDKQSGKTILDFLKSDGFANRNFMQLIHDDSLTFKEDIQKAQVSGQGDSLHEHIANLAGSPAIKKGILQTVKVVDELVKVMGRHKPENIVIEMARENQTTQKGQKNSRERMKRIEEGIKELGSQILKEHPVENTQLQNEKLYLYYLQNGRDMYVDQELDINRLSDYDVDHIVPQSFLKDDSIDNKVLTRSDKARGKSDNVPSEEVVKKMKNYWRQLLNAKLITQRKFDNLTKAERGGLSELDKAGFIKRQLVETRQITKHVAQILDSRMNTKYDENDKLIREVKVITLKSKLVSDFRKDFQFYKVREINNYHHAHDAYLNAVVGTALIKKYPKLESEFVYGDYKVYDVRKMIAKSEQEIGKATAKYFFYSNIMNFFKTEITLANGEIRKRPLIETNGETGEIVWDKGRDFATVRKVLSMPQVNIVKKTEVQTGGFSKESILPKRNSDKLIARKKDWDPKKYGGFDSPTVAYSVLVVAKVEKGKSKKLKSVKELLGITIMERSSFEKNPIDFLEAKGYKEVKKDLIIKLPKYSLFELENGRKRMLASAGELQKGNELALPSKYVNFLYLASHYEKLKGSPEDNEQKQLFVEQHKHYLDEIIEQISEFSKRVILADANLDKVLSAYNKHRDKPIREQAENIIHLFTLTNLGAPAAFKYFDTTIDRKRYTSTKEVLDATLIHQSITGLYETRIDLSQLGGDGGGGGGGSEAAAKGGTAPLEEEYRLFLEAPIQNVTLLEQWKREIPKVWAEINPPGLASTQAPIHVQLLSTALPVRVRQYPITLEAKRSLRETIRKFRAAGILRPVHSPWNTPLLPVRKSGTSEYRMVQDLREVNKRVETIHPTVPNPYTLLSLLPPDRIWYSVLDLKDAFFCIPLAPESQLIFAFEWADAEEGESGQLTWTRLPQGFKNSPTLFNEALNRDLQGFRLDHPSVSLLQYVDDLLIAADTQAACLSATRDLLMTLAELGYRVSGKKAQLCQEEVTYLGFKIHKGSRSLSNSRTQAILQIPVPKTKRQVREFLGKIGYCRLFIPGFAELAQPLYAATRPGNDPLVWGEKEEEAFQSLKLALTQPPALALPSLDKPFQLFVEETSGAAKGVLTQALGPWKRPVAYLSKRLDPVAAGWPRCLRAIAAAALLTREASKLTFGQDIEITSSHNLESLLRSPPDKWLTNARITQYQVLLLDPPRVRFKQTAALNPATLLPETDDTLPIHHCLDTLDSLTSTRPDLTDQPLAQAEATLFTDGSSYIRDGKRYAGAAVVTLDSVIWAEPLPIGTSAQKAELIALTKALEWSKDKSVNIYTDSRYAFATLHVHGMIYRERGWLTAGGKAIKNAPEILALLTAVWLPKRVAVMHCKGHQKDDAPTSTGNRRADEVAREVAIRPLSTQATISAGKRTADGSEFEKRTADGSEFESPKKKAKVE

SEQ ID NO: 1428 - protein, 2095 aa, synthetic construct
MPAAKRVKLDGGDKKYSIGLDIGTNSVGWAVITDEYKVPSKKFKVLGNTDRHSIKKNLIGALLFDSGETAEATRLKRTARRRYTRRKNRICYLQEIFSNEMAKVDDSFFHRLEESFLVEEDKKHERHPIFGNIVDEVAYHEKYPTIYHLRKKLVDSTDKADLRLIYLALAHMIKFRGHFLIEGDLNPDNSDVDKLFIQLVQTYNQLFEENPINASGVDAKAILSARLSKSRRLENLIAQLPGEKKNGLFGNLIALSLGLTPNFKSNFDLAEDAKLQLSKDTYDDDLDNLLAQIGDQYADLFLAAKNLSDAILLSDILRVNTEITKAPLSASMIKRYDEHHQDLTLLKALVRQQLPEKYKEIFFDQSKNGYAGYIDGGASQEEFYKFIKPILEKMDGTEELLVKLNREDLLRKQRTFDNGSIPHQIHLGELHAILRRQEDFYPFLKDNREKIEKILTFRIPYYVGPLARGNSRFAWMTRKSEETITPWNFEEVVDKGASAQSFIERMTNFDKNLPNEKVLPKHSLLYEYFTVYNELTKVKYVTEGMRKPAFLSGEQKKAIVDLLFKTNRKVTVKQLKEDYFKKIECFDSVEISGVEDRFNASLGTYHDLLKIIKDKDFLDNEENEDILEDIVLTLTLFEDREMIEERLKTYAHLFDDKVMKQLKRRRYTGWGRLSRKLINGIRDKQSGKTILDFLKSDGFANRNFMQLIHDDSLTFKEDIQKAQVSGQGDSLHEHIANLAGSPAIKKGILQTVKVVDELVKVMGRHKPENIVIEMARENQTTQKGQKNSRERMKRIEEGIKELGSQILKEHPVENTQLQNEKLYLYYLQNGRDMYVDQELDINRLSDYDVDHIVPQSFLKDDSIDNKVLTRSDKARGKSDNVPSEEVVKKMKNYWRQLLNAKLITQRKFDNLTKAERGGLSELDKAGFIKRQLVETRQITKHVAQILDSRMNTKYDENDKLIREVKVITLKSKLVSDFRKDFQFYKVREINNYHHAHDAYLNAVVGTALIKKYPKLESEFVYGDYKVYDVRKMIAKSEQEIGKATAKYFFYSNIMNFFKTEITLANGEIRKRPLIETNGETGEIVWDKGRDFATVRKVLSMPQVNIVKKTEVQTGGFSKESILPKRNSDKLIARKKDWDPKKYGGFDSPTVAYSVLVVAKVEKGKSKKLKSVKELLGITIMERSSFEKNPIDFLEAKGYKEVKKDLIIKLPKYSLFELENGRKRMLASAGELQKGNELALPSKYVNFLYLASHYEKLKGSPEDNEQKQLFVEQHKHYLDEIIEQISEFSKRVILADANLDKVLSAYNKHRDKPIREQAENIIHLFTLTNLGAPAAFKYFDTTIDRKRYTSTKEVLDATLIHQSITGLYETRIDLSQLGGDGGEAAAKGGSGGTAPLEEEYRLFLEAPIQNVTLLEQWKREIPKVWAEINPPGLASTQAPIHVQLLSTALPVRVRQYPITLEAKRSLRETIRKFRAAGILRPVHSPWNTPLLPVRKSGTSEYRMVQDLREVNKRVETIHPTVPNPYTLLSLLPPDRIWYSVLDLKDAFFCIPLAPESQLIFAFEWADAEEGESGQLTWTRLPQGFKNSPTLFNEALNRDLQGFRLDHPSVSLLQYVDDLLIAADTQAACLSATRDLLMTLAELGYRVSGKKAQLCQEEVTYLGFKIHKGSRSLSNSRTQAILQIPVPKTKRQVREFLGKIGYCRLFIPGFAELAQPLYAATRPGNDPLVWGEKEEEAFQSLKLALTQPPALALPSLDKPFQLFVEETSGAAKGVLTQALGPWKRPVAYLSKRLDPVAAGWPRCLRAIAAAALLTREASKLTFGQDIEITSSHNLESLLRSPPDKWLTNARITQYQVLLLDPPRVRFKQTAALNPATLLPETDDTLPIHHCLDTLDSLTSTRPDLTDQPLAQAEATLFTDGSSYIRDGKRYAGAAVVTLDSVIWAEPLPIGTSAQKAELIALTKALEWSKDKSVNIYTDSRYAFATLHVHGMIYRERGWLTAGGKAIKNAPEILALLTAVWLPKRVAVMHCKGHQKDDAPTSTGNRRADEVAREVAIRPLSTQATISAGKRTADGSEFEKRTADGSEFESPKKKAKVE

SEQ ID NO: 1429 - protein, 2096 aa, synthetic construct
MPAAKRVKLDGGDKKYSIGLDIGTNSVGWAVITDEYKVPSKKFKVLGNTDRHSIKKNLIGALLFDSGETAEATRLKRTARRRYTRRKNRICYLQEIFSNEMAKVDDSFFHRLEESFLVEEDKKHERHPIFGNIVDEVAYHEKYPTIYHLRKKLVDSTDKADLRLIYLALAHMIKFRGHFLIEGDLNPDNSDVDKLFIQLVQTYNQLFEENPINASGVDAKAILSARLSKSRRLENLIAQLPGEKKNGLFGNLIALSLGLTPNFKSNFDLAEDAKLQLSKDTYDDDLDNLLAQIGDQYADLFLAAKNLSDAILLSDILRVNTEITKAPLSASMIKRYDEHHQDLTLLKALVRQQLPEKYKEIFFDQSKNGYAGYIDGGASQEEFYKFIKPILEKMDGTEELLVKLNREDLLRKQRTFDNGSIPHQIHLGELHAILRRQEDFYPFLKDNREKIEKILTFRIPYYVGPLARGNSRFAWMTRKSEETITPWNFEEVVDKGASAQSFIERMTNFDKNLPNEKVLPKHSLLYEYFTVYNELTKVKYVTEGMRKPAFLSGEQKKAIVDLLFKTNRKVTVKQLKEDYFKKIECFDSVEISGVEDRFNASLGTYHDLLKIIKDKDFLDNEENEDILEDIVLTLTLFEDREMIEERLKTYAHLFDDKVMKQLKRRRYTGWGRLSRKLINGIRDKQSGKTILDFLKSDGFANRNFMQLIHDDSLTFKEDIQKAQVSGQGDSLHEHIANLAGSPAIKKGILQTVKVVDELVKVMGRHKPENIVIEMARENQTTQKGQKNSRERMKRIEEGIKELGSQILKEHPVENTQLQNEKLYLYYLQNGRDMYVDQELDINRLSDYDVDHIVPQSFLKDDSIDNKVLTRSDKARGKSDNVPSEEVVKKMKNYWRQLLNAKLITQRKFDNLTKAERGGLSELDKAGFIKRQLVETRQITKHVAQILDSRMNTKYDENDKLIREVKVITLKSKLVSDFRKDFQFYKVREINNYHHAHDAYLNAVVGTALIKKYPKLESEFVYGDYKVYDVRKMIAKSEQEIGKATAKYFFYSNIMNFFKTEITLANGEIRKRPLIETNGETGEIVWDKGRDFATVRKVLSMPQVNIVKKTEVQTGGFSKESILPKRNSDKLIARKKDWDPKKYGGFDSPTVAYSVLVVAKVEKGKSKKLKSVKELLGITIMERSSFEKNPIDFLEAKGYKEVKKDLIIKLPKYSLFELENGRKRMLASAGELQKGNELALPSKYVNFLYLASHYEKLKGSPEDNEQKQLFVEQHKHYLDEIIEQISEFSKRVILADANLDKVLSAYNKHRDKPIREQAENIIHLFTLTNLGAPAAFKYFDTTIDRKRYTSTKEVLDATLIHQSITGLYETRIDLSQLGGDGGPAPAPAPAPGGTAPLEEEYRLFLEAPIQNVTLLEQWKREIPKVWAEINPPGLASTQAPIHVQLLSTALPVRVRQYPITLEAKRSLRETIRKFRAAGILRPVHSPWNTPLLPVRKSGTSEYRMVQDLREVNKRVETIHPTVPNPYTLLSLLPPDRIWYSVLDLKDAFFCIPLAPESQLIFAFEWADAEEGESGQLTWTRLPQGFKNSPTLFNEALNRDLQGFRLDHPSVSLLQYVDDLLIAADTQAACLSATRDLLMTLAELGYRVSGKKAQLCQEEVTYLGFKIHKGSRSLSNSRTQAILQIPVPKTKRQVREFLGKIGYCRLFIPGFAELAQPLYAATRPGNDPLVWGEKEEEAFQSLKLALTQPPALALPSLDKPFQLFVEETSGAAKGVLTQALGPWKRPVAYLSKRLDPVAAGWPRCLRAIAAAALLTREASKLTFGQDIEITSSHNLESLLRSPPDKWLTNARITQYQVLLLDPPRVRFKQTAALNPATLLPETDDTLPIHHCLDTLDSLTSTRPDLTDQPLAQAEATLFTDGSSYIRDGKRYAGAAVVTLDSVIWAEPLPIGTSAQKAELIALTKALEWSKDKSVNIYTDSRYAFATLHVHGMIYRERGWLTAGGKAIKNAPEILALLTAVWLPKRVAVMHCKGHQKDDAPTSTGNRRADEVAREVAIRPLSTQATISAGKRTADGSEFEKRTADGSEFESPKKKAKVE

SEQ ID NO: 1430 - protein, 2093 aa, synthetic construct
MPAAKRVKLDGGDKKYSIGLDIGTNSVGWAVITDEYKVPSKKFKVLGNTDRHSIKKNLIGALLFDSGETAEATRLKRTARRRYTRRKNRICYLQEIFSNEMAKVDDSFFHRLEESFLVEEDKKHERHPIFGNIVDEVAYHEKYPTIYHLRKKLVDSTDKADLRLIYLALAHMIKFRGHFLIEGDLNPDNSDVDKLFIQLVQTYNQLFEENPINASGVDAKAILSARLSKSRRLENLIAQLPGEKKNGLFGNLIALSLGLTPNFKSNFDLAEDAKLQLSKDTYDDDLDNLLAQIGDQYADLFLAAKNLSDAILLSDILRVNTEITKAPLSASMIKRYDEHHQDLTLLKALVRQQLPEKYKEIFFDQSKNGYAGYIDGGASQEEFYKFIKPILEKMDGTEELLVKLNREDLLRKQRTFDNGSIPHQIHLGELHAILRRQEDFYPFLKDNREKIEKILTFRIPYYVGPLARGNSRFAWMTRKSEETITPWNFEEVVDKGASAQSFIERMTNFDKNLPNEKVLPKHSLLYEYFTVYNELTKVKYVTEGMRKPAFLSGEQKKAIVDLLFKTNRKVTVKQLKEDYFKKIECFDSVEISGVEDRFNASLGTYHDLLKIIKDKDFLDNEENEDILEDIVLTLTLFEDREMIEERLKTYAHLFDDKVMKQLKRRRYTGWGRLSRKLINGIRDKQSGKTILDFLKSDGFANRNFMQLIHDDSLTFKEDIQKAQVSGQGDSLHEHIANLAGSPAIKKGILQTVKVVDELVKVMGRHKPENIVIEMARENQTTQKGQKNSRERMKRIEEGIKELGSQILKEHPVENTQLQNEKLYLYYLQNGRDMYVDQELDINRLSDYDVDHIVPQSFLKDDSIDNKVLTRSDKARGKSDNVPSEEVVKKMKNYWRQLLNAKLITQRKFDNLTKAERGGLSELDKAGFIKRQLVETRQITKHVAQILDSRMNTKYDENDKLIREVKVITLKSKLVSDFRKDFQFYKVREINNYHHAHDAYLNAVVGTALIKKYPKLESEFVYGDYKVYDVRKMIAKSEQEIGKATAKYFFYSNIMNFFKTEITLANGEIRKRPLIETNGETGEIVWDKGRDFATVRKVLSMPQVNIVKKTEVQTGGFSKESILPKRNSDKLIARKKDWDPKKYGGFDSPTVAYSVLVVAKVEKGKSKKLKSVKELLGITIMERSSFEKNPIDFLEAKGYKEVKKDLIIKLPKYSLFELENGRKRMLASAGELQKGNELALPSKYVNFLYLASHYEKLKGSPEDNEQKQLFVEQHKHYLDEIIEQISEFSKRVILADANLDKVLSAYNKHRDKPIREQAENIIHLFTLTNLGAPAAFKYFDTTIDRKRYTSTKEVLDATLIHQSITGLYETRIDLSQLGGDGGGSSGGGGGTAPLEEEYRLFLEAPIQNVTLLEQWKREIPKVWAEINPPGLASTQAPIHVQLLSTALPVRVRQYPITLEAKRSLRETIRKFRAAGILRPVHSPWNTPLLPVRKSGTSEYRMVQDLREVNKRVETIHPTVPNPYTLLSLLPPDRIWYSVLDLKDAFFCIPLAPESQLIFAFEWADAEEGESGQLTWTRLPQGFKNSPTLFNEALNRDLQGFRLDHPSVSLLQYVDDLLIAADTQAACLSATRDLLMTLAELGYRVSGKKAQLCQEEVTYLGFKIHKGSRSLSNSRTQAILQIPVPKTKRQVREFLGKIGYCRLFIPGFAELAQPLYAATRPGNDPLVWGEKEEEAFQSLKLALTQPPALALPSLDKPFQLFVEETSGAAKGVLTQALGPWKRPVAYLSKRLDPVAAGWPRCLRAIAAAALLTREASKLTFGQDIEITSSHNLESLLRSPPDKWLTNARITQYQVLLLDPPRVRFKQTAALNPATLLPETDDTLPIHHCLDTLDSLTSTRPDLTDQPLAQAEATLFTDGSSYIRDGKRYAGAAVVTLDSVIWAEPLPIGTSAQKAELIALTKALEWSKDKSVNIYTDSRYAFATLHVHGMIYRERGWLTAGGKAIKNAPEILALLTAVWLPKRVAVMHCKGHQKDDAPTSTGNRRADEVAREVAIRPLSTQATISAGKRTADGSEFEKRTADGSEFESPKKKAKVE

SEQ ID NO: 1431 - protein, 2098 aa, synthetic construct
MPAAKRVKLDGGDKKYSIGLDIGTNSVGWAVITDEYKVPSKKFKVLGNTDRHSIKKNLIGALLFDSGETAEATRLKRTARRRYTRRKNRICYLQEIFSNEMAKVDDSFFHRLEESFLVEEDKKHERHPIFGNIVDEVAYHEKYPTIYHLRKKLVDSTDKADLRLIYLALAHMIKFRGHFLIEGDLNPDNSDVDKLFIQLVQTYNQLFEENPINASGVDAKAILSARLSKSRRLENLIAQLPGEKKNGLFGNLIALSLGLTPNFKSNFDLAEDAKLQLSKDTYDDDLDNLLAQIGDQYADLFLAAKNLSDAILLSDILRVNTEITKAPLSASMIKRYDEHHQDLTLLKALVRQQLPEKYKEIFFDQSKNGYAGYIDGGASQEEFYKFIKPILEKMDGTEELLVKLNREDLLRKQRTFDNGSIPHQIHLGELHAILRRQEDFYPFLKDNREKIEKILTFRIPYYVGPLARGNSRFAWMTRKSEETITPWNFEEVVDKGASAQSFIERMTNFDKNLPNEKVLPKHSLLYEYFTVYNELTKVKYVTEGMRKPAFLSGEQKKAIVDLLFKTNRKVTVKQLKEDYFKKIECFDSVEISGVEDRFNASLGTYHDLLKIIKDKDFLDNEENEDILEDIVLTLTLFEDREMIEERLKTYAHLFDDKVMKQLKRRRYTGWGRLSRKLINGIRDKQSGKTILDFLKSDGFANRNFMQLIHDDSLTFKEDIQKAQVSGQGDSLHEHIANLAGSPAIKKGILQTVKVVDELVKVMGRHKPENIVIEMARENQTTQKGQKNSRERMKRIEEGIKELGSQILKEHPVENTQLQNEKLYLYYLQNGRDMYVDQELDINRLSDYDVDHIVPQSFLKDDSIDNKVLTRSDKARGKSDNVPSEEVVKKMKNYWRQLLNAKLITQRKFDNLTKAERGGLSELDKAGFIKRQLVETRQITKHVAQILDSRMNTKYDENDKLIREVKVITLKSKLVSDFRKDFQFYKVREINNYHHAHDAYLNAVVGTALIKKYPKLESEFVYGDYKVYDVRKMIAKSEQEIGKATAKYFFYSNIMNFFKTEITLANGEIRKRPLIETNGETGEIVWDKGRDFATVRKVLSMPQVNIVKKTEVQTGGFSKESILPKRNSDKLIARKKDWDPKKYGGFDSPTVAYSVLVVAKVEKGKSKKLKSVKELLGITIMERSSFEKNPIDFLEAKGYKEVKKDLIIKLPKYSLFELENGRKRMLASAGELQKGNELALPSKYVNFLYLASHYEKLKGSPEDNEQKQLFVEQHKHYLDEIIEQISEFSKRVILADANLDKVLSAYNKHRDKPIREQAENIIHLFTLTNLGAPAAFKYFDTTIDRKRYTSTKEVLDATLIHQSITGLYETRIDLSQLGGDGGEAAAKGGSPAPGGTAPLEEEYRLFLEAPIQNVTLLEQWKREIPKVWAEINPPGLASTQAPIHVQLLSTALPVRVRQYPITLEAKRSLRETIRKFRAAGILRPVHSPWNTPLLPVRKSGTSEYRMVQDLREVNKRVETIHPTVPNPYTLLSLLPPDRIWYSVLDLKDAFFCIPLAPESQLIFAFEWADAEEGESGQLTWTRLPQGFKNSPTLFNEALNRDLQGFRLDHPSVSLLQYVDDLLIAADTQAACLSATRDLLMTLAELGYRVSGKKAQLCQEEVTYLGFKIHKGSRSLSNSRTQAILQIPVPKTKRQVREFLGKIGYCRLFIPGFAELAQPLYAATRPGNDPLVWGEKEEEAFQSLKLALTQPPALALPSLDKPFQLFVEETSGAAKGVLTQALGPWKRPVAYLSKRLDPVAAGWPRCLRAIAAAALLTREASKLTFGQDIEITSSHNLESLLRSPPDKWLTNARITQYQVLLLDPPRVRFKQTAALNPATLLPETDDTLPIHHCLDTLDSLTSTRPDLTDQPLAQAEATLFTDGSSYIRDGKRYAGAAVVTLDSVIWAEPLPIGTSAQKAELIALTKALEWSKDKSVNIYTDSRYAFATLHVHGMIYRERGWLTAGGKAIKNAPEILALLTAVWLPKRVAVMHCKGHQKDDAPTSTGNRRADEVAREVAIRPLSTQATISAGKRTADGSEFEKRTADGSEFESPKKKAKVE

SEQ ID NO: 1432 - protein, 2096 aa, synthetic construct
MPAAKRVKLDGGDKKYSIGLDIGTNSVGWAVITDEYKVPSKKFKVLGNTDRHSIKKNLIGALLFDSGETAEATRLKRTARRRYTRRKNRICYLQEIFSNEMAKVDDSFFHRLEESFLVEEDKKHERHPIFGNIVDEVAYHEKYPTIYHLRKKLVDSTDKADLRLIYLALAHMIKFRGHFLIEGDLNPDNSDVDKLFIQLVQTYNQLFEENPINASGVDAKAILSARLSKSRRLENLIAQLPGEKKNGLFGNLIALSLGLTPNFKSNFDLAEDAKLQLSKDTYDDDLDNLLAQIGDQYADLFLAAKNLSDAILLSDILRVNTEITKAPLSASMIKRYDEHHQDLTLLKALVRQQLPEKYKEIFFDQSKNGYAGYIDGGASQEEFYKFIKPILEKMDGTEELLVKLNREDLLRKQRTFDNGSIPHQIHLGELHAILRRQEDFYPFLKDNREKIEKILTFRIPYYVGPLARGNSRFAWMTRKSEETITPWNFEEVVDKGASAQSFIERMTNFDKNLPNEKVLPKHSLLYEYFTVYNELTKVKYVTEGMRKPAFLSGEQKKAIVDLLFKTNRKVTVKQLKEDYFKKIECFDSVEISGVEDRFNASLGTYHDLLKIIKDKDFLDNEENEDILEDIVLTLTLFEDREMIEERLKTYAHLFDDKVMKQLKRRRYTGWGRLSRKLINGIRDKQSGKTILDFLKSDGFANRNFMQLIHDDSLTFKEDIQKAQVSGQGDSLHEHIANLAGSPAIKKGILQTVKVVDELVKVMGRHKPENIVIEMARENQTTQKGQKNSRERMKRIEEGIKELGSQILKEHPVENTQLQNEKLYLYYLQNGRDMYVDQELDINRLSDYDVDHIVPQSFLKDDSIDNKVLTRSDKARGKSDNVPSEEVVKKMKNYWRQLLNAKLITQRKFDNLTKAERGGLSELDKAGFIKRQLVETRQITKHVAQILDSRMNTKYDENDKLIREVKVITLKSKLVSDFRKDFQFYKVREINNYHHAHDAYLNAVVGTALIKKYPKLESEFVYGDYKVYDVRKMIAKSEQEIGKATAKYFFYSNIMNFFKTEITLANGEIRKRPLIETNGETGEIVWDKGRDFATVRKVLSMPQVNIVKKTEVQTGGFSKESILPKRNSDKLIARKKDWDPKKYGGFDSPTVAYSVLVVAKVEKGKSKKLKSVKELLGITIMERSSFEKNPIDFLEAKGYKEVKKDLIIKLPKYSLFELENGRKRMLASAGELQKGNELALPSKYVNFLYLASHYEKLKGSPEDNEQKQLFVEQHKHYLDEIIEQISEFSKRVILADANLDKVLSAYNKHRDKPIREQAENIIHLFTLTNLGAPAAFKYFDTTIDRKRYTSTKEVLDATLIHQSITGLYETRIDLSQLGGDGGGGGGGSPAPGGTAPLEEEYRLFLEAPIQNVTLLEQWKREIPKVWAEINPPGLASTQAPIHVQLLSTALPVRVRQYPITLEAKRSLRETIRKFRAAGILRPVHSPWNTPLLPVRKSGTSEYRMVQDLREVNKRVETIHPTVPNPYTLLSLLPPDRIWYSVLDLKDAFFCIPLAPESQLIFAFEWADAEEGESGQLTWTRLPQGFKNSPTLFNEALNRDLQGFRLDHPSVSLLQYVDDLLIAADTQAACLSATRDLLMTLAELGYRVSGKKAQLCQEEVTYLGFKIHKGSRSLSNSRTQAILQIPVPKTKRQVREFLGKIGYCRLFIPGFAELAQPLYAATRPGNDPLVWGEKEEEAFQSLKLALTQPPALALPSLDKPFQLFVEETSGAAKGVLTQALGPWKRPVAYLSKRLDPVAAGWPRCLRAIAAAALLTREASKLTFGQDIEITSSHNLESLLRSPPDKWLTNARITQYQVLLLDPPRVRFKQTAALNPATLLPETDDTLPIHHCLDTLDSLTSTRPDLTDQPLAQAEATLFTDGSSYIRDGKRYAGAAVVTLDSVIWAEPLPIGTSAQKAELIALTKALEWSKDKSVNIYTDSRYAFATLHVHGMIYRERGWLTAGGKAIKNAPEILALLTAVWLPKRVAVMHCKGHQKDDAPTSTGNRRADEVAREVAIRPLSTQATISAGKRTADGSEFEKRTADGSEFESPKKKAKVE

SEQ ID NO: 1433 - protein, 2098 aa, synthetic construct
MPAAKRVKLDGGDKKYSIGLDIGTNSVGWAVITDEYKVPSKKFKVLGNTDRHSIKKNLIGALLFDSGETAEATRLKRTARRRYTRRKNRICYLQEIFSNEMAKVDDSFFHRLEESFLVEEDKKHERHPIFGNIVDEVAYHEKYPTIYHLRKKLVDSTDKADLRLIYLALAHMIKFRGHFLIEGDLNPDNSDVDKLFIQLVQTYNQLFEENPINASGVDAKAILSARLSKSRRLENLIAQLPGEKKNGLFGNLIALSLGLTPNFKSNFDLAEDAKLQLSKDTYDDDLDNLLAQIGDQYADLFLAAKNLSDAILLSDILRVNTEITKAPLSASMIKRYDEHHQDLTLLKALVRQQLPEKYKEIFFDQSKNGYAGYIDGGASQEEFYKFIKPILEKMDGTEELLVKLNREDLLRKQRTFDNGSIPHQIHLGELHAILRRQEDFYPFLKDNREKIEKILTFRIPYYVGPLARGNSRFAWMTRKSEETITPWNFEEVVDKGASAQSFIERMTNFDKNLPNEKVLPKHSLLYEYFTVYNELTKVKYVTEGMRKPAFLSGEQKKAIVDLLFKTNRKVTVKQLKEDYFKKIECFDSVEISGVEDRFNASLGTYHDLLKIIKDKDFLDNEENEDILEDIVLTLTLFEDREMIEERLKTYAHLFDDKVMKQLKRRRYTGWGRLSRKLINGIRDKQSGKTILDFLKSDGFANRNFMQLIHDDSLTFKEDIQKAQVSGQGDSLHEHIANLAGSPAIKKGILQTVKVVDELVKVMGRHKPENIVIEMARENQTTQKGQKNSRERMKRIEEGIKELGSQILKEHPVENTQLQNEKLYLYYLQNGRDMYVDQELDINRLSDYDVDHIVPQSFLKDDSIDNKVLTRSDKARGKSDNVPSEEVVKKMKNYWRQLLNAKLITQRKFDNLTKAERGGLSELDKAGFIKRQLVETRQITKHVAQILDSRMNTKYDENDKLIREVKVITLKSKLVSDFRKDFQFYKVREINNYHHAHDAYLNAVVGTALIKKYPKLESEFVYGDYKVYDVRKMIAKSEQEIGKATAKYFFYSNIMNFFKTEITLANGEIRKRPLIETNGETGEIVWDKGRDFATVRKVLSMPQVNIVKKTEVQTGGFSKESILPKRNSDKLIARKKDWDPKKYGGFDSPTVAYSVLVVAKVEKGKSKKLKSVKELLGITIMERSSFEKNPIDFLEAKGYKEVKKDLIIKLPKYSLFELENGRKRMLASAGELQKGNELALPSKYVNFLYLASHYEKLKGSPEDNEQKQLFVEQHKHYLDEIIEQISEFSKRVILADANLDKVLSAYNKHRDKPIREQAENIIHLFTLTNLGAPAAFKYFDTTIDRKRYTSTKEVLDATLIHQSITGLYETRIDLSQLGGDGGGGSEAAAKPAPGGTAPLEEEYRLFLEAPIQNVTLLEQWKREIPKVWAEINPPGLASTQAPIHVQLLSTALPVRVRQYPITLEAKRSLRETIRKFRAAGILRPVHSPWNTPLLPVRKSGTSEYRMVQDLREVNKRVETIHPTVPNPYTLLSLLPPDRIWYSVLDLKDAFFCIPLAPESQLIFAFEWADAEEGESGQLTWTRLPQGFKNSPTLFNEALNRDLQGFRLDHPSVSLLQYVDDLLIAADTQAACLSATRDLLMTLAELGYRVSGKKAQLCQEEVTYLGFKIHKGSRSLSNSRTQAILQIPVPKTKRQVREFLGKIGYCRLFIPGFAELAQPLYAATRPGNDPLVWGEKEEEAFQSLKLALTQPPALALPSLDKPFQLFVEETSGAAKGVLTQALGPWKRPVAYLSKRLDPVAAGWPRCLRAIAAAALLTREASKLTFGQDIEITSSHNLESLLRSPPDKWLTNARITQYQVLLLDPPRVRFKQTAALNPATLLPETDDTLPIHHCLDTLDSLTSTRPDLTDQPLAQAEATLFTDGSSYIRDGKRYAGAAVVTLDSVIWAEPLPIGTSAQKAELIALTKALEWSKDKSVNIYTDSRYAFATLHVHGMIYRERGWLTAGGKAIKNAPEILALLTAVWLPKRVAVMHCKGHQKDDAPTSTGNRRADEVAREVAIRPLSTQATISAGKRTADGSEFEKRTADGSEFESPKKKAKVE

SEQ ID NO: 1434 - protein, 2093 aa, synthetic construct
MPAAKRVKLDGGDKKYSIGLDIGTNSVGWAVITDEYKVPSKKFKVLGNTDRHSIKKNLIGALLFDSGETAEATRLKRTARRRYTRRKNRICYLQEIFSNEMAKVDDSFFHRLEESFLVEEDKKHERHPIFGNIVDEVAYHEKYPTIYHLRKKLVDSTDKADLRLIYLALAHMIKFRGHFLIEGDLNPDNSDVDKLFIQLVQTYNQLFEENPINASGVDAKAILSARLSKSRRLENLIAQLPGEKKNGLFGNLIALSLGLTPNFKSNFDLAEDAKLQLSKDTYDDDLDNLLAQIGDQYADLFLAAKNLSDAILLSDILRVNTEITKAPLSASMIKRYDEHHQDLTLLKALVRQQLPEKYKEIFFDQSKNGYAGYIDGGASQEEFYKFIKPILEKMDGTEELLVKLNREDLLRKQRTFDNGSIPHQIHLGELHAILRRQEDFYPFLKDNREKIEKILTFRIPYYVGPLARGNSRFAWMTRKSEETITPWNFEEVVDKGASAQSFIERMTNFDKNLPNEKVLPKHSLLYEYFTVYNELTKVKYVTEGMRKPAFLSGEQKKAIVDLLFKTNRKVTVKQLKEDYFKKIECFDSVEISGVEDRFNASLGTYHDLLKIIKDKDFLDNEENEDILEDIVLTLTLFEDREMIEERLKTYAHLFDDKVMKQLKRRRYTGWGRLSRKLINGIRDKQSGKTILDFLKSDGFANRNFMQLIHDDSLTFKEDIQKAQVSGQGDSLHEHIANLAGSPAIKKGILQTVKVVDELVKVMGRHKPENIVIEMARENQTTQKGQKNSRERMKRIEEGIKELGSQILKEHPVENTQLQNEKLYLYYLQNGRDMYVDQELDINRLSDYDVDHIVPQSFLKDDSIDNKVLTRSDKARGKSDNVPSEEVVKKMKNYWRQLLNAKLITQRKFDNLTKAERGGLSELDKAGFIKRQLVETRQITKHVAQILDSRMNTKYDENDKLIREVKVITLKSKLVSDFRKDFQFYKVREINNYHHAHDAYLNAVVGTALIKKYPKLESEFVYGDYKVYDVRKMIAKSEQEIGKATAKYFFYSNIMNFFKTEITLANGEIRKRPLIETNGETGEIVWDKGRDFATVRKVLSMPQVNIVKKTEVQTGGFSKESILPKRNSDKLIARKKDWDPKKYGGFDSPTVAYSVLVVAKVEKGKSKKLKSVKELLGITIMERSSFEKNPIDFLEAKGYKEVKKDLIIKLPKYSLFELENGRKRMLASAGELQKGNELALPSKYVNFLYLASHYEKLKGSPEDNEQKQLFVEQHKHYLDEIIEQISEFSKRVILADANLDKVLSAYNKHRDKPIREQAENIIHLFTLTNLGAPAAFKYFDTTIDRKRYTSTKEVLDATLIHQSITGLYETRIDLSQLGGDGGGGSGGSGGTAPLEEEYRLFLEAPIQNVTLLEQWKREIPKVWAEINPPGLASTQAPIHVQLLSTALPVRVRQYPITLEAKRSLRETIRKFRAAGILRPVHSPWNTPLLPVRKSGTSEYRMVQDLREVNKRVETIHPTVPNPYTLLSLLPPDRIWYSVLDLKDAFFCIPLAPESQLIFAFEWADAEEGESGQLTWTRLPQGFKNSPTLFNEALNRDLQGFRLDHPSVSLLQYVDDLLIAADTQAACLSATRDLLMTLAELGYRVSGKKAQLCQEEVTYLGFKIHKGSRSLSNSRTQAILQIPVPKTKRQVREFLGKIGYCRLFIPGFAELAQPLYAATRPGNDPLVWGEKEEEAFQSLKLALTQPPALALPSLDKPFQLFVEETSGAAKGVLTQALGPWKRPVAYLSKRLDPVAAGWPRCLRAIAAAALLTREASKLTFGQDIEITSSHNLESLLRSPPDKWLTNARITQYQVLLLDPPRVRFKQTAALNPATLLPETDDTLPIHHCLDTLDSLTSTRPDLTDQPLAQAEATLFTDGSSYIRDGKRYAGAAVVTLDSVIWAEPLPIGTSAQKAELIALTKALEWSKDKSVNIYTDSRYAFATLHVHGMIYRERGWLTAGGKAIKNAPEILALLTAVWLPKRVAVMHCKGHQKDDAPTSTGNRRADEVAREVAIRPLSTQATISAGKRTADGSEFEKRTADGSEFESPKKKAKVE

SEQ ID NO: 1435 - protein, 2091 aa, synthetic construct
MPAAKRVKLDGGDKKYSIGLDIGTNSVGWAVITDEYKVPSKKFKVLGNTDRHSIKKNLIGALLFDSGETAEATRLKRTARRRYTRRKNRICYLQEIFSNEMAKVDDSFFHRLEESFLVEEDKKHERHPIFGNIVDEVAYHEKYPTIYHLRKKLVDSTDKADLRLIYLALAHMIKFRGHFLIEGDLNPDNSDVDKLFIQLVQTYNQLFEENPINASGVDAKAILSARLSKSRRLENLIAQLPGEKKNGLFGNLIALSLGLTPNFKSNFDLAEDAKLQLSKDTYDDDLDNLLAQIGDQYADLFLAAKNLSDAILLSDILRVNTEITKAPLSASMIKRYDEHHQDLTLLKALVRQQLPEKYKEIFFDQSKNGYAGYIDGGASQEEFYKFIKPILEKMDGTEELLVKLNREDLLRKQRTFDNGSIPHQIHLGELHAILRRQEDFYPFLKDNREKIEKILTFRIPYYVGPLARGNSRFAWMTRKSEETITPWNFEEVVDKGASAQSFIERMTNFDKNLPNEKVLPKHSLLYEYFTVYNELTKVKYVTEGMRKPAFLSGEQKKAIVDLLFKTNRKVTVKQLKEDYFKKIECFDSVEISGVEDRFNASLGTYHDLLKIIKDKDFLDNEENEDILEDIVLTLTLFEDREMIEERLKTYAHLFDDKVMKQLKRRRYTGWGRLSRKLINGIRDKQSGKTILDFLKSDGFANRNFMQLIHDDSLTFKEDIQKAQVSGQGDSLHEHIANLAGSPAIKKGILQTVKVVDELVKVMGRHKPENIVIEMARENQTTQKGQKNSRERMKRIEEGIKELGSQILKEHPVENTQLQNEKLYLYYLQNGRDMYVDQELDINRLSDYDVDHIVPQSFLKDDSIDNKVLTRSDKARGKSDNVPSEEVVKKMKNYWRQLLNAKLITQRKFDNLTKAERGGLSELDKAGFIKRQLVETRQITKHVAQILDSRMNTKYDENDKLIREVKVITLKSKLVSDFRKDFQFYKVREINNYHHAHDAYLNAVVGTALIKKYPKLESEFVYGDYKVYDVRKMIAKSEQEIGKATAKYFFYSNIMNFFKTEITLANGEIRKRPLIETNGETGEIVWDKGRDFATVRKVLSMPQVNIVKKTEVQTGGFSKESILPKRNSDKLIARKKDWDPKKYGGFDSPTVAYSVLVVAKVEKGKSKKLKSVKELLGITIMERSSFEKNPIDFLEAKGYKEVKKDLIIKLPKYSLFELENGRKRMLASAGELQKGNELALPSKYVNFLYLASHYEKLKGSPEDNEQKQLFVEQHKHYLDEIIEQISEFSKRVILADANLDKVLSAYNKHRDKPIREQAENIIHLFTLTNLGAPAAFKYFDTTIDRKRYTSTKEVLDATLIHQSITGLYETRIDLSQLGGDGGGGGGGGTAPLEEEYRLFLEAPIQNVTLLEQWKREIPKVWAEINPPGLASTQAPIHVQLLSTALPVRVRQYPITLEAKRSLRETIRKFRAAGILRPVHSPWNTPLLPVRKSGTSEYRMVQDLREVNKRVETIHPTVPNPYTLLSLLPPDRIWYSVLDLKDAFFCIPLAPESQLIFAFEWADAEEGESGQLTWTRLPQGFKNSPTLFNEALNRDLQGFRLDHPSVSLLQYVDDLLIAADTQAACLSATRDLLMTLAELGYRVSGKKAQLCQEEVTYLGFKIHKGSRSLSNSRTQAILQIPVPKTKRQVREFLGKIGYCRLFIPGFAELAQPLYAATRPGNDPLVWGEKEEEAFQSLKLALTQPPALALPSLDKPFQLFVEETSGAAKGVLTQALGPWKRPVAYLSKRLDPVAAGWPRCLRAIAAAALLTREASKLTFGQDIEITSSHNLESLLRSPPDKWLTNARITQYQVLLLDPPRVRFKQTAALNPATLLPETDDTLPIHHCLDTLDSLTSTRPDLTDQPLAQAEATLFTDGSSYIRDGKRYAGAAVVTLDSVIWAEPLPIGTSAQKAELIALTKALEWSKDKSVNIYTDSRYAFATLHVHGMIYRERGWLTAGGKAIKNAPEILALLTAVWLPKRVAVMHCKGHQKDDAPTSTGNRRADEVAREVAIRPLSTQATISAGKRTADGSEFEKRTADGSEFESPKKKAKVE

SEQ ID NO: 1436 - protein, 2096 aa, synthetic construct
MPAAKRVKLDGGDKKYSIGLDIGTNSVGWAVITDEYKVPSKKFKVLGNTDRHSIKKNLIGALLFDSGETAEATRLKRTARRRYTRRKNRICYLQEIFSNEMAKVDDSFFHRLEESFLVEEDKKHERHPIFGNIVDEVAYHEKYPTIYHLRKKLVDSTDKADLRLIYLALAHMIKFRGHFLIEGDLNPDNSDVDKLFIQLVQTYNQLFEENPINASGVDAKAILSARLSKSRRLENLIAQLPGEKKNGLFGNLIALSLGLTPNFKSNFDLAEDAKLQLSKDTYDDDLDNLLAQIGDQYADLFLAAKNLSDAILLSDILRVNTEITKAPLSASMIKRYDEHHQDLTLLKALVRQQLPEKYKEIFFDQSKNGYAGYIDGGASQEEFYKFIKPILEKMDGTEELLVKLNREDLLRKQRTFDNGSIPHQIHLGELHAILRRQEDFYPFLKDNREKIEKILTFRIPYYVGPLARGNSRFAWMTRKSEETITPWNFEEVVDKGASAQSFIERMTNFDKNLPNEKVLPKHSLLYEYFTVYNELTKVKYVTEGMRKPAFLSGEQKKAIVDLLFKTNRKVTVKQLKEDYFKKIECFDSVEISGVEDRFNASLGTYHDLLKIIKDKDFLDNEENEDILEDIVLTLTLFEDREMIEERLKTYAHLFDDKVMKQLKRRRYTGWGRLSRKLINGIRDKQSGKTILDFLKSDGFANRNFMQLIHDDSLTFKEDIQKAQVSGQGDSLHEHIANLAGSPAIKKGILQTVKVVDELVKVMGRHKPENIVIEMARENQTTQKGQKNSRERMKRIEEGIKELGSQILKEHPVENTQLQNEKLYLYYLQNGRDMYVDQELDINRLSDYDVDHIVPQSFLKDDSIDNKVLTRSDKARGKSDNVPSEEVVKKMKNYWRQLLNAKLITQRKFDNLTKAERGGLSELDKAGFIKRQLVETRQITKHVAQILDSRMNTKYDENDKLIREVKVITLKSKLVSDFRKDFQFYKVREINNYHHAHDAYLNAVVGTALIKKYPKLESEFVYGDYKVYDVRKMIAKSEQEIGKATAKYFFYSNIMNFFKTEITLANGEIRKRPLIETNGETGEIVWDKGRDFATVRKVLSMPQVNIVKKTEVQTGGFSKESILPKRNSDKLIARKKDWDPKKYGGFDSPTVAYSVLVVAKVEKGKSKKLKSVKELLGITIMERSSFEKNPIDFLEAKGYKEVKKDLIIKLPKYSLFELENGRKRMLASAGELQKGNELALPSKYVNFLYLASHYEKLKGSPEDNEQKQLFVEQHKHYLDEIIEQISEFSKRVILADANLDKVLSAYNKHRDKPIREQAENIIHLFTLTNLGAPAAFKYFDTTIDRKRYTSTKEVLDATLIHQSITGLYETRIDLSQLGGDGGPAPGGGGGSGGTAPLEEEYRLFLEAPIQNVTLLEQWKREIPKVWAEINPPGLASTQAPIHVQLLSTALPVRVRQYPITLEAKRSLRETIRKFRAAGILRPVHSPWNTPLLPVRKSGTSEYRMVQDLREVNKRVETIHPTVPNPYTLLSLLPPDRIWYSVLDLKDAFFCIPLAPESQLIFAFEWADAEEGESGQLTWTRLPQGFKNSPTLFNEALNRDLQGFRLDHPSVSLLQYVDDLLIAADTQAACLSATRDLLMTLAELGYRVSGKKAQLCQEEVTYLGFKIHKGSRSLSNSRTQAILQIPVPKTKRQVREFLGKIGYCRLFIPGFAELAQPLYAATRPGNDPLVWGEKEEEAFQSLKLALTQPPALALPSLDKPFQLFVEETSGAAKGVLTQALGPWKRPVAYLSKRLDPVAAGWPRCLRAIAAAALLTREASKLTFGQDIEITSSHNLESLLRSPPDKWLTNARITQYQVLLLDPPRVRFKQTAALNPATLLPETDDTLPIHHCLDTLDSLTSTRPDLTDQPLAQAEATLFTDGSSYIRDGKRYAGAAVVTLDSVIWAEPLPIGTSAQKAELIALTKALEWSKDKSVNIYTDSRYAFATLHVHGMIYRERGWLTAGGKAIKNAPEILALLTAVWLPKRVAVMHCKGHQKDDAPTSTGNRRADEVAREVAIRPLSTQATISAGKRTADGSEFEKRTADGSEFESPKKKAKVE

SEQ ID NO: 1437 - protein, 2096 aa, synthetic construct
MPAAKRVKLDGGDKKYSIGLDIGTNSVGWAVITDEYKVPSKKFKVLGNTDRHSIKKNLIGALLFDSGETAEATRLKRTARRRYTRRKNRICYLQEIFSNEMAKVDDSFFHRLEESFLVEEDKKHERHPIFGNIVDEVAYHEKYPTIYHLRKKLVDSTDKADLRLIYLALAHMIKFRGHFLIEGDLNPDNSDVDKLFIQLVQTYNQLFEENPINASGVDAKAILSARLSKSRRLENLIAQLPGEKKNGLFGNLIALSLGLTPNFKSNFDLAEDAKLQLSKDTYDDDLDNLLAQIGDQYADLFLAAKNLSDAILLSDILRVNTEITKAPLSASMIKRYDEHHQDLTLLKALVRQQLPEKYKEIFFDQSKNGYAGYIDGGASQEEFYKFIKPILEKMDGTEELLVKLNREDLLRKQRTFDNGSIPHQIHLGELHAILRRQEDFYPFLKDNREKIEKILTFRIPYYVGPLARGNSRFAWMTRKSEETITPWNFEEVVDKGASAQSFIERMTNFDKNLPNEKVLPKHSLLYEYFTVYNELTKVKYVTEGMRKPAFLSGEQKKAIVDLLFKTNRKVTVKQLKEDYFKKIECFDSVEISGVEDRFNASLGTYHDLLKIIKDKDFLDNEENEDILEDIVLTLTLFEDREMIEERLKTYAHLFDDKVMKQLKRRRYTGWGRLSRKLINGIRDKQSGKTILDFLKSDGFANRNFMQLIHDDSLTFKEDIQKAQVSGQGDSLHEHIANLAGSPAIKKGILQTVKVVDELVKVMGRHKPENIVIEMARENQTTQKGQKNSRERMKRIEEGIKELGSQILKEHPVENTQLQNEKLYLYYLQNGRDMYVDQELDINRLSDYDVDHIVPQSFLKDDSIDNKVLTRSDKARGKSDNVPSEEVVKKMKNYWRQLLNAKLITQRKFDNLTKAERGGLSELDKAGFIKRQLVETRQITKHVAQILDSRMNTKYDENDKLIREVKVITLKSKLVSDFRKDFQFYKVREINNYHHAHDAYLNAVVGTALIKKYPKLESEFVYGDYKVYDVRKMIAKSEQEIGKATAKYFFYSNIMNFFKTEITLANGEIRKRPLIETNGETGEIVWDKGRDFATVRKVLSMPQVNIVKKTEVQTGGFSKESILPKRNSDKLIARKKDWDPKKYGGFDSPTVAYSVLVVAKVEKGKSKKLKSVKELLGITIMERSSFEKNPIDFLEAKGYKEVKKDLIIKLPKYSLFELENGRKRMLASAGELQKGNELALPSKYVNFLYLASHYEKLKGSPEDNEQKQLFVEQHKHYLDEIIEQISEFSKRVILADANLDKVLSAYNKHRDKPIREQAENIIHLFTLTNLGAPAAFKYFDTTIDRKRYTSTKEVLDATLIHQSITGLYETRIDLSQLGGDGGGSSGGSGGGGGTAPLEEEYRLFLEAPIQNVTLLEQWKREIPKVWAEINPPGLASTQAPIHVQLLSTALPVRVRQYPITLEAKRSLRETIRKFRAAGILRPVHSPWNTPLLPVRKSGTSEYRMVQDLREVNKRVETIHPTVPNPYTLLSLLPPDRIWYSVLDLKDAFFCIPLAPESQLIFAFEWADAEEGESGQLTWTRLPQGFKNSPTLFNEALNRDLQGFRLDHPSVSLLQYVDDLLIAADTQAACLSATRDLLMTLAELGYRVSGKKAQLCQEEVTYLGFKIHKGSRSLSNSRTQAILQIPVPKTKRQVREFLGKIGYCRLFIPGFAELAQPLYAATRPGNDPLVWGEKEEEAFQSLKLALTQPPALALPSLDKPFQLFVEETSGAAKGVLTQALGPWKRPVAYLSKRLDPVAAGWPRCLRAIAAAALLTREASKLTFGQDIEITSSHNLESLLRSPPDKWLTNARITQYQVLLLDPPRVRFKQTAALNPATLLPETDDTLPIHHCLDTLDSLTSTRPDLTDQPLAQAEATLFTDGSSYIRDGKRYAGAAVVTLDSVIWAEPLPIGTSAQKAELIALTKALEWSKDKSVNIYTDSRYAFATLHVHGMIYRERGWLTAGGKAIKNAPEILALLTAVWLPKRVAVMHCKGHQKDDAPTSTGNRRADEVAREVAIRPLSTQATISAGKRTADGSEFEKRTADGSEFESPKKKAKVE

SEQ ID NO: 1438 - protein, 2092 aa, synthetic construct
MPAAKRVKLDGGDKKYSIGLDIGTNSVGWAVITDEYKVPSKKFKVLGNTDRHSIKKNLIGALLFDSGETAEATRLKRTARRRYTRRKNRICYLQEIFSNEMAKVDDSFFHRLEESFLVEEDKKHERHPIFGNIVDEVAYHEKYPTIYHLRKKLVDSTDKADLRLIYLALAHMIKFRGHFLIEGDLNPDNSDVDKLFIQLVQTYNQLFEENPINASGVDAKAILSARLSKSRRLENLIAQLPGEKKNGLFGNLIALSLGLTPNFKSNFDLAEDAKLQLSKDTYDDDLDNLLAQIGDQYADLFLAAKNLSDAILLSDILRVNTEITKAPLSASMIKRYDEHHQDLTLLKALVRQQLPEKYKEIFFDQSKNGYAGYIDGGASQEEFYKFIKPILEKMDGTEELLVKLNREDLLRKQRTFDNGSIPHQIHLGELHAILRRQEDFYPFLKDNREKIEKILTFRIPYYVGPLARGNSRFAWMTRKSEETITPWNFEEVVDKGASAQSFIERMTNFDKNLPNEKVLPKHSLLYEYFTVYNELTKVKYVTEGMRKPAFLSGEQKKAIVDLLFKTNRKVTVKQLKEDYFKKIECFDSVEISGVEDRFNASLGTYHDLLKIIKDKDFLDNEENEDILEDIVLTLTLFEDREMIEERLKTYAHLFDDKVMKQLKRRRYTGWGRLSRKLINGIRDKQSGKTILDFLKSDGFANRNFMQLIHDDSLTFKEDIQKAQVSGQGDSLHEHIANLAGSPAIKKGILQTVKVVDELVKVMGRHKPENIVIEMARENQTTQKGQKNSRERMKRIEEGIKELGSQILKEHPVENTQLQNEKLYLYYLQNGRDMYVDQELDINRLSDYDVDHIVPQSFLKDDSIDNKVLTRSDKARGKSDNVPSEEVVKKMKNYWRQLLNAKLITQRKFDNLTKAERGGLSELDKAGFIKRQLVETRQITKHVAQILDSRMNTKYDENDKLIREVKVITLKSKLVSDFRKDFQFYKVREINNYHHAHDAYLNAVVGTALIKKYPKLESEFVYGDYKVYDVRKMIAKSEQEIGKATAKYFFYSNIMNFFKTEITLANGEIRKRPLIETNGETGEIVWDKGRDFATVRKVLSMPQVNIVKKTEVQTGGFSKESILPKRNSDKLIARKKDWDPKKYGGFDSPTVAYSVLVVAKVEKGKSKKLKSVKELLGITIMERSSFEKNPIDFLEAKGYKEVKKDLIIKLPKYSLFELENGRKRMLASAGELQKGNELALPSKYVNFLYLASHYEKLKGSPEDNEQKQLFVEQHKHYLDEIIEQISEFSKRVILADANLDKVLSAYNKHRDKPIREQAENIIHLFTLTNLGAPAAFKYFDTTIDRKRYTSTKEVLDATLIHQSITGLYETRIDLSQLGGDGGGGGGGGGTAPLEEEYRLFLEAPIQNVTLLEQWKREIPKVWAEINPPGLASTQAPIHVQLLSTALPVRVRQYPITLEAKRSLRETIRKFRAAGILRPVHSPWNTPLLPVRKSGTSEYRMVQDLREVNKRVETIHPTVPNPYTLLSLLPPDRIWYSVLDLKDAFFCIPLAPESQLIFAFEWADAEEGESGQLTWTRLPQGFKNSPTLFNEALNRDLQGFRLDHPSVSLLQYVDDLLIAADTQAACLSATRDLLMTLAELGYRVSGKKAQLCQEEVTYLGFKIHKGSRSLSNSRTQAILQIPVPKTKRQVREFLGKIGYCRLFIPGFAELAQPLYAATRPGNDPLVWGEKEEEAFQSLKLALTQPPALALPSLDKPFQLFVEETSGAAKGVLTQALGPWKRPVAYLSKRLDPVAAGWPRCLRAIAAAALLTREASKLTFGQDIEITSSHNLESLLRSPPDKWLTNARITQYQVLLLDPPRVRFKQTAALNPATLLPETDDTLPIHHCLDTLDSLTSTRPDLTDQPLAQAEATLFTDGSSYIRDGKRYAGAAVVTLDSVIWAEPLPIGTSAQKAELIALTKALEWSKDKSVNIYTDSRYAFATLHVHGMIYRERGWLTAGGKAIKNAPEILALLTAVWLPKRVAVMHCKGHQKDDAPTSTGNRRADEVAREVAIRPLSTQATISAGKRTADGSEFEKRTADGSEFESPKKKAKVE

SEQ ID NO: 1439 - protein, 2098 aa, synthetic construct
MPAAKRVKLDGGDKKYSIGLDIGTNSVGWAVITDEYKVPSKKFKVLGNTDRHSIKKNLIGALLFDSGETAEATRLKRTARRRYTRRKNRICYLQEIFSNEMAKVDDSFFHRLEESFLVEEDKKHERHPIFGNIVDEVAYHEKYPTIYHLRKKLVDSTDKADLRLIYLALAHMIKFRGHFLIEGDLNPDNSDVDKLFIQLVQTYNQLFEENPINASGVDAKAILSARLSKSRRLENLIAQLPGEKKNGLFGNLIALSLGLTPNFKSNFDLAEDAKLQLSKDTYDDDLDNLLAQIGDQYADLFLAAKNLSDAILLSDILRVNTEITKAPLSASMIKRYDEHHQDLTLLKALVRQQLPEKYKEIFFDQSKNGYAGYIDGGASQEEFYKFIKPILEKMDGTEELLVKLNREDLLRKQRTFDNGSIPHQIHLGELHAILRRQEDFYPFLKDNREKIEKILTFRIPYYVGPLARGNSRFAWMTRKSEETITPWNFEEVVDKGASAQSFIERMTNFDKNLPNEKVLPKHSLLYEYFTVYNELTKVKYVTEGMRKPAFLSGEQKKAIVDLLFKTNRKVTVKQLKEDYFKKIECFDSVEISGVEDRFNASLGTYHDLLKIIKDKDFLDNEENEDILEDIVLTLTLFEDREMIEERLKTYAHLFDDKVMKQLKRRRYTGWGRLSRKLINGIRDKQSGKTILDFLKSDGFANRNFMQLIHDDSLTFKEDIQKAQVSGQGDSLHEHIANLAGSPAIKKGILQTVKVVDELVKVMGRHKPENIVIEMARENQTTQKGQKNSRERMKRIEEGIKELGSQILKEHPVENTQLQNEKLYLYYLQNGRDMYVDQELDINRLSDYDVDHIVPQSFLKDDSIDNKVLTRSDKARGKSDNVPSEEVVKKMKNYWRQLLNAKLITQRKFDNLTKAERGGLSELDKAGFIKRQLVETRQITKHVAQILDSRMNTKYDENDKLIREVKVITLKSKLVSDFRKDFQFYKVREINNYHHAHDAYLNAVVGTALIKKYPKLESEFVYGDYKVYDVRKMIAKSEQEIGKATAKYFFYSNIMNFFKTEITLANGEIRKRPLIETNGETGEIVWDKGRDFATVRKVLSMPQVNIVKKTEVQTGGFSKESILPKRNSDKLIARKKDWDPKKYGGFDSPTVAYSVLVVAKVEKGKSKKLKSVKELLGITIMERSSFEKNPIDFLEAKGYKEVKKDLIIKLPKYSLFELENGRKRMLASAGELQKGNELALPSKYVNFLYLASHYEKLKGSPEDNEQKQLFVEQHKHYLDEIIEQISEFSKRVILADANLDKVLSAYNKHRDKPIREQAENIIHLFTLTNLGAPAAFKYFDTTIDRKRYTSTKEVLDATLIHQSITGLYETRIDLSQLGGDGGEAAAKPAPGGSGGTAPLEEEYRLFLEAPIQNVTLLEQWKREIPKVWAEINPPGLASTQAPIHVQLLSTALPVRVRQYPITLEAKRSLRETIRKFRAAGILRPVHSPWNTPLLPVRKSGTSEYRMVQDLREVNKRVETIHPTVPNPYTLLSLLPPDRIWYSVLDLKDAFFCIPLAPESQLIFAFEWADAEEGESGQLTWTRLPQGFKNSPTLFNEALNRDLQGFRLDHPSVSLLQYVDDLLIAADTQAACLSATRDLLMTLAELGYRVSGKKAQLCQEEVTYLGFKIHKGSRSLSNSRTQAILQIPVPKTKRQVREFLGKIGYCRLFIPGFAELAQPLYAATRPGNDPLVWGEKEEEAFQSLKLALTQPPALALPSLDKPFQLFVEETSGAAKGVLTQALGPWKRPVAYLSKRLDPVAAGWPRCLRAIAAAALLTREASKLTFGQDIEITSSHNLESLLRSPPDKWLTNARITQYQVLLLDPPRVRFKQTAALNPATLLPETDDTLPIHHCLDTLDSLTSTRPDLTDQPLAQAEATLFTDGSSYIRDGKRYAGAAVVTLDSVIWAEPLPIGTSAQKAELIALTKALEWSKDKSVNIYTDSRYAFATLHVHGMIYRERGWLTAGGKAIKNAPEILALLTAVWLPKRVAVMHCKGHQKDDAPTSTGNRRADEVAREVAIRPLSTQATISAGKRTADGSEFEKRTADGSEFESPKKKAKVE

SEQ ID NO: 1440 - protein, 2094 aa, synthetic construct
MPAAKRVKLDGGDKKYSIGLDIGTNSVGWAVITDEYKVPSKKFKVLGNTDRHSIKKNLIGALLFDSGETAEATRLKRTARRRYTRRKNRICYLQEIFSNEMAKVDDSFFHRLEESFLVEEDKKHERHPIFGNIVDEVAYHEKYPTIYHLRKKLVDSTDKADLRLIYLALAHMIKFRGHFLIEGDLNPDNSDVDKLFIQLVQTYNQLFEENPINASGVDAKAILSARLSKSRRLENLIAQLPGEKKNGLFGNLIALSLGLTPNFKSNFDLAEDAKLQLSKDTYDDDLDNLLAQIGDQYADLFLAAKNLSDAILLSDILRVNTEITKAPLSASMIKRYDEHHQDLTLLKALVRQQLPEKYKEIFFDQSKNGYAGYIDGGASQEEFYKFIKPILEKMDGTEELLVKLNREDLLRKQRTFDNGSIPHQIHLGELHAILRRQEDFYPFLKDNREKIEKILTFRIPYYVGPLARGNSRFAWMTRKSEETITPWNFEEVVDKGASAQSFIERMTNFDKNLPNEKVLPKHSLLYEYFTVYNELTKVKYVTEGMRKPAFLSGEQKKAIVDLLFKTNRKVTVKQLKEDYFKKIECFDSVEISGVEDRFNASLGTYHDLLKIIKDKDFLDNEENEDILEDIVLTLTLFEDREMIEERLKTYAHLFDDKVMKQLKRRRYTGWGRLSRKLINGIRDKQSGKTILDFLKSDGFANRNFMQLIHDDSLTFKEDIQKAQVSGQGDSLHEHIANLAGSPAIKKGILQTVKVVDELVKVMGRHKPENIVIEMARENQTTQKGQKNSRERMKRIEEGIKELGSQILKEHPVENTQLQNEKLYLYYLQNGRDMYVDQELDINRLSDYDVDHIVPQSFLKDDSIDNKVLTRSDKARGKSDNVPSEEVVKKMKNYWRQLLNAKLITQRKFDNLTKAERGGLSELDKAGFIKRQLVETRQITKHVAQILDSRMNTKYDENDKLIREVKVITLKSKLVSDFRKDFQFYKVREINNYHHAHDAYLNAVVGTALIKKYPKLESEFVYGDYKVYDVRKMIAKSEQEIGKATAKYFFYSNIMNFFKTEITLANGEIRKRPLIETNGETGEIVWDKGRDFATVRKVLSMPQVNIVKKTEVQTGGFSKESILPKRNSDKLIARKKDWDPKKYGGFDSPTVAYSVLVVAKVEKGKSKKLKSVKELLGITIMERSSFEKNPIDFLEAKGYKEVKKDLIIKLPKYSLFELENGRKRMLASAGELQKGNELALPSKYVNFLYLASHYEKLKGSPEDNEQKQLFVEQHKHYLDEIIEQISEFSKRVILADANLDKVLSAYNKHRDKPIREQAENIIHLFTLTNLGAPAAFKYFDTTIDRKRYTSTKEVLDATLIHQSITGLYETRIDLSQLGGDGGPAPAPAPGGTAPLEEEYRLFLEAPIQNVTLLEQWKREIPKVWAEINPPGLASTQAPIHVQLLSTALPVRVRQYPITLEAKRSLRETIRKFRAAGILRPVHSPWNTPLLPVRKSGTSEYRMVQDLREVNKRVETIHPTVPNPYTLLSLLPPDRIWYSVLDLKDAFFCIPLAPESQLIFAFEWADAEEGESGQLTWTRLPQGFKNSPTLFNEALNRDLQGFRLDHPSVSLLQYVDDLLIAADTQAACLSATRDLLMTLAELGYRVSGKKAQLCQEEVTYLGFKIHKGSRSLSNSRTQAILQIPVPKTKRQVREFLGKIGYCRLFIPGFAELAQPLYAATRPGNDPLVWGEKEEEAFQSLKLALTQPPALALPSLDKPFQLFVEETSGAAKGVLTQALGPWKRPVAYLSKRLDPVAAGWPRCLRAIAAAALLTREASKLTFGQDIEITSSHNLESLLRSPPDKWLTNARITQYQVLLLDPPRVRFKQTAALNPATLLPETDDTLPIHHCLDTLDSLTSTRPDLTDQPLAQAEATLFTDGSSYIRDGKRYAGAAVVTLDSVIWAEPLPIGTSAQKAELIALTKALEWSKDKSVNIYTDSRYAFATLHVHGMIYRERGWLTAGGKAIKNAPEILALLTAVWLPKRVAVMHCKGHQKDDAPTSTGNRRADEVAREVAIRPLSTQATISAGKRTADGSEFEKRTADGSEFESPKKKAKVE

SEQ ID NO: 1441 - protein, 2098 aa, synthetic construct
MPAAKRVKLDGGDKKYSIGLDIGTNSVGWAVITDEYKVPSKKFKVLGNTDRHSIKKNLIGALLFDSGETAEATRLKRTARRRYTRRKNRICYLQEIFSNEMAKVDDSFFHRLEESFLVEEDKKHERHPIFGNIVDEVAYHEKYPTIYHLRKKLVDSTDKADLRLIYLALAHMIKFRGHFLIEGDLNPDNSDVDKLFIQLVQTYNQLFEENPINASGVDAKAILSARLSKSRRLENLIAQLPGEKKNGLFGNLIALSLGLTPNFKSNFDLAEDAKLQLSKDTYDDDLDNLLAQIGDQYADLFLAAKNLSDAILLSDILRVNTEITKAPLSASMIKRYDEHHQDLTLLKALVRQQLPEKYKEIFFDQSKNGYAGYIDGGASQEEFYKFIKPILEKMDGTEELLVKLNREDLLRKQRTFDNGSIPHQIHLGELHAILRRQEDFYPFLKDNREKIEKILTFRIPYYVGPLARGNSRFAWMTRKSEETITPWNFEEVVDKGASAQSFIERMTNFDKNLPNEKVLPKHSLLYEYFTVYNELTKVKYVTEGMRKPAFLSGEQKKAIVDLLFKTNRKVTVKQLKEDYFKKIECFDSVEISGVEDRFNASLGTYHDLLKIIKDKDFLDNEENEDILEDIVLTLTLFEDREMIEERLKTYAHLFDDKVMKQLKRRRYTGWGRLSRKLINGIRDKQSGKTILDFLKSDGFANRNFMQLIHDDSLTFKEDIQKAQVSGQGDSLHEHIANLAGSPAIKKGILQTVKVVDELVKVMGRHKPENIVIEMARENQTTQKGQKNSRERMKRIEEGIKELGSQILKEHPVENTQLQNEKLYLYYLQNGRDMYVDQELDINRLSDYDVDHIVPQSFLKDDSIDNKVLTRSDKARGKSDNVPSEEVVKKMKNYWRQLLNAKLITQRKFDNLTKAERGGLSELDKAGFIKRQLVETRQITKHVAQILDSRMNTKYDENDKLIREVKVITLKSKLVSDFRKDFQFYKVREINNYHHAHDAYLNAVVGTALIKKYPKLESEFVYGDYKVYDVRKMIAKSEQEIGKATAKYFFYSNIMNFFKTEITLANGEIRKRPLIETNGETGEIVWDKGRDFATVRKVLSMPQVNIVKKTEVQTGGFSKESILPKRNSDKLIARKKDWDPKKYGGFDSPTVAYSVLVVAKVEKGKSKKLKSVKELLGITIMERSSFEKNPIDFLEAKGYKEVKKDLIIKLPKYSLFELENGRKRMLASAGELQKGNELALPSKYVNFLYLASHYEKLKGSPEDNEQKQLFVEQHKHYLDEIIEQISEFSKRVILADANLDKVLSAYNKHRDKPIREQAENIIHLFTLTNLGAPAAFKYFDTTIDRKRYTSTKEVLDATLIHQSITGLYETRIDLSQLGGDGGEAAAKGGSGGGGGTAPLEEEYRLFLEAPIQNVTLLEQWKREIPKVWAEINPPGLASTQAPIHVQLLSTALPVRVRQYPITLEAKRSLRETIRKFRAAGILRPVHSPWNTPLLPVRKSGTSEYRMVQDLREVNKRVETIHPTVPNPYTLLSLLPPDRIWYSVLDLKDAFFCIPLAPESQLIFAFEWADAEEGESGQLTWTRLPQGFKNSPTLFNEALNRDLQGFRLDHPSVSLLQYVDDLLIAADTQAACLSATRDLLMTLAELGYRVSGKKAQLCQEEVTYLGFKIHKGSRSLSNSRTQAILQIPVPKTKRQVREFLGKIGYCRLFIPGFAELAQPLYAATRPGNDPLVWGEKEEEAFQSLKLALTQPPALALPSLDKPFQLFVEETSGAAKGVLTQALGPWKRPVAYLSKRLDPVAAGWPRCLRAIAAAALLTREASKLTFGQDIEITSSHNLESLLRSPPDKWLTNARITQYQVLLLDPPRVRFKQTAALNPATLLPETDDTLPIHHCLDTLDSLTSTRPDLTDQPLAQAEATLFTDGSSYIRDGKRYAGAAVVTLDSVIWAEPLPIGTSAQKAELIALTKALEWSKDKSVNIYTDSRYAFATLHVHGMIYRERGWLTAGGKAIKNAPEILALLTAVWLPKRVAVMHCKGHQKDDAPTSTGNRRADEVAREVAIRPLSTQATISAGKRTADGSEFEKRTADGSEFESPKKKAKVE

SEQ ID NO: 1442 - protein, 2098 aa, synthetic construct
MPAAKRVKLDGGDKKYSIGLDIGTNSVGWAVITDEYKVPSKKFKVLGNTDRHSIKKNLIGALLFDSGETAEATRLKRTARRRYTRRKNRICYLQEIFSNEMAKVDDSFFHRLEESFLVEEDKKHERHPIFGNIVDEVAYHEKYPTIYHLRKKLVDSTDKADLRLIYLALAHMIKFRGHFLIEGDLNPDNSDVDKLFIQLVQTYNQLFEENPINASGVDAKAILSARLSKSRRLENLIAQLPGEKKNGLFGNLIALSLGLTPNFKSNFDLAEDAKLQLSKDTYDDDLDNLLAQIGDQYADLFLAAKNLSDAILLSDILRVNTEITKAPLSASMIKRYDEHHQDLTLLKALVRQQLPEKYKEIFFDQSKNGYAGYIDGGASQEEFYKFIKPILEKMDGTEELLVKLNREDLLRKQRTFDNGSIPHQIHLGELHAILRRQEDFYPFLKDNREKIEKILTFRIPYYVGPLARGNSRFAWMTRKSEETITPWNFEEVVDKGASAQSFIERMTNFDKNLPNEKVLPKHSLLYEYFTVYNELTKVKYVTEGMRKPAFLSGEQKKAIVDLLFKTNRKVTVKQLKEDYFKKIECFDSVEISGVEDRFNASLGTYHDLLKIIKDKDFLDNEENEDILEDIVLTLTLFEDREMIEERLKTYAHLFDDKVMKQLKRRRYTGWGRLSRKLINGIRDKQSGKTILDFLKSDGFANRNFMQLIHDDSLTFKEDIQKAQVSGQGDSLHEHIANLAGSPAIKKGILQTVKVVDELVKVMGRHKPENIVIEMARENQTTQKGQKNSRERMKRIEEGIKELGSQILKEHPVENTQLQNEKLYLYYLQNGRDMYVDQELDINRLSDYDVDHIVPQSFLKDDSIDNKVLTRSDKARGKSDNVPSEEVVKKMKNYWRQLLNAKLITQRKFDNLTKAERGGLSELDKAGFIKRQLVETRQITKHVAQILDSRMNTKYDENDKLIREVKVITLKSKLVSDFRKDFQFYKVREINNYHHAHDAYLNAVVGTALIKKYPKLESEFVYGDYKVYDVRKMIAKSEQEIGKATAKYFFYSNIMNFFKTEITLANGEIRKRPLIETNGETGEIVWDKGRDFATVRKVLSMPQVNIVKKTEVQTGGFSKESILPKRNSDKLIARKKDWDPKKYGGFDSPTVAYSVLVVAKVEKGKSKKLKSVKELLGITIMERSSFEKNPIDFLEAKGYKEVKKDLIIKLPKYSLFELENGRKRMLASAGELQKGNELALPSKYVNFLYLASHYEKLKGSPEDNEQKQLFVEQHKHYLDEIIEQISEFSKRVILADANLDKVLSAYNKHRDKPIREQAENIIHLFTLTNLGAPAAFKYFDTTIDRKRYTSTKEVLDATLIHQSITGLYETRIDLSQLGGDGGGGSGGGEAAAKGGTAPLEEEYRLFLEAPIQNVTLLEQWKREIPKVWAEINPPGLASTQAPIHVQLLSTALPVRVRQYPITLEAKRSLRETIRKFRAAGILRPVHSPWNTPLLPVRKSGTSEYRMVQDLREVNKRVETIHPTVPNPYTLLSLLPPDRIWYSVLDLKDAFFCIPLAPESQLIFAFEWADAEEGESGQLTWTRLPQGFKNSPTLFNEALNRDLQGFRLDHPSVSLLQYVDDLLIAADTQAACLSATRDLLMTLAELGYRVSGKKAQLCQEEVTYLGFKIHKGSRSLSNSRTQAILQIPVPKTKRQVREFLGKIGYCRLFIPGFAELAQPLYAATRPGNDPLVWGEKEEEAFQSLKLALTQPPALALPSLDKPFQLFVEETSGAAKGVLTQALGPWKRPVAYLSKRLDPVAAGWPRCLRAIAAAALLTREASKLTFGQDIEITSSHNLESLLRSPPDKWLTNARITQYQVLLLDPPRVRFKQTAALNPATLLPETDDTLPIHHCLDTLDSLTSTRPDLTDQPLAQAEATLFTDGSSYIRDGKRYAGAAVVTLDSVIWAEPLPIGTSAQKAELIALTKALEWSKDKSVNIYTDSRYAFATLHVHGMIYRERGWLTAGGKAIKNAPEILALLTAVWLPKRVAVMHCKGHQKDDAPTSTGNRRADEVAREVAIRPLSTQATISAGKRTADGSEFEKRTADGSEFESPKKKAKVE

SEQ ID NO: 1443 - protein, 2093 aa, synthetic construct
MPAAKRVKLDGGDKKYSIGLDIGTNSVGWAVITDEYKVPSKKFKVLGNTDRHSIKKNLIGALLFDSGETAEATRLKRTARRRYTRRKNRICYLQEIFSNEMAKVDDSFFHRLEESFLVEEDKKHERHPIFGNIVDEVAYHEKYPTIYHLRKKLVDSTDKADLRLIYLALAHMIKFRGHFLIEGDLNPDNSDVDKLFIQLVQTYNQLFEENPINASGVDAKAILSARLSKSRRLENLIAQLPGEKKNGLFGNLIALSLGLTPNFKSNFDLAEDAKLQLSKDTYDDDLDNLLAQIGDQYADLFLAAKNLSDAILLSDILRVNTEITKAPLSASMIKRYDEHHQDLTLLKALVRQQLPEKYKEIFFDQSKNGYAGYIDGGASQEEFYKFIKPILEKMDGTEELLVKLNREDLLRKQRTFDNGSIPHQIHLGELHAILRRQEDFYPFLKDNREKIEKILTFRIPYYVGPLARGNSRFAWMTRKSEETITPWNFEEVVDKGASAQSFIERMTNFDKNLPNEKVLPKHSLLYEYFTVYNELTKVKYVTEGMRKPAFLSGEQKKAIVDLLFKTNRKVTVKQLKEDYFKKIECFDSVEISGVEDRFNASLGTYHDLLKIIKDKDFLDNEENEDILEDIVLTLTLFEDREMIEERLKTYAHLFDDKVMKQLKRRRYTGWGRLSRKLINGIRDKQSGKTILDFLKSDGFANRNFMQLIHDDSLTFKEDIQKAQVSGQGDSLHEHIANLAGSPAIKKGILQTVKVVDELVKVMGRHKPENIVIEMARENQTTQKGQKNSRERMKRIEEGIKELGSQILKEHPVENTQLQNEKLYLYYLQNGRDMYVDQELDINRLSDYDVDHIVPQSFLKDDSIDNKVLTRSDKARGKSDNVPSEEVVKKMKNYWRQLLNAKLITQRKFDNLTKAERGGLSELDKAGFIKRQLVETRQITKHVAQILDSRMNTKYDENDKLIREVKVITLKSKLVSDFRKDFQFYKVREINNYHHAHDAYLNAVVGTALIKKYPKLESEFVYGDYKVYDVRKMIAKSEQEIGKATAKYFFYSNIMNFFKTEITLANGEIRKRPLIETNGETGEIVWDKGRDFATVRKVLSMPQVNIVKKTEVQTGGFSKESILPKRNSDKLIARKKDWDPKKYGGFDSPTVAYSVLVVAKVEKGKSKKLKSVKELLGITIMERSSFEKNPIDFLEAKGYKEVKKDLIIKLPKYSLFELENGRKRMLASAGELQKGNELALPSKYVNFLYLASHYEKLKGSPEDNEQKQLFVEQHKHYLDEIIEQISEFSKRVILADANLDKVLSAYNKHRDKPIREQAENIIHLFTLTNLGAPAAFKYFDTTIDRKRYTSTKEVLDATLIHQSITGLYETRIDLSQLGGDGGGSSGSSGGTAPLEEEYRLFLEAPIQNVTLLEQWKREIPKVWAEINPPGLASTQAPIHVQLLSTALPVRVRQYPITLEAKRSLRETIRKFRAAGILRPVHSPWNTPLLPVRKSGTSEYRMVQDLREVNKRVETIHPTVPNPYTLLSLLPPDRIWYSVLDLKDAFFCIPLAPESQLIFAFEWADAEEGESGQLTWTRLPQGFKNSPTLFNEALNRDLQGFRLDHPSVSLLQYVDDLLIAADTQAACLSATRDLLMTLAELGYRVSGKKAQLCQEEVTYLGFKIHKGSRSLSNSRTQAILQIPVPKTKRQVREFLGKIGYCRLFIPGFAELAQPLYAATRPGNDPLVWGEKEEEAFQSLKLALTQPPALALPSLDKPFQLFVEETSGAAKGVLTQALGPWKRPVAYLSKRLDPVAAGWPRCLRAIAAAALLTREASKLTFGQDIEITSSHNLESLLRSPPDKWLTNARITQYQVLLLDPPRVRFKQTAALNPATLLPETDDTLPIHHCLDTLDSLTSTRPDLTDQPLAQAEATLFTDGSSYIRDGKRYAGAAVVTLDSVIWAEPLPIGTSAQKAELIALTKALEWSKDKSVNIYTDSRYAFATLHVHGMIYRERGWLTAGGKAIKNAPEILALLTAVWLPKRVAVMHCKGHQKDDAPTSTGNRRADEVAREVAIRPLSTQATISAGKRTADGSEFEKRTADGSEFESPKKKAKVE

SEQ ID NO: 1444 - protein, 2093 aa, synthetic construct
MPAAKRVKLDGGDKKYSIGLDIGTNSVGWAVITDEYKVPSKKFKVLGNTDRHSIKKNLIGALLFDSGETAEATRLKRTARRRYTRRKNRICYLQEIFSNEMAKVDDSFFHRLEESFLVEEDKKHERHPIFGNIVDEVAYHEKYPTIYHLRKKLVDSTDKADLRLIYLALAHMIKFRGHFLIEGDLNPDNSDVDKLFIQLVQTYNQLFEENPINASGVDAKAILSARLSKSRRLENLIAQLPGEKKNGLFGNLIALSLGLTPNFKSNFDLAEDAKLQLSKDTYDDDLDNLLAQIGDQYADLFLAAKNLSDAILLSDILRVNTEITKAPLSASMIKRYDEHHQDLTLLKALVRQQLPEKYKEIFFDQSKNGYAGYIDGGASQEEFYKFIKPILEKMDGTEELLVKLNREDLLRKQRTFDNGSIPHQIHLGELHAILRRQEDFYPFLKDNREKIEKILTFRIPYYVGPLARGNSRFAWMTRKSEETITPWNFEEVVDKGASAQSFIERMTNFDKNLPNEKVLPKHSLLYEYFTVYNELTKVKYVTEGMRKPAFLSGEQKKAIVDLLFKTNRKVTVKQLKEDYFKKIECFDSVEISGVEDRFNASLGTYHDLLKIIKDKDFLDNEENEDILEDIVLTLTLFEDREMIEERLKTYAHLFDDKVMKQLKRRRYTGWGRLSRKLINGIRDKQSGKTILDFLKSDGFANRNFMQLIHDDSLTFKEDIQKAQVSGQGDSLHEHIANLAGSPAIKKGILQTVKVVDELVKVMGRHKPENIVIEMARENQTTQKGQKNSRERMKRIEEGIKELGSQILKEHPVENTQLQNEKLYLYYLQNGRDMYVDQELDINRLSDYDVDHIVPQSFLKDDSIDNKVLTRSDKARGKSDNVPSEEVVKKMKNYWRQLLNAKLITQRKFDNLTKAERGGLSELDKAGFIKRQLVETRQITKHVAQILDSRMNTKYDENDKLIREVKVITLKSKLVSDFRKDFQFYKVREINNYHHAHDAYLNAVVGTALIKKYPKLESEFVYGDYKVYDVRKMIAKSEQEIGKATAKYFFYSNIMNFFKTEITLANGEIRKRPLIETNGETGEIVWDKGRDFATVRKVLSMPQVNIVKKTEVQTGGFSKESILPKRNSDKLIARKKDWDPKKYGGFDSPTVAYSVLVVAKVEKGKSKKLKSVKELLGITIMERSSFEKNPIDFLEAKGYKEVKKDLIIKLPKYSLFELENGRKRMLASAGELQKGNELALPSKYVNFLYLASHYEKLKGSPEDNEQKQLFVEQHKHYLDEIIEQISEFSKRVILADANLDKVLSAYNKHRDKPIREQAENIIHLFTLTNLGAPAAFKYFDTTIDRKRYTSTKEVLDATLIHQSITGLYETRIDLSQLGGDGGGGGGSSGGTAPLEEEYRLFLEAPIQNVTLLEQWKREIPKVWAEINPPGLASTQAPIHVQLLSTALPVRVRQYPITLEAKRSLRETIRKFRAAGILRPVHSPWNTPLLPVRKSGTSEYRMVQDLREVNKRVETIHPTVPNPYTLLSLLPPDRIWYSVLDLKDAFFCIPLAPESQLIFAFEWADAEEGESGQLTWTRLPQGFKNSPTLFNEALNRDLQGFRLDHPSVSLLQYVDDLLIAADTQAACLSATRDLLMTLAELGYRVSGKKAQLCQEEVTYLGFKIHKGSRSLSNSRTQAILQIPVPKTKRQVREFLGKIGYCRLFIPGFAELAQPLYAATRPGNDPLVWGEKEEEAFQSLKLALTQPPALALPSLDKPFQLFVEETSGAAKGVLTQALGPWKRPVAYLSKRLDPVAAGWPRCLRAIAAAALLTREASKLTFGQDIEITSSHNLESLLRSPPDKWLTNARITQYQVLLLDPPRVRFKQTAALNPATLLPETDDTLPIHHCLDTLDSLTSTRPDLTDQPLAQAEATLFTDGSSYIRDGKRYAGAAVVTLDSVIWAEPLPIGTSAQKAELIALTKALEWSKDKSVNIYTDSRYAFATLHVHGMIYRERGWLTAGGKAIKNAPEILALLTAVWLPKRVAVMHCKGHQKDDAPTSTGNRRADEVAREVAIRPLSTQATISAGKRTADGSEFEKRTADGSEFESPKKKAKVE

SEQ ID NO: 1445 - protein, 2093 aa, synthetic construct
MPAAKRVKLDGGDKKYSIGLDIGTNSVGWAVITDEYKVPSKKFKVLGNTDRHSIKKNLIGALLFDSGETAEATRLKRTARRRYTRRKNRICYLQEIFSNEMAKVDDSFFHRLEESFLVEEDKKHERHPIFGNIVDEVAYHEKYPTIYHLRKKLVDSTDKADLRLIYLALAHMIKFRGHFLIEGDLNPDNSDVDKLFIQLVQTYNQLFEENPINASGVDAKAILSARLSKSRRLENLIAQLPGEKKNGLFGNLIALSLGLTPNFKSNFDLAEDAKLQLSKDTYDDDLDNLLAQIGDQYADLFLAAKNLSDAILLSDILRVNTEITKAPLSASMIKRYDEHHQDLTLLKALVRQQLPEKYKEIFFDQSKNGYAGYIDGGASQEEFYKFIKPILEKMDGTEELLVKLNREDLLRKQRTFDNGSIPHQIHLGELHAILRRQEDFYPFLKDNREKIEKILTFRIPYYVGPLARGNSRFAWMTRKSEETITPWNFEEVVDKGASAQSFIERMTNFDKNLPNEKVLPKHSLLYEYFTVYNELTKVKYVTEGMRKPAFLSGEQKKAIVDLLFKTNRKVTVKQLKEDYFKKIECFDSVEISGVEDRFNASLGTYHDLLKIIKDKDFLDNEENEDILEDIVLTLTLFEDREMIEERLKTYAHLFDDKVMKQLKRRRYTGWGRLSRKLINGIRDKQSGKTILDFLKSDGFANRNFMQLIHDDSLTFKEDIQKAQVSGQGDSLHEHIANLAGSPAIKKGILQTVKVVDELVKVMGRHKPENIVIEMARENQTTQKGQKNSRERMKRIEEGIKELGSQILKEHPVENTQLQNEKLYLYYLQNGRDMYVDQELDINRLSDYDVDHIVPQSFLKDDSIDNKVLTRSDKARGKSDNVPSEEVVKKMKNYWRQLLNAKLITQRKFDNLTKAERGGLSELDKAGFIKRQLVETRQITKHVAQILDSRMNTKYDENDKLIREVKVITLKSKLVSDFRKDFQFYKVREINNYHHAHDAYLNAVVGTALIKKYPKLESEFVYGDYKVYDVRKMIAKSEQEIGKATAKYFFYSNIMNFFKTEITLANGEIRKRPLIETNGETGEIVWDKGRDFATVRKVLSMPQVNIVKKTEVQTGGFSKESILPKRNSDKLIARKKDWDPKKYGGFDSPTVAYSVLVVAKVEKGKSKKLKSVKELLGITIMERSSFEKNPIDFLEAKGYKEVKKDLIIKLPKYSLFELENGRKRMLASAGELQKGNELALPSKYVNFLYLASHYEKLKGSPEDNEQKQLFVEQHKHYLDEIIEQISEFSKRVILADANLDKVLSAYNKHRDKPIREQAENIIHLFTLTNLGAPAAFKYFDTTIDRKRYTSTKEVLDATLIHQSITGLYETRIDLSQLGGDGGGSSGGSGGTAPLEEEYRLFLEAPIQNVTLLEQWKREIPKVWAEINPPGLASTQAPIHVQLLSTALPVRVRQYPITLEAKRSLRETIRKFRAAGILRPVHSPWNTPLLPVRKSGTSEYRMVQDLREVNKRVETIHPTVPNPYTLLSLLPPDRIWYSVLDLKDAFFCIPLAPESQLIFAFEWADAEEGESGQLTWTRLPQGFKNSPTLFNEALNRDLQGFRLDHPSVSLLQYVDDLLIAADTQAACLSATRDLLMTLAELGYRVSGKKAQLCQEEVTYLGFKIHKGSRSLSNSRTQAILQIPVPKTKRQVREFLGKIGYCRLFIPGFAELAQPLYAATRPGNDPLVWGEKEEEAFQSLKLALTQPPALALPSLDKPFQLFVEETSGAAKGVLTQALGPWKRPVAYLSKRLDPVAAGWPRCLRAIAAAALLTREASKLTFGQDIEITSSHNLESLLRSPPDKWLTNARITQYQVLLLDPPRVRFKQTAALNPATLLPETDDTLPIHHCLDTLDSLTSTRPDLTDQPLAQAEATLFTDGSSYIRDGKRYAGAAVVTLDSVIWAEPLPIGTSAQKAELIALTKALEWSKDKSVNIYTDSRYAFATLHVHGMIYRERGWLTAGGKAIKNAPEILALLTAVWLPKRVAVMHCKGHQKDDAPTSTGNRRADEVAREVAIRPLSTQATISAGKRTADGSEFEKRTADGSEFESPKKKAKVE

SEQ ID NO: 1446 - protein, 2095 aa, synthetic construct
MPAAKRVKLDGGDKKYSIGLDIGTNSVGWAVITDEYKVPSKKFKVLGNTDRHSIKKNLIGALLFDSGETAEATRLKRTARRRYTRRKNRICYLQEIFSNEMAKVDDSFFHRLEESFLVEEDKKHERHPIFGNIVDEVAYHEKYPTIYHLRKKLVDSTDKADLRLIYLALAHMIKFRGHFLIEGDLNPDNSDVDKLFIQLVQTYNQLFEENPINASGVDAKAILSARLSKSRRLENLIAQLPGEKKNGLFGNLIALSLGLTPNFKSNFDLAEDAKLQLSKDTYDDDLDNLLAQIGDQYADLFLAAKNLSDAILLSDILRVNTEITKAPLSASMIKRYDEHHQDLTLLKALVRQQLPEKYKEIFFDQSKNGYAGYIDGGASQEEFYKFIKPILEKMDGTEELLVKLNREDLLRKQRTFDNGSIPHQIHLGELHAILRRQEDFYPFLKDNREKIEKILTFRIPYYVGPLARGNSRFAWMTRKSEETITPWNFEEVVDKGASAQSFIERMTNFDKNLPNEKVLPKHSLLYEYFTVYNELTKVKYVTEGMRKPAFLSGEQKKAIVDLLFKTNRKVTVKQLKEDYFKKIECFDSVEISGVEDRFNASLGTYHDLLKIIKDKDFLDNEENEDILEDIVLTLTLFEDREMIEERLKTYAHLFDDKVMKQLKRRRYTGWGRLSRKLINGIRDKQSGKTILDFLKSDGFANRNFMQLIHDDSLTFKEDIQKAQVSGQGDSLHEHIANLAGSPAIKKGILQTVKVVDELVKVMGRHKPENIVIEMARENQTTQKGQKNSRERMKRIEEGIKELGSQILKEHPVENTQLQNEKLYLYYLQNGRDMYVDQELDINRLSDYDVDHIVPQSFLKDDSIDNKVLTRSDKARGKSDNVPSEEVVKKMKNYWRQLLNAKLITQRKFDNLTKAERGGLSELDKAGFIKRQLVETRQITKHVAQILDSRMNTKYDENDKLIREVKVITLKSKLVSDFRKDFQFYKVREINNYHHAHDAYLNAVVGTALIKKYPKLESEFVYGDYKVYDVRKMIAKSEQEIGKATAKYFFYSNIMNFFKTEITLANGEIRKRPLIETNGETGEIVWDKGRDFATVRKVLSMPQVNIVKKTEVQTGGFSKESILPKRNSDKLIARKKDWDPKKYGGFDSPTVAYSVLVVAKVEKGKSKKLKSVKELLGITIMERSSFEKNPIDFLEAKGYKEVKKDLIIKLPKYSLFELENGRKRMLASAGELQKGNELALPSKYVNFLYLASHYEKLKGSPEDNEQKQLFVEQHKHYLDEIIEQISEFSKRVILADANLDKVLSAYNKHRDKPIREQAENIIHLFTLTNLGAPAAFKYFDTTIDRKRYTSTKEVLDATLIHQSITGLYETRIDLSQLGGDGGGGGEAAAKGGTAPLEEEYRLFLEAPIQNVTLLEQWKREIPKVWAEINPPGLASTQAPIHVQLLSTALPVRVRQYPITLEAKRSLRETIRKFRAAGILRPVHSPWNTPLLPVRKSGTSEYRMVQDLREVNKRVETIHPTVPNPYTLLSLLPPDRIWYSVLDLKDAFFCIPLAPESQLIFAFEWADAEEGESGQLTWTRLPQGFKNSPTLFNEALNRDLQGFRLDHPSVSLLQYVDDLLIAADTQAACLSATRDLLMTLAELGYRVSGKKAQLCQEEVTYLGFKIHKGSRSLSNSRTQAILQIPVPKTKRQVREFLGKIGYCRLFIPGFAELAQPLYAATRPGNDPLVWGEKEEEAFQSLKLALTQPPALALPSLDKPFQLFVEETSGAAKGVLTQALGPWKRPVAYLSKRLDPVAAGWPRCLRAIAAAALLTREASKLTFGQDIEITSSHNLESLLRSPPDKWLTNARITQYQVLLLDPPRVRFKQTAALNPATLLPETDDTLPIHHCLDTLDSLTSTRPDLTDQPLAQAEATLFTDGSSYIRDGKRYAGAAVVTLDSVIWAEPLPIGTSAQKAELIALTKALEWSKDKSVNIYTDSRYAFATLHVHGMIYRERGWLTAGGKAIKNAPEILALLTAVWLPKRVAVMHCKGHQKDDAPTSTGNRRADEVAREVAIRPLSTQATISAGKRTADGSEFEKRTADGSEFESPKKKAKVE

SEQ ID NO: 1447 - protein, 2096 aa, synthetic construct
MPAAKRVKLDGGDKKYSIGLDIGTNSVGWAVITDEYKVPSKKFKVLGNTDRHSIKKNLIGALLFDSGETAEATRLKRTARRRYTRRKNRICYLQEIFSNEMAKVDDSFFHRLEESFLVEEDKKHERHPIFGNIVDEVAYHEKYPTIYHLRKKLVDSTDKADLRLIYLALAHMIKFRGHFLIEGDLNPDNSDVDKLFIQLVQTYNQLFEENPINASGVDAKAILSARLSKSRRLENLIAQLPGEKKNGLFGNLIALSLGLTPNFKSNFDLAEDAKLQLSKDTYDDDLDNLLAQIGDQYADLFLAAKNLSDAILLSDILRVNTEITKAPLSASMIKRYDEHHQDLTLLKALVRQQLPEKYKEIFFDQSKNGYAGYIDGGASQEEFYKFIKPILEKMDGTEELLVKLNREDLLRKQRTFDNGSIPHQIHLGELHAILRRQEDFYPFLKDNREKIEKILTFRIPYYVGPLARGNSRFAWMTRKSEETITPWNFEEVVDKGASAQSFIERMTNFDKNLPNEKVLPKHSLLYEYFTVYNELTKVKYVTEGMRKPAFLSGEQKKAIVDLLFKTNRKVTVKQLKEDYFKKIECFDSVEISGVEDRFNASLGTYHDLLKIIKDKDFLDNEENEDILEDIVLTLTLFEDREMIEERLKTYAHLFDDKVMKQLKRRRYTGWGRLSRKLINGIRDKQSGKTILDFLKSDGFANRNFMQLIHDDSLTFKEDIQKAQVSGQGDSLHEHIANLAGSPAIKKGILQTVKVVDELVKVMGRHKPENIVIEMARENQTTQKGQKNSRERMKRIEEGIKELGSQILKEHPVENTQLQNEKLYLYYLQNGRDMYVDQELDINRLSDYDVDHIVPQSFLKDDSIDNKVLTRSDKARGKSDNVPSEEVVKKMKNYWRQLLNAKLITQRKFDNLTKAERGGLSELDKAGFIKRQLVETRQITKHVAQILDSRMNTKYDENDKLIREVKVITLKSKLVSDFRKDFQFYKVREINNYHHAHDAYLNAVVGTALIKKYPKLESEFVYGDYKVYDVRKMIAKSEQEIGKATAKYFFYSNIMNFFKTEITLANGEIRKRPLIETNGETGEIVWDKGRDFATVRKVLSMPQVNIVKKTEVQTGGFSKESILPKRNSDKLIARKKDWDPKKYGGFDSPTVAYSVLVVAKVEKGKSKKLKSVKELLGITIMERSSFEKNPIDFLEAKGYKEVKKDLIIKLPKYSLFELENGRKRMLASAGELQKGNELALPSKYVNFLYLASHYEKLKGSPEDNEQKQLFVEQHKHYLDEIIEQISEFSKRVILADANLDKVLSAYNKHRDKPIREQAENIIHLFTLTNLGAPAAFKYFDTTIDRKRYTSTKEVLDATLIHQSITGLYETRIDLSQLGGDGGPAPGGGGSSGGTAPLEEEYRLFLEAPIQNVTLLEQWKREIPKVWAEINPPGLASTQAPIHVQLLSTALPVRVRQYPITLEAKRSLRETIRKFRAAGILRPVHSPWNTPLLPVRKSGTSEYRMVQDLREVNKRVETIHPTVPNPYTLLSLLPPDRIWYSVLDLKDAFFCIPLAPESQLIFAFEWADAEEGESGQLTWTRLPQGFKNSPTLFNEALNRDLQGFRLDHPSVSLLQYVDDLLIAADTQAACLSATRDLLMTLAELGYRVSGKKAQLCQEEVTYLGFKIHKGSRSLSNSRTQAILQIPVPKTKRQVREFLGKIGYCRLFIPGFAELAQPLYAATRPGNDPLVWGEKEEEAFQSLKLALTQPPALALPSLDKPFQLFVEETSGAAKGVLTQALGPWKRPVAYLSKRLDPVAAGWPRCLRAIAAAALLTREASKLTFGQDIEITSSHNLESLLRSPPDKWLTNARITQYQVLLLDPPRVRFKQTAALNPATLLPETDDTLPIHHCLDTLDSLTSTRPDLTDQPLAQAEATLFTDGSSYIRDGKRYAGAAVVTLDSVIWAEPLPIGTSAQKAELIALTKALEWSKDKSVNIYTDSRYAFATLHVHGMIYRERGWLTAGGKAIKNAPEILALLTAVWLPKRVAVMHCKGHQKDDAPTSTGNRRADEVAREVAIRPLSTQATISAGKRTADGSEFEKRTADGSEFESPKKKAKVE

SEQ ID NO: 1448 - protein, 2129 aa, synthetic construct
MPAAKRVKLDGGDKKYSIGLDIGTNSVGWAVITDEYKVPSKKFKVLGNTDRHSIKKNLIGALLFDSGETAEATRLKRTARRRYTRRKNRICYLQEIFSNEMAKVDDSFFHRLEESFLVEEDKKHERHPIFGNIVDEVAYHEKYPTIYHLRKKLVDSTDKADLRLIYLALAHMIKFRGHFLIEGDLNPDNSDVDKLFIQLVQTYNQLFEENPINASGVDAKAILSARLSKSRRLENLIAQLPGEKKNGLFGNLIALSLGLTPNFKSNFDLAEDAKLQLSKDTYDDDLDNLLAQIGDQYADLFLAAKNLSDAILLSDILRVNTEITKAPLSASMIKRYDEHHQDLTLLKALVRQQLPEKYKEIFFDQSKNGYAGYIDGGASQEEFYKFIKPILEKMDGTEELLVKLNREDLLRKQRTFDNGSIPHQIHLGELHAILRRQEDFYPFLKDNREKIEKILTFRIPYYVGPLARGNSRFAWMTRKSEETITPWNFEEVVDKGASAQSFIERMTNFDKNLPNEKVLPKHSLLYEYFTVYNELTKVKYVTEGMRKPAFLSGEQKKAIVDLLFKTNRKVTVKQLKEDYFKKIECFDSVEISGVEDRFNASLGTYHDLLKIIKDKDFLDNEENEDILEDIVLTLTLFEDREMIEERLKTYAHLFDDKVMKQLKRRRYTGWGRLSRKLINGIRDKQSGKTILDFLKSDGFANRNFMQLIHDDSLTFKEDIQKAQVSGQGDSLHEHIANLAGSPAIKKGILQTVKVVDELVKVMGRHKPENIVIEMARENQTTQKGQKNSRERMKRIEEGIKELGSQILKEHPVENTQLQNEKLYLYYLQNGRDMYVDQELDINRLSDYDVDHIVPQSFLKDDSIDNKVLTRSDKARGKSDNVPSEEVVKKMKNYWRQLLNAKLITQRKFDNLTKAERGGLSELDKAGFIKRQLVETRQITKHVAQILDSRMNTKYDENDKLIREVKVITLKSKLVSDFRKDFQFYKVREINNYHHAHDAYLNAVVGTALIKKYPKLESEFVYGDYKVYDVRKMIAKSEQEIGKATAKYFFYSNIMNFFKTEITLANGEIRKRPLIETNGETGEIVWDKGRDFATVRKVLSMPQVNIVKKTEVQTGGFSKESILPKRNSDKLIARKKDWDPKKYGGFDSPTVAYSVLVVAKVEKGKSKKLKSVKELLGITIMERSSFEKNPIDFLEAKGYKEVKKDLIIKLPKYSLFELENGRKRMLASAGELQKGNELALPSKYVNFLYLASHYEKLKGSPEDNEQKQLFVEQHKHYLDEIIEQISEFSKRVILADANLDKVLSAYNKHRDKPIREQAENIIHLFTLTNLGAPAAFKYFDTTIDRKRYTSTKEVLDATLIHQSITGLYETRIDLSQLGGDGGAEAAAKEAAAKEAAAKEAAAKALEAEAAAKEAAAKEAAAKEAAAKAGGVLNLEEEYRLHEKPVPSSIDPSWLQLFPTVWAERAGMGLANQVPPVVVELRSGASPVAVRQYPMSKEAREGIRPHIQKFLDLGVLVPCRSPWNTPLLPVKKPGTNDYRPVQDLREINKRVQDIHPTVPNPYNLLSSLPPSYTWYSVLDLKDAFFCLRLHPNSQPLFAFEWKDPEKGNTGQLTWTRLPQGFKNSPTLFNEALHRDLAPFRALNPQVVLLQYVDDLLVAAPTYEDCKKGTQKLLQELSKLGYRVSAKKAQLCQREVTYLGYLLKEGKRWLTPARKATVMKIPVPTTPRQVREFLGKAGFCRLFIPGFASLAAPLYPLTKPSIPFIWTEEHQQAFDHIKKALLSAPALALPDLTKPFTLYIDERAGVARGVLTQTLGPWRRPVAYLSKKLDPVASGWPTCLKAVAAVALLLKDADKLTLGQNVTVIASHSLESIVRQPPDRWMTNARMTHYQSLLLNERVSFAPPAVLNPATLLPVESEATPVHRCSEILAEETGTRRDLEDQPLPGVPTWYTDGSSFITEGKRRAGAPIVDGKRTVWASSLPEGTSAQKAELVALTQALRLAEGKNINIYTDSRYAFATAHIHGAIYKQRGWLTSAGKDIKNKEEILALLEAIHLPRRVAIIHCPGHQRGSNPVATGNRRADEAAKQAALSTRVLAGTTKPAGKRTADGSEFEKRTADGSEFESPKKKAKVE

SEQ ID NO: 1449 - protein, 2092 aa, synthetic construct
MPAAKRVKLDGGDKKYSIGLDIGTNSVGWAVITDEYKVPSKKFKVLGNTDRHSIKKNLIGALLFDSGETAEATRLKRTARRRYTRRKNRICYLQEIFSNEMAKVDDSFFHRLEESFLVEEDKKHERHPIFGNIVDEVAYHEKYPTIYHLRKKLVDSTDKADLRLIYLALAHMIKFRGHFLIEGDLNPDNSDVDKLFIQLVQTYNQLFEENPINASGVDAKAILSARLSKSRRLENLIAQLPGEKKNGLFGNLIALSLGLTPNFKSNFDLAEDAKLQLSKDTYDDDLDNLLAQIGDQYADLFLAAKNLSDAILLSDILRVNTEITKAPLSASMIKRYDEHHQDLTLLKALVRQQLPEKYKEIFFDQSKNGYAGYIDGGASQEEFYKFIKPILEKMDGTEELLVKLNREDLLRKQRTFDNGSIPHQIHLGELHAILRRQEDFYPFLKDNREKIEKILTFRIPYYVGPLARGNSRFAWMTRKSEETITPWNFEEVVDKGASAQSFIERMTNFDKNLPNEKVLPKHSLLYEYFTVYNELTKVKYVTEGMRKPAFLSGEQKKAIVDLLFKTNRKVTVKQLKEDYFKKIECFDSVEISGVEDRFNASLGTYHDLLKIIKDKDFLDNEENEDILEDIVLTLTLFEDREMIEERLKTYAHLFDDKVMKQLKRRRYTGWGRLSRKLINGIRDKQSGKTILDFLKSDGFANRNFMQLIHDDSLTFKEDIQKAQVSGQGDSLHEHIANLAGSPAIKKGILQTVKVVDELVKVMGRHKPENIVIEMARENQTTQKGQKNSRERMKRIEEGIKELGSQILKEHPVENTQLQNEKLYLYYLQNGRDMYVDQELDINRLSDYDVDHIVPQSFLKDDSIDNKVLTRSDKARGKSDNVPSEEVVKKMKNYWRQLLNAKLITQRKFDNLTKAERGGLSELDKAGFIKRQLVETRQITKHVAQILDSRMNTKYDENDKLIREVKVITLKSKLVSDFRKDFQFYKVREINNYHHAHDAYLNAVVGTALIKKYPKLESEFVYGDYKVYDVRKMIAKSEQEIGKATAKYFFYSNIMNFFKTEITLANGEIRKRPLIETNGETGEIVWDKGRDFATVRKVLSMPQVNIVKKTEVQTGGFSKESILPKRNSDKLIARKKDWDPKKYGGFDSPTVAYSVLVVAKVEKGKSKKLKSVKELLGITIMERSSFEKNPIDFLEAKGYKEVKKDLIIKLPKYSLFELENGRKRMLASAGELQKGNELALPSKYVNFLYLASHYEKLKGSPEDNEQKQLFVEQHKHYLDEIIEQISEFSKRVILADANLDKVLSAYNKHRDKPIREQAENIIHLFTLTNLGAPAAFKYFDTTIDRKRYTSTKEVLDATLIHQSITGLYETRIDLSQLGGDGGGGSGGSGGSGGVLNLEEEYRLHEKPVPSSIDPSWLQLFPTVWAERAGMGLANQVPPVVVELRSGASPVAVRQYPMSKEAREGIRPHIQKFLDLGVLVPCRSPWNTPLLPVKKPGTNDYRPVQDLREINKRVQDIHPTVPNPYNLLSSLPPSYTWYSVLDLKDAFFCLRLHPNSQPLFAFEWKDPEKGNTGQLTWTRLPQGFKNSPTLFNEALHRDLAPFRALNPQVVLLQYVDDLLVAAPTYEDCKKGTQKLLQELSKLGYRVSAKKAQLCQREVTYLGYLLKEGKRWLTPARKATVMKIPVPTTPRQVREFLGKAGFCRLFIPGFASLAAPLYPLTKPSIPFIWTEEHQQAFDHIKKALLSAPALALPDLTKPFTLYIDERAGVARGVLTQTLGPWRRPVAYLSKKLDPVASGWPTCLKAVAAVALLLKDADKLTLGQNVTVIASHSLESIVRQPPDRWMTNARMTHYQSLLLNERVSFAPPAVLNPATLLPVESEATPVHRCSEILAEETGTRRDLEDQPLPGVPTWYTDGSSFITEGKRRAGAPIVDGKRTVWASSLPEGTSAQKAELVALTQALRLAEGKNINIYTDSRYAFATAHIHGAIYKQRGWLTSAGKDIKNKEEILALLEAIHLPRRVAIIHCPGHQRGSNPVATGNRRADEAAKQAALSTRVLAGTTKPAGKRTADGSEFEKRTADGSEFESPKKKAKVE

SEQ ID NO: 1450 - protein, 2089 aa, synthetic construct
MPAAKRVKLDGGDKKYSIGLDIGTNSVGWAVITDEYKVPSKKFKVLGNTDRHSIKKNLIGALLFDSGETAEATRLKRTARRRYTRRKNRICYLQEIFSNEMAKVDDSFFHRLEESFLVEEDKKHERHPIFGNIVDEVAYHEKYPTIYHLRKKLVDSTDKADLRLIYLALAHMIKFRGHFLIEGDLNPDNSDVDKLFIQLVQTYNQLFEENPINASGVDAKAILSARLSKSRRLENLIAQLPGEKKNGLFGNLIALSLGLTPNFKSNFDLAEDAKLQLSKDTYDDDLDNLLAQIGDQYADLFLAAKNLSDAILLSDILRVNTEITKAPLSASMIKRYDEHHQDLTLLKALVRQQLPEKYKEIFFDQSKNGYAGYIDGGASQEEFYKFIKPILEKMDGTEELLVKLNREDLLRKQRTFDNGSIPHQIHLGELHAILRRQEDFYPFLKDNREKIEKILTFRIPYYVGPLARGNSRFAWMTRKSEETITPWNFEEVVDKGASAQSFIERMTNFDKNLPNEKVLPKHSLLYEYFTVYNELTKVKYVTEGMRKPAFLSGEQKKAIVDLLFKTNRKVTVKQLKEDYFKKIECFDSVEISGVEDRFNASLGTYHDLLKIIKDKDFLDNEENEDILEDIVLTLTLFEDREMIEERLKTYAHLFDDKVMKQLKRRRYTGWGRLSRKLINGIRDKQSGKTILDFLKSDGFANRNFMQLIHDDSLTFKEDIQKAQVSGQGDSLHEHIANLAGSPAIKKGILQTVKVVDELVKVMGRHKPENIVIEMARENQTTQKGQKNSRERMKRIEEGIKELGSQILKEHPVENTQLQNEKLYLYYLQNGRDMYVDQELDINRLSDYDVDHIVPQSFLKDDSIDNKVLTRSDKARGKSDNVPSEEVVKKMKNYWRQLLNAKLITQRKFDNLTKAERGGLSELDKAGFIKRQLVETRQITKHVAQILDSRMNTKYDENDKLIREVKVITLKSKLVSDFRKDFQFYKVREINNYHHAHDAYLNAVVGTALIKKYPKLESEFVYGDYKVYDVRKMIAKSEQEIGKATAKYFFYSNIMNFFKTEITLANGEIRKRPLIETNGETGEIVWDKGRDFATVRKVLSMPQVNIVKKTEVQTGGFSKESILPKRNSDKLIARKKDWDPKKYGGFDSPTVAYSVLVVAKVEKGKSKKLKSVKELLGITIMERSSFEKNPIDFLEAKGYKEVKKDLIIKLPKYSLFELENGRKRMLASAGELQKGNELALPSKYVNFLYLASHYEKLKGSPEDNEQKQLFVEQHKHYLDEIIEQISEFSKRVILADANLDKVLSAYNKHRDKPIREQAENIIHLFTLTNLGAPAAFKYFDTTIDRKRYTSTKEVLDATLIHQSITGLYETRIDLSQLGGDGGGGSGSSGGVLNLEEEYRLHEKPVPSSIDPSWLQLFPTVWAERAGMGLANQVPPVVVELRSGASPVAVRQYPMSKEAREGIRPHIQKFLDLGVLVPCRSPWNTPLLPVKKPGTNDYRPVQDLREINKRVQDIHPTVPNPYNLLSSLPPSYTWYSVLDLKDAFFCLRLHPNSQPLFAFEWKDPEKGNTGQLTWTRLPQGFKNSPTLFNEALHRDLAPFRALNPQVVLLQYVDDLLVAAPTYEDCKKGTQKLLQELSKLGYRVSAKKAQLCQREVTYLGYLLKEGKRWLTPARKATVMKIPVPTTPRQVREFLGKAGFCRLFIPGFASLAAPLYPLTKPSIPFIWTEEHQQAFDHIKKALLSAPALALPDLTKPFTLYIDERAGVARGVLTQTLGPWRRPVAYLSKKLDPVASGWPTCLKAVAAVALLLKDADKLTLGQNVTVIASHSLESIVRQPPDRWMTNARMTHYQSLLLNERVSFAPPAVLNPATLLPVESEATPVHRCSEILAEETGTRRDLEDQPLPGVPTWYTDGSSFITEGKRRAGAPIVDGKRTVWASSLPEGTSAQKAELVALTQALRLAEGKNINIYTDSRYAFATAHIHGAIYKQRGWLTSAGKDIKNKEEILALLEAIHLPRRVAIIHCPGHQRGSNPVATGNRRADEAAKQAALSTRVLAGTTKPAGKRTADGSEFEKRTADGSEFESPKKKAKVE

SEQ ID NO: 1451 - protein, 2094 aa, synthetic construct
MPAAKRVKLDGGDKKYSIGLDIGTNSVGWAVITDEYKVPSKKFKVLGNTDRHSIKKNLIGALLFDSGETAEATRLKRTARRRYTRRKNRICYLQEIFSNEMAKVDDSFFHRLEESFLVEEDKKHERHPIFGNIVDEVAYHEKYPTIYHLRKKLVDSTDKADLRLIYLALAHMIKFRGHFLIEGDLNPDNSDVDKLFIQLVQTYNQLFEENPINASGVDAKAILSARLSKSRRLENLIAQLPGEKKNGLFGNLIALSLGLTPNFKSNFDLAEDAKLQLSKDTYDDDLDNLLAQIGDQYADLFLAAKNLSDAILLSDILRVNTEITKAPLSASMIKRYDEHHQDLTLLKALVRQQLPEKYKEIFFDQSKNGYAGYIDGGASQEEFYKFIKPILEKMDGTEELLVKLNREDLLRKQRTFDNGSIPHQIHLGELHAILRRQEDFYPFLKDNREKIEKILTFRIPYYVGPLARGNSRFAWMTRKSEETITPWNFEEVVDKGASAQSFIERMTNFDKNLPNEKVLPKHSLLYEYFTVYNELTKVKYVTEGMRKPAFLSGEQKKAIVDLLFKTNRKVTVKQLKEDYFKKIECFDSVEISGVEDRFNASLGTYHDLLKIIKDKDFLDNEENEDILEDIVLTLTLFEDREMIEERLKTYAHLFDDKVMKQLKRRRYTGWGRLSRKLINGIRDKQSGKTILDFLKSDGFANRNFMQLIHDDSLTFKEDIQKAQVSGQGDSLHEHIANLAGSPAIKKGILQTVKVVDELVKVMGRHKPENIVIEMARENQTTQKGQKNSRERMKRIEEGIKELGSQILKEHPVENTQLQNEKLYLYYLQNGRDMYVDQELDINRLSDYDVDHIVPQSFLKDDSIDNKVLTRSDKARGKSDNVPSEEVVKKMKNYWRQLLNAKLITQRKFDNLTKAERGGLSELDKAGFIKRQLVETRQITKHVAQILDSRMNTKYDENDKLIREVKVITLKSKLVSDFRKDFQFYKVREINNYHHAHDAYLNAVVGTALIKKYPKLESEFVYGDYKVYDVRKMIAKSEQEIGKATAKYFFYSNIMNFFKTEITLANGEIRKRPLIETNGETGEIVWDKGRDFATVRKVLSMPQVNIVKKTEVQTGGFSKESILPKRNSDKLIARKKDWDPKKYGGFDSPTVAYSVLVVAKVEKGKSKKLKSVKELLGITIMERSSFEKNPIDFLEAKGYKEVKKDLIIKLPKYSLFELENGRKRMLASAGELQKGNELALPSKYVNFLYLASHYEKLKGSPEDNEQKQLFVEQHKHYLDEIIEQISEFSKRVILADANLDKVLSAYNKHRDKPIREQAENIIHLFTLTNLGAPAAFKYFDTTIDRKRYTSTKEVLDATLIHQSITGLYETRIDLSQLGGDGGEAAAKGGGGGSGGVLNLEEEYRLHEKPVPSSIDPSWLQLFPTVWAERAGMGLANQVPPVVVELRSGASPVAVRQYPMSKEAREGIRPHIQKFLDLGVLVPCRSPWNTPLLPVKKPGTNDYRPVQDLREINKRVQDIHPTVPNPYNLLSSLPPSYTWYSVLDLKDAFFCLRLHPNSQPLFAFEWKDPEKGNTGQLTWTRLPQGFKNSPTLFNEALHRDLAPFRALNPQVVLLQYVDDLLVAAPTYEDCKKGTQKLLQELSKLGYRVSAKKAQLCQREVTYLGYLLKEGKRWLTPARKATVMKIPVPTTPRQVREFLGKAGFCRLFIPGFASLAAPLYPLTKPSIPFIWTEEHQQAFDHIKKALLSAPALALPDLTKPFTLYIDERAGVARGVLTQTLGPWRRPVAYLSKKLDPVASGWPTCLKAVAAVALLLKDADKLTLGQNVTVIASHSLESIVRQPPDRWMTNARMTHYQSLLLNERVSFAPPAVLNPATLLPVESEATPVHRCSEILAEETGTRRDLEDQPLPGVPTWYTDGSSFITEGKRRAGAPIVDGKRTVWASSLPEGTSAQKAELVALTQALRLAEGKNINIYTDSRYAFATAHIHGAIYKQRGWLTSAGKDIKNKEEILALLEAIHLPRRVAIIHCPGHQRGSNPVATGNRRADEAAKQAALSTRVLAGTTKPAGKRTADGSEFEKRTADGSEFESPKKKAKVE

SEQ ID NO: 1452 - protein, 2098 aa, synthetic construct
MPAAKRVKLDGGDKKYSIGLDIGTNSVGWAVITDEYKVPSKKFKVLGNTDRHSIKKNLIGALLFDSGETAEATRLKRTARRRYTRRKNRICYLQEIFSNEMAKVDDSFFHRLEESFLVEEDKKHERHPIFGNIVDEVAYHEKYPTIYHLRKKLVDSTDKADLRLIYLALAHMIKFRGHFLIEGDLNPDNSDVDKLFIQLVQTYNQLFEENPINASGVDAKAILSARLSKSRRLENLIAQLPGEKKNGLFGNLIALSLGLTPNFKSNFDLAEDAKLQLSKDTYDDDLDNLLAQIGDQYADLFLAAKNLSDAILLSDILRVNTEITKAPLSASMIKRYDEHHQDLTLLKALVRQQLPEKYKEIFFDQSKNGYAGYIDGGASQEEFYKFIKPILEKMDGTEELLVKLNREDLLRKQRTFDNGSIPHQIHLGELHAILRRQEDFYPFLKDNREKIEKILTFRIPYYVGPLARGNSRFAWMTRKSEETITPWNFEEVVDKGASAQSFIERMTNFDKNLPNEKVLPKHSLLYEYFTVYNELTKVKYVTEGMRKPAFLSGEQKKAIVDLLFKTNRKVTVKQLKEDYFKKIECFDSVEISGVEDRFNASLGTYHDLLKIIKDKDFLDNEENEDILEDIVLTLTLFEDREMIEERLKTYAHLFDDKVMKQLKRRRYTGWGRLSRKLINGIRDKQSGKTILDFLKSDGFANRNFMQLIHDDSLTFKEDIQKAQVSGQGDSLHEHIANLAGSPAIKKGILQTVKVVDELVKVMGRHKPENIVIEMARENQTTQKGQKNSRERMKRIEEGIKELGSQILKEHPVENTQLQNEKLYLYYLQNGRDMYVDQELDINRLSDYDVDHIVPQSFLKDDSIDNKVLTRSDKARGKSDNVPSEEVVKKMKNYWRQLLNAKLITQRKFDNLTKAERGGLSELDKAGFIKRQLVETRQITKHVAQILDSRMNTKYDENDKLIREVKVITLKSKLVSDFRKDFQFYKVREINNYHHAHDAYLNAVVGTALIKKYPKLESEFVYGDYKVYDVRKMIAKSEQEIGKATAKYFFYSNIMNFFKTEITLANGEIRKRPLIETNGETGEIVWDKGRDFATVRKVLSMPQVNIVKKTEVQTGGFSKESILPKRNSDKLIARKKDWDPKKYGGFDSPTVAYSVLVVAKVEKGKSKKLKSVKELLGITIMERSSFEKNPIDFLEAKGYKEVKKDLIIKLPKYSLFELENGRKRMLASAGELQKGNELALPSKYVNFLYLASHYEKLKGSPEDNEQKQLFVEQHKHYLDEIIEQISEFSKRVILADANLDKVLSAYNKHRDKPIREQAENIIHLFTLTNLGAPAAFKYFDTTIDRKRYTSTKEVLDATLIHQSITGLYETRIDLSQLGGDGGEAAAKEAAAKEAAAKGGVLNLEEEYRLHEKPVPSSIDPSWLQLFPTVWAERAGMGLANQVPPVVVELRSGASPVAVRQYPMSKEAREGIRPHIQKFLDLGVLVPCRSPWNTPLLPVKKPGTNDYRPVQDLREINKRVQDIHPTVPNPYNLLSSLPPSYTWYSVLDLKDAFFCLRLHPNSQPLFAFEWKDPEKGNTGQLTWTRLPQGFKNSPTLFNEALHRDLAPFRALNPQVVLLQYVDDLLVAAPTYEDCKKGTQKLLQELSKLGYRVSAKKAQLCQREVTYLGYLLKEGKRWLTPARKATVMKIPVPTTPRQVREFLGKAGFCRLFIPGFASLAAPLYPLTKPSIPFIWTEEHQQAFDHIKKALLSAPALALPDLTKPFTLYIDERAGVARGVLTQTLGPWRRPVAYLSKKLDPVASGWPTCLKAVAAVALLLKDADKLTLGQNVTVIASHSLESIVRQPPDRWMTNARMTHYQSLLLNERVSFAPPAVLNPATLLPVESEATPVHRCSEILAEETGTRRDLEDQPLPGVPTWYTDGSSFITEGKRRAGAPIVDGKRTVWASSLPEGTSAQKAELVALTQALRLAEGKNINIYTDSRYAFATAHIHGAIYKQRGWLTSAGKDIKNKEEILALLEAIHLPRRVAIIHCPGHQRGSNPVATGNRRADEAAKQAALSTRVLAGTTKPAGKRTADGSEFEKRTADGSEFESPKKKAKVE

SEQ ID NO: 1453 - protein, 2094 aa, synthetic construct
MPAAKRVKLDGGDKKYSIGLDIGTNSVGWAVITDEYKVPSKKFKVLGNTDRHSIKKNLIGALLFDSGETAEATRLKRTARRRYTRRKNRICYLQEIFSNEMAKVDDSFFHRLEESFLVEEDKKHERHPIFGNIVDEVAYHEKYPTIYHLRKKLVDSTDKADLRLIYLALAHMIKFRGHFLIEGDLNPDNSDVDKLFIQLVQTYNQLFEENPINASGVDAKAILSARLSKSRRLENLIAQLPGEKKNGLFGNLIALSLGLTPNFKSNFDLAEDAKLQLSKDTYDDDLDNLLAQIGDQYADLFLAAKNLSDAILLSDILRVNTEITKAPLSASMIKRYDEHHQDLTLLKALVRQQLPEKYKEIFFDQSKNGYAGYIDGGASQEEFYKFIKPILEKMDGTEELLVKLNREDLLRKQRTFDNGSIPHQIHLGELHAILRRQEDFYPFLKDNREKIEKILTFRIPYYVGPLARGNSRFAWMTRKSEETITPWNFEEVVDKGASAQSFIERMTNFDKNLPNEKVLPKHSLLYEYFTVYNELTKVKYVTEGMRKPAFLSGEQKKAIVDLLFKTNRKVTVKQLKEDYFKKIECFDSVEISGVEDRFNASLGTYHDLLKIIKDKDFLDNEENEDILEDIVLTLTLFEDREMIEERLKTYAHLFDDKVMKQLKRRRYTGWGRLSRKLINGIRDKQSGKTILDFLKSDGFANRNFMQLIHDDSLTFKEDIQKAQVSGQGDSLHEHIANLAGSPAIKKGILQTVKVVDELVKVMGRHKPENIVIEMARENQTTQKGQKNSRERMKRIEEGIKELGSQILKEHPVENTQLQNEKLYLYYLQNGRDMYVDQELDINRLSDYDVDHIVPQSFLKDDSIDNKVLTRSDKARGKSDNVPSEEVVKKMKNYWRQLLNAKLITQRKFDNLTKAERGGLSELDKAGFIKRQLVETRQITKHVAQILDSRMNTKYDENDKLIREVKVITLKSKLVSDFRKDFQFYKVREINNYHHAHDAYLNAVVGTALIKKYPKLESEFVYGDYKVYDVRKMIAKSEQEIGKATAKYFFYSNIMNFFKTEITLANGEIRKRPLIETNGETGEIVWDKGRDFATVRKVLSMPQVNIVKKTEVQTGGFSKESILPKRNSDKLIARKKDWDPKKYGGFDSPTVAYSVLVVAKVEKGKSKKLKSVKELLGITIMERSSFEKNPIDFLEAKGYKEVKKDLIIKLPKYSLFELENGRKRMLASAGELQKGNELALPSKYVNFLYLASHYEKLKGSPEDNEQKQLFVEQHKHYLDEIIEQISEFSKRVILADANLDKVLSAYNKHRDKPIREQAENIIHLFTLTNLGAPAAFKYFDTTIDRKRYTSTKEVLDATLIHQSITGLYETRIDLSQLGGDGGPAPAPAPAPAPGGVLNLEEEYRLHEKPVPSSIDPSWLQLFPTVWAERAGMGLANQVPPVVVELRSGASPVAVRQYPMSKEAREGIRPHIQKFLDLGVLVPCRSPWNTPLLPVKKPGTNDYRPVQDLREINKRVQDIHPTVPNPYNLLSSLPPSYTWYSVLDLKDAFFCLRLHPNSQPLFAFEWKDPEKGNTGQLTWTRLPQGFKNSPTLFNEALHRDLAPFRALNPQVVLLQYVDDLLVAAPTYEDCKKGTQKLLQELSKLGYRVSAKKAQLCQREVTYLGYLLKEGKRWLTPARKATVMKIPVPTTPRQVREFLGKAGFCRLFIPGFASLAAPLYPLTKPSIPFIWTEEHQQAFDHIKKALLSAPALALPDLTKPFTLYIDERAGVARGVLTQTLGPWRRPVAYLSKKLDPVASGWPTCLKAVAAVALLLKDADKLTLGQNVTVIASHSLESIVRQPPDRWMTNARMTHYQSLLLNERVSFAPPAVLNPATLLPVESEATPVHRCSEILAEETGTRRDLEDQPLPGVPTWYTDGSSFITEGKRRAGAPIVDGKRTVWASSLPEGTSAQKAELVALTQALRLAEGKNINIYTDSRYAFATAHIHGAIYKQRGWLTSAGKDIKNKEEILALLEAIHLPRRVAIIHCPGHQRGSNPVATGNRRADEAAKQAALSTRVLAGTTKPAGKRTADGSEFEKRTADGSEFESPKKKAKVE

SEQ ID NO: 1454 - protein, 2113 aa, synthetic construct
MPAAKRVKLDGGDKKYSIGLDIGTNSVGWAVITDEYKVPSKKFKVLGNTDRHSIKKNLIGALLFDSGETAEATRLKRTARRRYTRRKNRICYLQEIFSNEMAKVDDSFFHRLEESFLVEEDKKHERHPIFGNIVDEVAYHEKYPTIYHLRKKLVDSTDKADLRLIYLALAHMIKFRGHFLIEGDLNPDNSDVDKLFIQLVQTYNQLFEENPINASGVDAKAILSARLSKSRRLENLIAQLPGEKKNGLFGNLIALSLGLTPNFKSNFDLAEDAKLQLSKDTYDDDLDNLLAQIGDQYADLFLAAKNLSDAILLSDILRVNTEITKAPLSASMIKRYDEHHQDLTLLKALVRQQLPEKYKEIFFDQSKNGYAGYIDGGASQEEFYKFIKPILEKMDGTEELLVKLNREDLLRKQRTFDNGSIPHQIHLGELHAILRRQEDFYPFLKDNREKIEKILTFRIPYYVGPLARGNSRFAWMTRKSEETITPWNFEEVVDKGASAQSFIERMTNFDKNLPNEKVLPKHSLLYEYFTVYNELTKVKYVTEGMRKPAFLSGEQKKAIVDLLFKTNRKVTVKQLKEDYFKKIECFDSVEISGVEDRFNASLGTYHDLLKIIKDKDFLDNEENEDILEDIVLTLTLFEDREMIEERLKTYAHLFDDKVMKQLKRRRYTGWGRLSRKLINGIRDKQSGKTILDFLKSDGFANRNFMQLIHDDSLTFKEDIQKAQVSGQGDSLHEHIANLAGSPAIKKGILQTVKVVDELVKVMGRHKPENIVIEMARENQTTQKGQKNSRERMKRIEEGIKELGSQILKEHPVENTQLQNEKLYLYYLQNGRDMYVDQELDINRLSDYDVDHIVPQSFLKDDSIDNKVLTRSDKARGKSDNVPSEEVVKKMKNYWRQLLNAKLITQRKFDNLTKAERGGLSELDKAGFIKRQLVETRQITKHVAQILDSRMNTKYDENDKLIREVKVITLKSKLVSDFRKDFQFYKVREINNYHHAHDAYLNAVVGTALIKKYPKLESEFVYGDYKVYDVRKMIAKSEQEIGKATAKYFFYSNIMNFFKTEITLANGEIRKRPLIETNGETGEIVWDKGRDFATVRKVLSMPQVNIVKKTEVQTGGFSKESILPKRNSDKLIARKKDWDPKKYGGFDSPTVAYSVLVVAKVEKGKSKKLKSVKELLGITIMERSSFEKNPIDFLEAKGYKEVKKDLIIKLPKYSLFELENGRKRMLASAGELQKGNELALPSKYVNFLYLASHYEKLKGSPEDNEQKQLFVEQHKHYLDEIIEQISEFSKRVILADANLDKVLSAYNKHRDKPIREQAENIIHLFTLTNLGAPAAFKYFDTTIDRKRYTSTKEVLDATLIHQSITGLYETRIDLSQLGGDGGEAAAKEAAAKEAAAKEAAAKEAAAKEAAAKGGVLNLEEEYRLHEKPVPSSIDPSWLQLFPTVWAERAGMGLANQVPPVVVELRSGASPVAVRQYPMSKEAREGIRPHIQKFLDLGVLVPCRSPWNTPLLPVKKPGTNDYRPVQDLREINKRVQDIHPTVPNPYNLLSSLPPSYTWYSVLDLKDAFFCLRLHPNSQPLFAFEWKDPEKGNTGQLTWTRLPQGFKNSPTLFNEALHRDLAPFRALNPQVVLLQYVDDLLVAAPTYEDCKKGTQKLLQELSKLGYRVSAKKAQLCQREVTYLGYLLKEGKRWLTPARKATVMKIPVPTTPRQVREFLGKAGFCRLFIPGFASLAAPLYPLTKPSIPFIWTEEHQQAFDHIKKALLSAPALALPDLTKPFTLYIDERAGVARGVLTQTLGPWRRPVAYLSKKLDPVASGWPTCLKAVAAVALLLKDADKLTLGQNVTVIASHSLESIVRQPPDRWMTNARMTHYQSLLLNERVSFAPPAVLNPATLLPVESEATPVHRCSEILAEETGTRRDLEDQPLPGVPTWYTDGSSFITEGKRRAGAPIVDGKRTVWASSLPEGTSAQKAELVALTQALRLAEGKNINIYTDSRYAFATAHIHGAIYKQRGWLTSAGKDIKNKEEILALLEAIHLPRRVAIIHCPGHQRGSNPVATGNRRADEAAKQAALSTRVLAGTTKPAGKRTADGSEFEKRTADGSEFESPKKKAKVE

SEQ ID NO: 1455 - protein, 2094 aa, synthetic construct
MPAAKRVKLDGGDKKYSIGLDIGTNSVGWAVITDEYKVPSKKFKVLGNTDRHSIKKNLIGALLFDSGETAEATRLKRTARRRYTRRKNRICYLQEIFSNEMAKVDDSFFHRLEESFLVEEDKKHERHPIFGNIVDEVAYHEKYPTIYHLRKKLVDSTDKADLRLIYLALAHMIKFRGHFLIEGDLNPDNSDVDKLFIQLVQTYNQLFEENPINASGVDAKAILSARLSKSRRLENLIAQLPGEKKNGLFGNLIALSLGLTPNFKSNFDLAEDAKLQLSKDTYDDDLDNLLAQIGDQYADLFLAAKNLSDAILLSDILRVNTEITKAPLSASMIKRYDEHHQDLTLLKALVRQQLPEKYKEIFFDQSKNGYAGYIDGGASQEEFYKFIKPILEKMDGTEELLVKLNREDLLRKQRTFDNGSIPHQIHLGELHAILRRQEDFYPFLKDNREKIEKILTFRIPYYVGPLARGNSRFAWMTRKSEETITPWNFEEVVDKGASAQSFIERMTNFDKNLPNEKVLPKHSLLYEYFTVYNELTKVKYVTEGMRKPAFLSGEQKKAIVDLLFKTNRKVTVKQLKEDYFKKIECFDSVEISGVEDRFNASLGTYHDLLKIIKDKDFLDNEENEDILEDIVLTLTLFEDREMIEERLKTYAHLFDDKVMKQLKRRRYTGWGRLSRKLINGIRDKQSGKTILDFLKSDGFANRNFMQLIHDDSLTFKEDIQKAQVSGQGDSLHEHIANLAGSPAIKKGILQTVKVVDELVKVMGRHKPENIVIEMARENQTTQKGQKNSRERMKRIEEGIKELGSQILKEHPVENTQLQNEKLYLYYLQNGRDMYVDQELDINRLSDYDVDHIVPQSFLKDDSIDNKVLTRSDKARGKSDNVPSEEVVKKMKNYWRQLLNAKLITQRKFDNLTKAERGGLSELDKAGFIKRQLVETRQITKHVAQILDSRMNTKYDENDKLIREVKVITLKSKLVSDFRKDFQFYKVREINNYHHAHDAYLNAVVGTALIKKYPKLESEFVYGDYKVYDVRKMIAKSEQEIGKATAKYFFYSNIMNFFKTEITLANGEIRKRPLIETNGETGEIVWDKGRDFATVRKVLSMPQVNIVKKTEVQTGGFSKESILPKRNSDKLIARKKDWDPKKYGGFDSPTVAYSVLVVAKVEKGKSKKLKSVKELLGITIMERSSFEKNPIDFLEAKGYKEVKKDLIIKLPKYSLFELENGRKRMLASAGELQKGNELALPSKYVNFLYLASHYEKLKGSPEDNEQKQLFVEQHKHYLDEIIEQISEFSKRVILADANLDKVLSAYNKHRDKPIREQAENIIHLFTLTNLGAPAAFKYFDTTIDRKRYTSTKEVLDATLIHQSITGLYETRIDLSQLGGDGGEAAAKGGGGSSGGVLNLEEEYRLHEKPVPSSIDPSWLQLFPTVWAERAGMGLANQVPPVVVELRSGASPVAVRQYPMSKEAREGIRPHIQKFLDLGVLVPCRSPWNTPLLPVKKPGTNDYRPVQDLREINKRVQDIHPTVPNPYNLLSSLPPSYTWYSVLDLKDAFFCLRLHPNSQPLFAFEWKDPEKGNTGQLTWTRLPQGFKNSPTLFNEALHRDLAPFRALNPQVVLLQYVDDLLVAAPTYEDCKKGTQKLLQELSKLGYRVSAKKAQLCQREVTYLGYLLKEGKRWLTPARKATVMKIPVPTTPRQVREFLGKAGFCRLFIPGFASLAAPLYPLTKPSIPFIWTEEHQQAFDHIKKALLSAPALALPDLTKPFTLYIDERAGVARGVLTQTLGPWRRPVAYLSKKLDPVASGWPTCLKAVAAVALLLKDADKLTLGQNVTVIASHSLESIVRQPPDRWMTNARMTHYQSLLLNERVSFAPPAVLNPATLLPVESEATPVHRCSEILAEETGTRRDLEDQPLPGVPTWYTDGSSFITEGKRRAGAPIVDGKRTVWASSLPEGTSAQKAELVALTQALRLAEGKNINIYTDSRYAFATAHIHGAIYKQRGWLTSAGKDIKNKEEILALLEAIHLPRRVAIIHCPGHQRGSNPVATGNRRADEAAKQAALSTRVLAGTTKPAGKRTADGSEFEKRTADGSEFESPKKKAKVE

SEQ ID NO: 1456 - protein, 2094 aa, synthetic construct
MPAAKRVKLDGGDKKYSIGLDIGTNSVGWAVITDEYKVPSKKFKVLGNTDRHSIKKNLIGALLFDSGETAEATRLKRTARRRYTRRKNRICYLQEIFSNEMAKVDDSFFHRLEESFLVEEDKKHERHPIFGNIVDEVAYHEKYPTIYHLRKKLVDSTDKADLRLIYLALAHMIKFRGHFLIEGDLNPDNSDVDKLFIQLVQTYNQLFEENPINASGVDAKAILSARLSKSRRLENLIAQLPGEKKNGLFGNLIALSLGLTPNFKSNFDLAEDAKLQLSKDTYDDDLDNLLAQIGDQYADLFLAAKNLSDAILLSDILRVNTEITKAPLSASMIKRYDEHHQDLTLLKALVRQQLPEKYKEIFFDQSKNGYAGYIDGGASQEEFYKFIKPILEKMDGTEELLVKLNREDLLRKQRTFDNGSIPHQIHLGELHAILRRQEDFYPFLKDNREKIEKILTFRIPYYVGPLARGNSRFAWMTRKSEETITPWNFEEVVDKGASAQSFIERMTNFDKNLPNEKVLPKHSLLYEYFTVYNELTKVKYVTEGMRKPAFLSGEQKKAIVDLLFKTNRKVTVKQLKEDYFKKIECFDSVEISGVEDRFNASLGTYHDLLKIIKDKDFLDNEENEDILEDIVLTLTLFEDREMIEERLKTYAHLFDDKVMKQLKRRRYTGWGRLSRKLINGIRDKQSGKTILDFLKSDGFANRNFMQLIHDDSLTFKEDIQKAQVSGQGDSLHEHIANLAGSPAIKKGILQTVKVVDELVKVMGRHKPENIVIEMARENQTTQKGQKNSRERMKRIEEGIKELGSQILKEHPVENTQLQNEKLYLYYLQNGRDMYVDQELDINRLSDYDVDHIVPQSFLKDDSIDNKVLTRSDKARGKSDNVPSEEVVKKMKNYWRQLLNAKLITQRKFDNLTKAERGGLSELDKAGFIKRQLVETRQITKHVAQILDSRMNTKYDENDKLIREVKVITLKSKLVSDFRKDFQFYKVREINNYHHAHDAYLNAVVGTALIKKYPKLESEFVYGDYKVYDVRKMIAKSEQEIGKATAKYFFYSNIMNFFKTEITLANGEIRKRPLIETNGETGEIVWDKGRDFATVRKVLSMPQVNIVKKTEVQTGGFSKESILPKRNSDKLIARKKDWDPKKYGGFDSPTVAYSVLVVAKVEKGKSKKLKSVKELLGITIMERSSFEKNPIDFLEAKGYKEVKKDLIIKLPKYSLFELENGRKRMLASAGELQKGNELALPSKYVNFLYLASHYEKLKGSPEDNEQKQLFVEQHKHYLDEIIEQISEFSKRVILADANLDKVLSAYNKHRDKPIREQAENIIHLFTLTNLGAPAAFKYFDTTIDRKRYTSTKEVLDATLIHQSITGLYETRIDLSQLGGDGGGGGGGSEAAAKGGVLNLEEEYRLHEKPVPSSIDPSWLQLFPTVWAERAGMGLANQVPPVVVELRSGASPVAVRQYPMSKEAREGIRPHIQKFLDLGVLVPCRSPWNTPLLPVKKPGTNDYRPVQDLREINKRVQDIHPTVPNPYNLLSSLPPSYTWYSVLDLKDAFFCLRLHPNSQPLFAFEWKDPEKGNTGQLTWTRLPQGFKNSPTLFNEALHRDLAPFRALNPQVVLLQYVDDLLVAAPTYEDCKKGTQKLLQELSKLGYRVSAKKAQLCQREVTYLGYLLKEGKRWLTPARKATVMKIPVPTTPRQVREFLGKAGFCRLFIPGFASLAAPLYPLTKPSIPFIWTEEHQQAFDHIKKALLSAPALALPDLTKPFTLYIDERAGVARGVLTQTLGPWRRPVAYLSKKLDPVASGWPTCLKAVAAVALLLKDADKLTLGQNVTVIASHSLESIVRQPPDRWMTNARMTHYQSLLLNERVSFAPPAVLNPATLLPVESEATPVHRCSEILAEETGTRRDLEDQPLPGVPTWYTDGSSFITEGKRRAGAPIVDGKRTVWASSLPEGTSAQKAELVALTQALRLAEGKNINIYTDSRYAFATAHIHGAIYKQRGWLTSAGKDIKNKEEILALLEAIHLPRRVAIIHCPGHQRGSNPVATGNRRADEAAKQAALSTRVLAGTTKPAGKRTADGSEFEKRTADGSEFESPKKKAKVE

SEQ ID NO: 1457 - protein, 2094 aa, synthetic construct
MPAAKRVKLDGGDKKYSIGLDIGTNSVGWAVITDEYKVPSKKFKVLGNTDRHSIKKNLIGALLFDSGETAEATRLKRTARRRYTRRKNRICYLQEIFSNEMAKVDDSFFHRLEESFLVEEDKKHERHPIFGNIVDEVAYHEKYPTIYHLRKKLVDSTDKADLRLIYLALAHMIKFRGHFLIEGDLNPDNSDVDKLFIQLVQTYNQLFEENPINASGVDAKAILSARLSKSRRLENLIAQLPGEKKNGLFGNLIALSLGLTPNFKSNFDLAEDAKLQLSKDTYDDDLDNLLAQIGDQYADLFLAAKNLSDAILLSDILRVNTEITKAPLSASMIKRYDEHHQDLTLLKALVRQQLPEKYKEIFFDQSKNGYAGYIDGGASQEEFYKFIKPILEKMDGTEELLVKLNREDLLRKQRTFDNGSIPHQIHLGELHAILRRQEDFYPFLKDNREKIEKILTFRIPYYVGPLARGNSRFAWMTRKSEETITPWNFEEVVDKGASAQSFIERMTNFDKNLPNEKVLPKHSLLYEYFTVYNELTKVKYVTEGMRKPAFLSGEQKKAIVDLLFKTNRKVTVKQLKEDYFKKIECFDSVEISGVEDRFNASLGTYHDLLKIIKDKDFLDNEENEDILEDIVLTLTLFEDREMIEERLKTYAHLFDDKVMKQLKRRRYTGWGRLSRKLINGIRDKQSGKTILDFLKSDGFANRNFMQLIHDDSLTFKEDIQKAQVSGQGDSLHEHIANLAGSPAIKKGILQTVKVVDELVKVMGRHKPENIVIEMARENQTTQKGQKNSRERMKRIEEGIKELGSQILKEHPVENTQLQNEKLYLYYLQNGRDMYVDQELDINRLSDYDVDHIVPQSFLKDDSIDNKVLTRSDKARGKSDNVPSEEVVKKMKNYWRQLLNAKLITQRKFDNLTKAERGGLSELDKAGFIKRQLVETRQITKHVAQILDSRMNTKYDENDKLIREVKVITLKSKLVSDFRKDFQFYKVREINNYHHAHDAYLNAVVGTALIKKYPKLESEFVYGDYKVYDVRKMIAKSEQEIGKATAKYFFYSNIMNFFKTEITLANGEIRKRPLIETNGETGEIVWDKGRDFATVRKVLSMPQVNIVKKTEVQTGGFSKESILPKRNSDKLIARKKDWDPKKYGGFDSPTVAYSVLVVAKVEKGKSKKLKSVKELLGITIMERSSFEKNPIDFLEAKGYKEVKKDLIIKLPKYSLFELENGRKRMLASAGELQKGNELALPSKYVNFLYLASHYEKLKGSPEDNEQKQLFVEQHKHYLDEIIEQISEFSKRVILADANLDKVLSAYNKHRDKPIREQAENIIHLFTLTNLGAPAAFKYFDTTIDRKRYTSTKEVLDATLIHQSITGLYETRIDLSQLGGDGGGSSPAPEAAAKGGVLNLEEEYRLHEKPVPSSIDPSWLQLFPTVWAERAGMGLANQVPPVVVELRSGASPVAVRQYPMSKEAREGIRPHIQKFLDLGVLVPCRSPWNTPLLPVKKPGTNDYRPVQDLREINKRVQDIHPTVPNPYNLLSSLPPSYTWYSVLDLKDAFFCLRLHPNSQPLFAFEWKDPEKGNTGQLTWTRLPQGFKNSPTLFNEALHRDLAPFRALNPQVVLLQYVDDLLVAAPTYEDCKKGTQKLLQELSKLGYRVSAKKAQLCQREVTYLGYLLKEGKRWLTPARKATVMKIPVPTTPRQVREFLGKAGFCRLFIPGFASLAAPLYPLTKPSIPFIWTEEHQQAFDHIKKALLSAPALALPDLTKPFTLYIDERAGVARGVLTQTLGPWRRPVAYLSKKLDPVASGWPTCLKAVAAVALLLKDADKLTLGQNVTVIASHSLESIVRQPPDRWMTNARMTHYQSLLLNERVSFAPPAVLNPATLLPVESEATPVHRCSEILAEETGTRRDLEDQPLPGVPTWYTDGSSFITEGKRRAGAPIVDGKRTVWASSLPEGTSAQKAELVALTQALRLAEGKNINIYTDSRYAFATAHIHGAIYKQRGWLTSAGKDIKNKEEILALLEAIHLPRRVAIIHCPGHQRGSNPVATGNRRADEAAKQAALSTRVLAGTTKPAGKRTADGSEFEKRTADGSEFESPKKKAKVE

SEQ ID NO: 1458 - protein, 2098 aa, synthetic construct
MPAAKRVKLDGGDKKYSIGLDIGTNSVGWAVITDEYKVPSKKFKVLGNTDRHSIKKNLIGALLFDSGETAEATRLKRTARRRYTRRKNRICYLQEIFSNEMAKVDDSFFHRLEESFLVEEDKKHERHPIFGNIVDEVAYHEKYPTIYHLRKKLVDSTDKADLRLIYLALAHMIKFRGHFLIEGDLNPDNSDVDKLFIQLVQTYNQLFEENPINASGVDAKAILSARLSKSRRLENLIAQLPGEKKNGLFGNLIALSLGLTPNFKSNFDLAEDAKLQLSKDTYDDDLDNLLAQIGDQYADLFLAAKNLSDAILLSDILRVNTEITKAPLSASMIKRYDEHHQDLTLLKALVRQQLPEKYKEIFFDQSKNGYAGYIDGGASQEEFYKFIKPILEKMDGTEELLVKLNREDLLRKQRTFDNGSIPHQIHLGELHAILRRQEDFYPFLKDNREKIEKILTFRIPYYVGPLARGNSRFAWMTRKSEETITPWNFEEVVDKGASAQSFIERMTNFDKNLPNEKVLPKHSLLYEYFTVYNELTKVKYVTEGMRKPAFLSGEQKKAIVDLLFKTNRKVTVKQLKEDYFKKIECFDSVEISGVEDRFNASLGTYHDLLKIIKDKDFLDNEENEDILEDIVLTLTLFEDREMIEERLKTYAHLFDDKVMKQLKRRRYTGWGRLSRKLINGIRDKQSGKTILDFLKSDGFANRNFMQLIHDDSLTFKEDIQKAQVSGQGDSLHEHIANLAGSPAIKKGILQTVKVVDELVKVMGRHKPENIVIEMARENQTTQKGQKNSRERMKRIEEGIKELGSQILKEHPVENTQLQNEKLYLYYLQNGRDMYVDQELDINRLSDYDVDHIVPQSFLKDDSIDNKVLTRSDKARGKSDNVPSEEVVKKMKNYWRQLLNAKLITQRKFDNLTKAERGGLSELDKAGFIKRQLVETRQITKHVAQILDSRMNTKYDENDKLIREVKVITLKSKLVSDFRKDFQFYKVREINNYHHAHDAYLNAVVGTALIKKYPKLESEFVYGDYKVYDVRKMIAKSEQEIGKATAKYFFYSNIMNFFKTEITLANGEIRKRPLIETNGETGEIVWDKGRDFATVRKVLSMPQVNIVKKTEVQTGGFSKESILPKRNSDKLIARKKDWDPKKYGGFDSPTVAYSVLVVAKVEKGKSKKLKSVKELLGITIMERSSFEKNPIDFLEAKGYKEVKKDLIIKLPKYSLFELENGRKRMLASAGELQKGNELALPSKYVNFLYLASHYEKLKGSPEDNEQKQLFVEQHKHYLDEIIEQISEFSKRVILADANLDKVLSAYNKHRDKPIREQAENIIHLFTLTNLGAPAAFKYFDTTIDRKRYTSTKEVLDATLIHQSITGLYETRIDLSQLGGDGGGGGGSGGGGSGGGGSGGVLNLEEEYRLHEKPVPSSIDPSWLQLFPTVWAERAGMGLANQVPPVVVELRSGASPVAVRQYPMSKEAREGIRPHIQKFLDLGVLVPCRSPWNTPLLPVKKPGTNDYRPVQDLREINKRVQDIHPTVPNPYNLLSSLPPSYTWYSVLDLKDAFFCLRLHPNSQPLFAFEWKDPEKGNTGQLTWTRLPQGFKNSPTLFNEALHRDLAPFRALNPQVVLLQYVDDLLVAAPTYEDCKKGTQKLLQELSKLGYRVSAKKAQLCQREVTYLGYLLKEGKRWLTPARKATVMKIPVPTTPRQVREFLGKAGFCRLFIPGFASLAAPLYPLTKPSIPFIWTEEHQQAFDHIKKALLSAPALALPDLTKPFTLYIDERAGVARGVLTQTLGPWRRPVAYLSKKLDPVASGWPTCLKAVAAVALLLKDADKLTLGQNVTVIASHSLESIVRQPPDRWMTNARMTHYQSLLLNERVSFAPPAVLNPATLLPVESEATPVHRCSEILAEETGTRRDLEDQPLPGVPTWYTDGSSFITEGKRRAGAPIVDGKRTVWASSLPEGTSAQKAELVALTQALRLAEGKNINIYTDSRYAFATAHIHGAIYKQRGWLTSAGKDIKNKEEILALLEAIHLPRRVAIIHCPGHQRGSNPVATGNRRADEAAKQAALSTRVLAGTTKPAGKRTADGSEFEKRTADGSEFESPKKKAKVE

SEQ ID NO: 1459 - protein, 2094 aa, synthetic construct
MPAAKRVKLDGGDKKYSIGLDIGTNSVGWAVITDEYKVPSKKFKVLGNTDRHSIKKNLIGALLFDSGETAEATRLKRTARRRYTRRKNRICYLQEIFSNEMAKVDDSFFHRLEESFLVEEDKKHERHPIFGNIVDEVAYHEKYPTIYHLRKKLVDSTDKADLRLIYLALAHMIKFRGHFLIEGDLNPDNSDVDKLFIQLVQTYNQLFEENPINASGVDAKAILSARLSKSRRLENLIAQLPGEKKNGLFGNLIALSLGLTPNFKSNFDLAEDAKLQLSKDTYDDDLDNLLAQIGDQYADLFLAAKNLSDAILLSDILRVNTEITKAPLSASMIKRYDEHHQDLTLLKALVRQQLPEKYKEIFFDQSKNGYAGYIDGGASQEEFYKFIKPILEKMDGTEELLVKLNREDLLRKQRTFDNGSIPHQIHLGELHAILRRQEDFYPFLKDNREKIEKILTFRIPYYVGPLARGNSRFAWMTRKSEETITPWNFEEVVDKGASAQSFIERMTNFDKNLPNEKVLPKHSLLYEYFTVYNELTKVKYVTEGMRKPAFLSGEQKKAIVDLLFKTNRKVTVKQLKEDYFKKIECFDSVEISGVEDRFNASLGTYHDLLKIIKDKDFLDNEENEDILEDIVLTLTLFEDREMIEERLKTYAHLFDDKVMKQLKRRRYTGWGRLSRKLINGIRDKQSGKTILDFLKSDGFANRNFMQLIHDDSLTFKEDIQKAQVSGQGDSLHEHIANLAGSPAIKKGILQTVKVVDELVKVMGRHKPENIVIEMARENQTTQKGQKNSRERMKRIEEGIKELGSQILKEHPVENTQLQNEKLYLYYLQNGRDMYVDQELDINRLSDYDVDHIVPQSFLKDDSIDNKVLTRSDKARGKSDNVPSEEVVKKMKNYWRQLLNAKLITQRKFDNLTKAERGGLSELDKAGFIKRQLVETRQITKHVAQILDSRMNTKYDENDKLIREVKVITLKSKLVSDFRKDFQFYKVREINNYHHAHDAYLNAVVGTALIKKYPKLESEFVYGDYKVYDVRKMIAKSEQEIGKATAKYFFYSNIMNFFKTEITLANGEIRKRPLIETNGETGEIVWDKGRDFATVRKVLSMPQVNIVKKTEVQTGGFSKESILPKRNSDKLIARKKDWDPKKYGGFDSPTVAYSVLVVAKVEKGKSKKLKSVKELLGITIMERSSFEKNPIDFLEAKGYKEVKKDLIIKLPKYSLFELENGRKRMLASAGELQKGNELALPSKYVNFLYLASHYEKLKGSPEDNEQKQLFVEQHKHYLDEIIEQISEFSKRVILADANLDKVLSAYNKHRDKPIREQAENIIHLFTLTNLGAPAAFKYFDTTIDRKRYTSTKEVLDATLIHQSITGLYETRIDLSQLGGDGGPAPGGGEAAAKGGVLNLEEEYRLHEKPVPSSIDPSWLQLFPTVWAERAGMGLANQVPPVVVELRSGASPVAVRQYPMSKEAREGIRPHIQKFLDLGVLVPCRSPWNTPLLPVKKPGTNDYRPVQDLREINKRVQDIHPTVPNPYNLLSSLPPSYTWYSVLDLKDAFFCLRLHPNSQPLFAFEWKDPEKGNTGQLTWTRLPQGFKNSPTLFNEALHRDLAPFRALNPQVVLLQYVDDLLVAAPTYEDCKKGTQKLLQELSKLGYRVSAKKAQLCQREVTYLGYLLKEGKRWLTPARKATVMKIPVPTTPRQVREFLGKAGFCRLFIPGFASLAAPLYPLTKPSIPFIWTEEHQQAFDHIKKALLSAPALALPDLTKPFTLYIDERAGVARGVLTQTLGPWRRPVAYLSKKLDPVASGWPTCLKAVAAVALLLKDADKLTLGQNVTVIASHSLESIVRQPPDRWMTNARMTHYQSLLLNERVSFAPPAVLNPATLLPVESEATPVHRCSEILAEETGTRRDLEDQPLPGVPTWYTDGSSFITEGKRRAGAPIVDGKRTVWASSLPEGTSAQKAELVALTQALRLAEGKNINIYTDSRYAFATAHIHGAIYKQRGWLTSAGKDIKNKEEILALLEAIHLPRRVAIIHCPGHQRGSNPVATGNRRADEAAKQAALSTRVLAGTTKPAGKRTADGSEFEKRTADGSEFESPKKKAKVE

SEQ ID NO: 1460 - protein, 2092 aa, synthetic construct
MPAAKRVKLDGGDKKYSIGLDIGTNSVGWAVITDEYKVPSKKFKVLGNTDRHSIKKNLIGALLFDSGETAEATRLKRTARRRYTRRKNRICYLQEIFSNEMAKVDDSFFHRLEESFLVEEDKKHERHPIFGNIVDEVAYHEKYPTIYHLRKKLVDSTDKADLRLIYLALAHMIKFRGHFLIEGDLNPDNSDVDKLFIQLVQTYNQLFEENPINASGVDAKAILSARLSKSRRLENLIAQLPGEKKNGLFGNLIALSLGLTPNFKSNFDLAEDAKLQLSKDTYDDDLDNLLAQIGDQYADLFLAAKNLSDAILLSDILRVNTEITKAPLSASMIKRYDEHHQDLTLLKALVRQQLPEKYKEIFFDQSKNGYAGYIDGGASQEEFYKFIKPILEKMDGTEELLVKLNREDLLRKQRTFDNGSIPHQIHLGELHAILRRQEDFYPFLKDNREKIEKILTFRIPYYVGPLARGNSRFAWMTRKSEETITPWNFEEVVDKGASAQSFIERMTNFDKNLPNEKVLPKHSLLYEYFTVYNELTKVKYVTEGMRKPAFLSGEQKKAIVDLLFKTNRKVTVKQLKEDYFKKIECFDSVEISGVEDRFNASLGTYHDLLKIIKDKDFLDNEENEDILEDIVLTLTLFEDREMIEERLKTYAHLFDDKVMKQLKRRRYTGWGRLSRKLINGIRDKQSGKTILDFLKSDGFANRNFMQLIHDDSLTFKEDIQKAQVSGQGDSLHEHIANLAGSPAIKKGILQTVKVVDELVKVMGRHKPENIVIEMARENQTTQKGQKNSRERMKRIEEGIKELGSQILKEHPVENTQLQNEKLYLYYLQNGRDMYVDQELDINRLSDYDVDHIVPQSFLKDDSIDNKVLTRSDKARGKSDNVPSEEVVKKMKNYWRQLLNAKLITQRKFDNLTKAERGGLSELDKAGFIKRQLVETRQITKHVAQILDSRMNTKYDENDKLIREVKVITLKSKLVSDFRKDFQFYKVREINNYHHAHDAYLNAVVGTALIKKYPKLESEFVYGDYKVYDVRKMIAKSEQEIGKATAKYFFYSNIMNFFKTEITLANGEIRKRPLIETNGETGEIVWDKGRDFATVRKVLSMPQVNIVKKTEVQTGGFSKESILPKRNSDKLIARKKDWDPKKYGGFDSPTVAYSVLVVAKVEKGKSKKLKSVKELLGITIMERSSFEKNPIDFLEAKGYKEVKKDLIIKLPKYSLFELENGRKRMLASAGELQKGNELALPSKYVNFLYLASHYEKLKGSPEDNEQKQLFVEQHKHYLDEIIEQISEFSKRVILADANLDKVLSAYNKHRDKPIREQAENIIHLFTLTNLGAPAAFKYFDTTIDRKRYTSTKEVLDATLIHQSITGLYETRIDLSQLGGDGGPAPGGGGGSGGVLNLEEEYRLHEKPVPSSIDPSWLQLFPTVWAERAGMGLANQVPPVVVELRSGASPVAVRQYPMSKEAREGIRPHIQKFLDLGVLVPCRSPWNTPLLPVKKPGTNDYRPVQDLREINKRVQDIHPTVPNPYNLLSSLPPSYTWYSVLDLKDAFFCLRLHPNSQPLFAFEWKDPEKGNTGQLTWTRLPQGFKNSPTLFNEALHRDLAPFRALNPQVVLLQYVDDLLVAAPTYEDCKKGTQKLLQELSKLGYRVSAKKAQLCQREVTYLGYLLKEGKRWLTPARKATVMKIPVPTTPRQVREFLGKAGFCRLFIPGFASLAAPLYPLTKPSIPFIWTEEHQQAFDHIKKALLSAPALALPDLTKPFTLYIDERAGVARGVLTQTLGPWRRPVAYLSKKLDPVASGWPTCLKAVAAVALLLKDADKLTLGQNVTVIASHSLESIVRQPPDRWMTNARMTHYQSLLLNERVSFAPPAVLNPATLLPVESEATPVHRCSEILAEETGTRRDLEDQPLPGVPTWYTDGSSFITEGKRRAGAPIVDGKRTVWASSLPEGTSAQKAELVALTQALRLAEGKNINIYTDSRYAFATAHIHGAIYKQRGWLTSAGKDIKNKEEILALLEAIHLPRRVAIIHCPGHQRGSNPVATGNRRADEAAKQAALSTRVLAGTTKPAGKRTADGSEFEKRTADGSEFESPKKKAKVE

SEQ ID NO: 1461 - protein, 2094 aa, synthetic construct
MPAAKRVKLDGGDKKYSIGLDIGTNSVGWAVITDEYKVPSKKFKVLGNTDRHSIKKNLIGALLFDSGETAEATRLKRTARRRYTRRKNRICYLQEIFSNEMAKVDDSFFHRLEESFLVEEDKKHERHPIFGNIVDEVAYHEKYPTIYHLRKKLVDSTDKADLRLIYLALAHMIKFRGHFLIEGDLNPDNSDVDKLFIQLVQTYNQLFEENPINASGVDAKAILSARLSKSRRLENLIAQLPGEKKNGLFGNLIALSLGLTPNFKSNFDLAEDAKLQLSKDTYDDDLDNLLAQIGDQYADLFLAAKNLSDAILLSDILRVNTEITKAPLSASMIKRYDEHHQDLTLLKALVRQQLPEKYKEIFFDQSKNGYAGYIDGGASQEEFYKFIKPILEKMDGTEELLVKLNREDLLRKQRTFDNGSIPHQIHLGELHAILRRQEDFYPFLKDNREKIEKILTFRIPYYVGPLARGNSRFAWMTRKSEETITPWNFEEVVDKGASAQSFIERMTNFDKNLPNEKVLPKHSLLYEYFTVYNELTKVKYVTEGMRKPAFLSGEQKKAIVDLLFKTNRKVTVKQLKEDYFKKIECFDSVEISGVEDRFNASLGTYHDLLKIIKDKDFLDNEENEDILEDIVLTLTLFEDREMIEERLKTYAHLFDDKVMKQLKRRRYTGWGRLSRKLINGIRDKQSGKTILDFLKSDGFANRNFMQLIHDDSLTFKEDIQKAQVSGQGDSLHEHIANLAGSPAIKKGILQTVKVVDELVKVMGRHKPENIVIEMARENQTTQKGQKNSRERMKRIEEGIKELGSQILKEHPVENTQLQNEKLYLYYLQNGRDMYVDQELDINRLSDYDVDHIVPQSFLKDDSIDNKVLTRSDKARGKSDNVPSEEVVKKMKNYWRQLLNAKLITQRKFDNLTKAERGGLSELDKAGFIKRQLVETRQITKHVAQILDSRMNTKYDENDKLIREVKVITLKSKLVSDFRKDFQFYKVREINNYHHAHDAYLNAVVGTALIKKYPKLESEFVYGDYKVYDVRKMIAKSEQEIGKATAKYFFYSNIMNFFKTEITLANGEIRKRPLIETNGETGEIVWDKGRDFATVRKVLSMPQVNIVKKTEVQTGGFSKESILPKRNSDKLIARKKDWDPKKYGGFDSPTVAYSVLVVAKVEKGKSKKLKSVKELLGITIMERSSFEKNPIDFLEAKGYKEVKKDLIIKLPKYSLFELENGRKRMLASAGELQKGNELALPSKYVNFLYLASHYEKLKGSPEDNEQKQLFVEQHKHYLDEIIEQISEFSKRVILADANLDKVLSAYNKHRDKPIREQAENIIHLFTLTNLGAPAAFKYFDTTIDRKRYTSTKEVLDATLIHQSITGLYETRIDLSQLGGDGGGGGEAAAKGSSGGVLNLEEEYRLHEKPVPSSIDPSWLQLFPTVWAERAGMGLANQVPPVVVELRSGASPVAVRQYPMSKEAREGIRPHIQKFLDLGVLVPCRSPWNTPLLPVKKPGTNDYRPVQDLREINKRVQDIHPTVPNPYNLLSSLPPSYTWYSVLDLKDAFFCLRLHPNSQPLFAFEWKDPEKGNTGQLTWTRLPQGFKNSPTLFNEALHRDLAPFRALNPQVVLLQYVDDLLVAAPTYEDCKKGTQKLLQELSKLGYRVSAKKAQLCQREVTYLGYLLKEGKRWLTPARKATVMKIPVPTTPRQVREFLGKAGFCRLFIPGFASLAAPLYPLTKPSIPFIWTEEHQQAFDHIKKALLSAPALALPDLTKPFTLYIDERAGVARGVLTQTLGPWRRPVAYLSKKLDPVASGWPTCLKAVAAVALLLKDADKLTLGQNVTVIASHSLESIVRQPPDRWMTNARMTHYQSLLLNERVSFAPPAVLNPATLLPVESEATPVHRCSEILAEETGTRRDLEDQPLPGVPTWYTDGSSFITEGKRRAGAPIVDGKRTVWASSLPEGTSAQKAELVALTQALRLAEGKNINIYTDSRYAFATAHIHGAIYKQRGWLTSAGKDIKNKEEILALLEAIHLPRRVAIIHCPGHQRGSNPVATGNRRADEAAKQAALSTRVLAGTTKPAGKRTADGSEFEKRTADGSEFESPKKKAKVE

SEQ ID NO: 1462 - protein, 2088 aa, synthetic construct
MPAAKRVKLDGGDKKYSIGLDIGTNSVGWAVITDEYKVPSKKFKVLGNTDRHSIKKNLIGALLFDSGETAEATRLKRTARRRYTRRKNRICYLQEIFSNEMAKVDDSFFHRLEESFLVEEDKKHERHPIFGNIVDEVAYHEKYPTIYHLRKKLVDSTDKADLRLIYLALAHMIKFRGHFLIEGDLNPDNSDVDKLFIQLVQTYNQLFEENPINASGVDAKAILSARLSKSRRLENLIAQLPGEKKNGLFGNLIALSLGLTPNFKSNFDLAEDAKLQLSKDTYDDDLDNLLAQIGDQYADLFLAAKNLSDAILLSDILRVNTEITKAPLSASMIKRYDEHHQDLTLLKALVRQQLPEKYKEIFFDQSKNGYAGYIDGGASQEEFYKFIKPILEKMDGTEELLVKLNREDLLRKQRTFDNGSIPHQIHLGELHAILRRQEDFYPFLKDNREKIEKILTFRIPYYVGPLARGNSRFAWMTRKSEETITPWNFEEVVDKGASAQSFIERMTNFDKNLPNEKVLPKHSLLYEYFTVYNELTKVKYVTEGMRKPAFLSGEQKKAIVDLLFKTNRKVTVKQLKEDYFKKIECFDSVEISGVEDRFNASLGTYHDLLKIIKDKDFLDNEENEDILEDIVLTLTLFEDREMIEERLKTYAHLFDDKVMKQLKRRRYTGWGRLSRKLINGIRDKQSGKTILDFLKSDGFANRNFMQLIHDDSLTFKEDIQKAQVSGQGDSLHEHIANLAGSPAIKKGILQTVKVVDELVKVMGRHKPENIVIEMARENQTTQKGQKNSRERMKRIEEGIKELGSQILKEHPVENTQLQNEKLYLYYLQNGRDMYVDQELDINRLSDYDVDHIVPQSFLKDDSIDNKVLTRSDKARGKSDNVPSEEVVKKMKNYWRQLLNAKLITQRKFDNLTKAERGGLSELDKAGFIKRQLVETRQITKHVAQILDSRMNTKYDENDKLIREVKVITLKSKLVSDFRKDFQFYKVREINNYHHAHDAYLNAVVGTALIKKYPKLESEFVYGDYKVYDVRKMIAKSEQEIGKATAKYFFYSNIMNFFKTEITLANGEIRKRPLIETNGETGEIVWDKGRDFATVRKVLSMPQVNIVKKTEVQTGGFSKESILPKRNSDKLIARKKDWDPKKYGGFDSPTVAYSVLVVAKVEKGKSKKLKSVKELLGITIMERSSFEKNPIDFLEAKGYKEVKKDLIIKLPKYSLFELENGRKRMLASAGELQKGNELALPSKYVNFLYLASHYEKLKGSPEDNEQKQLFVEQHKHYLDEIIEQISEFSKRVILADANLDKVLSAYNKHRDKPIREQAENIIHLFTLTNLGAPAAFKYFDTTIDRKRYTSTKEVLDATLIHQSITGLYETRIDLSQLGGDGGGGGGSGGVLNLEEEYRLHEKPVPSSIDPSWLQLFPTVWAERAGMGLANQVPPVVVELRSGASPVAVRQYPMSKEAREGIRPHIQKFLDLGVLVPCRSPWNTPLLPVKKPGTNDYRPVQDLREINKRVQDIHPTVPNPYNLLSSLPPSYTWYSVLDLKDAFFCLRLHPNSQPLFAFEWKDPEKGNTGQLTWTRLPQGFKNSPTLFNEALHRDLAPFRALNPQVVLLQYVDDLLVAAPTYEDCKKGTQKLLQELSKLGYRVSAKKAQLCQREVTYLGYLLKEGKRWLTPARKATVMKIPVPTTPRQVREFLGKAGFCRLFIPGFASLAAPLYPLTKPSIPFIWTEEHQQAFDHIKKALLSAPALALPDLTKPFTLYIDERAGVARGVLTQTLGPWRRPVAYLSKKLDPVASGWPTCLKAVAAVALLLKDADKLTLGQNVTVIASHSLESIVRQPPDRWMTNARMTHYQSLLLNERVSFAPPAVLNPATLLPVESEATPVHRCSEILAEETGTRRDLEDQPLPGVPTWYTDGSSFITEGKRRAGAPIVDGKRTVWASSLPEGTSAQKAELVALTQALRLAEGKNINIYTDSRYAFATAHIHGAIYKQRGWLTSAGKDIKNKEEILALLEAIHLPRRVAIIHCPGHQRGSNPVATGNRRADEAAKQAALSTRVLAGTTKPAGKRTADGSEFEKRTADGSEFESPKKKAKVE

SEQ ID NO: 1463 - protein, 2094 aa, synthetic construct
MPAAKRVKLDGGDKKYSIGLDIGTNSVGWAVITDEYKVPSKKFKVLGNTDRHSIKKNLIGALLFDSGETAEATRLKRTARRRYTRRKNRICYLQEIFSNEMAKVDDSFFHRLEESFLVEEDKKHERHPIFGNIVDEVAYHEKYPTIYHLRKKLVDSTDKADLRLIYLALAHMIKFRGHFLIEGDLNPDNSDVDKLFIQLVQTYNQLFEENPINASGVDAKAILSARLSKSRRLENLIAQLPGEKKNGLFGNLIALSLGLTPNFKSNFDLAEDAKLQLSKDTYDDDLDNLLAQIGDQYADLFLAAKNLSDAILLSDILRVNTEITKAPLSASMIKRYDEHHQDLTLLKALVRQQLPEKYKEIFFDQSKNGYAGYIDGGASQEEFYKFIKPILEKMDGTEELLVKLNREDLLRKQRTFDNGSIPHQIHLGELHAILRRQEDFYPFLKDNREKIEKILTFRIPYYVGPLARGNSRFAWMTRKSEETITPWNFEEVVDKGASAQSFIERMTNFDKNLPNEKVLPKHSLLYEYFTVYNELTKVKYVTEGMRKPAFLSGEQKKAIVDLLFKTNRKVTVKQLKEDYFKKIECFDSVEISGVEDRFNASLGTYHDLLKIIKDKDFLDNEENEDILEDIVLTLTLFEDREMIEERLKTYAHLFDDKVMKQLKRRRYTGWGRLSRKLINGIRDKQSGKTILDFLKSDGFANRNFMQLIHDDSLTFKEDIQKAQVSGQGDSLHEHIANLAGSPAIKKGILQTVKVVDELVKVMGRHKPENIVIEMARENQTTQKGQKNSRERMKRIEEGIKELGSQILKEHPVENTQLQNEKLYLYYLQNGRDMYVDQELDINRLSDYDVDHIVPQSFLKDDSIDNKVLTRSDKARGKSDNVPSEEVVKKMKNYWRQLLNAKLITQRKFDNLTKAERGGLSELDKAGFIKRQLVETRQITKHVAQILDSRMNTKYDENDKLIREVKVITLKSKLVSDFRKDFQFYKVREINNYHHAHDAYLNAVVGTALIKKYPKLESEFVYGDYKVYDVRKMIAKSEQEIGKATAKYFFYSNIMNFFKTEITLANGEIRKRPLIETNGETGEIVWDKGRDFATVRKVLSMPQVNIVKKTEVQTGGFSKESILPKRNSDKLIARKKDWDPKKYGGFDSPTVAYSVLVVAKVEKGKSKKLKSVKELLGITIMERSSFEKNPIDFLEAKGYKEVKKDLIIKLPKYSLFELENGRKRMLASAGELQKGNELALPSKYVNFLYLASHYEKLKGSPEDNEQKQLFVEQHKHYLDEIIEQISEFSKRVILADANLDKVLSAYNKHRDKPIREQAENIIHLFTLTNLGAPAAFKYFDTTIDRKRYTSTKEVLDATLIHQSITGLYETRIDLSQLGGDGGGGSEAAAKGGGGGVLNLEEEYRLHEKPVPSSIDPSWLQLFPTVWAERAGMGLANQVPPVVVELRSGASPVAVRQYPMSKEAREGIRPHIQKFLDLGVLVPCRSPWNTPLLPVKKPGTNDYRPVQDLREINKRVQDIHPTVPNPYNLLSSLPPSYTWYSVLDLKDAFFCLRLHPNSQPLFAFEWKDPEKGNTGQLTWTRLPQGFKNSPTLFNEALHRDLAPFRALNPQVVLLQYVDDLLVAAPTYEDCKKGTQKLLQELSKLGYRVSAKKAQLCQREVTYLGYLLKEGKRWLTPARKATVMKIPVPTTPRQVREFLGKAGFCRLFIPGFASLAAPLYPLTKPSIPFIWTEEHQQAFDHIKKALLSAPALALPDLTKPFTLYIDERAGVARGVLTQTLGPWRRPVAYLSKKLDPVASGWPTCLKAVAAVALLLKDADKLTLGQNVTVIASHSLESIVRQPPDRWMTNARMTHYQSLLLNERVSFAPPAVLNPATLLPVESEATPVHRCSEILAEETGTRRDLEDQPLPGVPTWYTDGSSFITEGKRRAGAPIVDGKRTVWASSLPEGTSAQKAELVALTQALRLAEGKNINIYTDSRYAFATAHIHGAIYKQRGWLTSAGKDIKNKEEILALLEAIHLPRRVAIIHCPGHQRGSNPVATGNRRADEAAKQAALSTRVLAGTTKPAGKRTADGSEFEKRTADGSEFESPKKKAKVE

SEQ ID NO: 1464 - protein, 2086 aa, synthetic construct
MPAAKRVKLDGGDKKYSIGLDIGTNSVGWAVITDEYKVPSKKFKVLGNTDRHSIKKNLIGALLFDSGETAEATRLKRTARRRYTRRKNRICYLQEIFSNEMAKVDDSFFHRLEESFLVEEDKKHERHPIFGNIVDEVAYHEKYPTIYHLRKKLVDSTDKADLRLIYLALAHMIKFRGHFLIEGDLNPDNSDVDKLFIQLVQTYNQLFEENPINASGVDAKAILSARLSKSRRLENLIAQLPGEKKNGLFGNLIALSLGLTPNFKSNFDLAEDAKLQLSKDTYDDDLDNLLAQIGDQYADLFLAAKNLSDAILLSDILRVNTEITKAPLSASMIKRYDEHHQDLTLLKALVRQQLPEKYKEIFFDQSKNGYAGYIDGGASQEEFYKFIKPILEKMDGTEELLVKLNREDLLRKQRTFDNGSIPHQIHLGELHAILRRQEDFYPFLKDNREKIEKILTFRIPYYVGPLARGNSRFAWMTRKSEETITPWNFEEVVDKGASAQSFIERMTNFDKNLPNEKVLPKHSLLYEYFTVYNELTKVKYVTEGMRKPAFLSGEQKKAIVDLLFKTNRKVTVKQLKEDYFKKIECFDSVEISGVEDRFNASLGTYHDLLKIIKDKDFLDNEENEDILEDIVLTLTLFEDREMIEERLKTYAHLFDDKVMKQLKRRRYTGWGRLSRKLINGIRDKQSGKTILDFLKSDGFANRNFMQLIHDDSLTFKEDIQKAQVSGQGDSLHEHIANLAGSPAIKKGILQTVKVVDELVKVMGRHKPENIVIEMARENQTTQKGQKNSRERMKRIEEGIKELGSQILKEHPVENTQLQNEKLYLYYLQNGRDMYVDQELDINRLSDYDVDHIVPQSFLKDDSIDNKVLTRSDKARGKSDNVPSEEVVKKMKNYWRQLLNAKLITQRKFDNLTKAERGGLSELDKAGFIKRQLVETRQITKHVAQILDSRMNTKYDENDKLIREVKVITLKSKLVSDFRKDFQFYKVREINNYHHAHDAYLNAVVGTALIKKYPKLESEFVYGDYKVYDVRKMIAKSEQEIGKATAKYFFYSNIMNFFKTEITLANGEIRKRPLIETNGETGEIVWDKGRDFATVRKVLSMPQVNIVKKTEVQTGGFSKESILPKRNSDKLIARKKDWDPKKYGGFDSPTVAYSVLVVAKVEKGKSKKLKSVKELLGITIMERSSFEKNPIDFLEAKGYKEVKKDLIIKLPKYSLFELENGRKRMLASAGELQKGNELALPSKYVNFLYLASHYEKLKGSPEDNEQKQLFVEQHKHYLDEIIEQISEFSKRVILADANLDKVLSAYNKHRDKPIREQAENIIHLFTLTNLGAPAAFKYFDTTIDRKRYTSTKEVLDATLIHQSITGLYETRIDLSQLGGDGGGGSGGVLNLEEEYRLHEKPVPSSIDPSWLQLFPTVWAERAGMGLANQVPPVVVELRSGASPVAVRQYPMSKEAREGIRPHIQKFLDLGVLVPCRSPWNTPLLPVKKPGTNDYRPVQDLREINKRVQDIHPTVPNPYNLLSSLPPSYTWYSVLDLKDAFFCLRLHPNSQPLFAFEWKDPEKGNTGQLTWTRLPQGFKNSPTLFNEALHRDLAPFRALNPQVVLLQYVDDLLVAAPTYEDCKKGTQKLLQELSKLGYRVSAKKAQLCQREVTYLGYLLKEGKRWLTPARKATVMKIPVPTTPRQVREFLGKAGFCRLFIPGFASLAAPLYPLTKPSIPFIWTEEHQQAFDHIKKALLSAPALALPDLTKPFTLYIDERAGVARGVLTQTLGPWRRPVAYLSKKLDPVASGWPTCLKAVAAVALLLKDADKLTLGQNVTVIASHSLESIVRQPPDRWMTNARMTHYQSLLLNERVSFAPPAVLNPATLLPVESEATPVHRCSEILAEETGTRRDLEDQPLPGVPTWYTDGSSFITEGKRRAGAPIVDGKRTVWASSLPEGTSAQKAELVALTQALRLAEGKNINIYTDSRYAFATAHIHGAIYKQRGWLTSAGKDIKNKEEILALLEAIHLPRRVAIIHCPGHQRGSNPVATGNRRADEAAKQAALSTRVLAGTTKPAGKRTADGSEFEKRTADGSEFESPKKKAKVE

SEQ ID NO: 1465 - protein, 2091 aa, synthetic construct
MPAAKRVKLDGGDKKYSIGLDIGTNSVGWAVITDEYKVPSKKFKVLGNTDRHSIKKNLIGALLFDSGETAEATRLKRTARRRYTRRKNRICYLQEIFSNEMAKVDDSFFHRLEESFLVEEDKKHERHPIFGNIVDEVAYHEKYPTIYHLRKKLVDSTDKADLRLIYLALAHMIKFRGHFLIEGDLNPDNSDVDKLFIQLVQTYNQLFEENPINASGVDAKAILSARLSKSRRLENLIAQLPGEKKNGLFGNLIALSLGLTPNFKSNFDLAEDAKLQLSKDTYDDDLDNLLAQIGDQYADLFLAAKNLSDAILLSDILRVNTEITKAPLSASMIKRYDEHHQDLTLLKALVRQQLPEKYKEIFFDQSKNGYAGYIDGGASQEEFYKFIKPILEKMDGTEELLVKLNREDLLRKQRTFDNGSIPHQIHLGELHAILRRQEDFYPFLKDNREKIEKILTFRIPYYVGPLARGNSRFAWMTRKSEETITPWNFEEVVDKGASAQSFIERMTNFDKNLPNEKVLPKHSLLYEYFTVYNELTKVKYVTEGMRKPAFLSGEQKKAIVDLLFKTNRKVTVKQLKEDYFKKIECFDSVEISGVEDRFNASLGTYHDLLKIIKDKDFLDNEENEDILEDIVLTLTLFEDREMIEERLKTYAHLFDDKVMKQLKRRRYTGWGRLSRKLINGIRDKQSGKTILDFLKSDGFANRNFMQLIHDDSLTFKEDIQKAQVSGQGDSLHEHIANLAGSPAIKKGILQTVKVVDELVKVMGRHKPENIVIEMARENQTTQKGQKNSRERMKRIEEGIKELGSQILKEHPVENTQLQNEKLYLYYLQNGRDMYVDQELDINRLSDYDVDHIVPQSFLKDDSIDNKVLTRSDKARGKSDNVPSEEVVKKMKNYWRQLLNAKLITQRKFDNLTKAERGGLSELDKAGFIKRQLVETRQITKHVAQILDSRMNTKYDENDKLIREVKVITLKSKLVSDFRKDFQFYKVREINNYHHAHDAYLNAVVGTALIKKYPKLESEFVYGDYKVYDVRKMIAKSEQEIGKATAKYFFYSNIMNFFKTEITLANGEIRKRPLIETNGETGEIVWDKGRDFATVRKVLSMPQVNIVKKTEVQTGGFSKESILPKRNSDKLIARKKDWDPKKYGGFDSPTVAYSVLVVAKVEKGKSKKLKSVKELLGITIMERSSFEKNPIDFLEAKGYKEVKKDLIIKLPKYSLFELENGRKRMLASAGELQKGNELALPSKYVNFLYLASHYEKLKGSPEDNEQKQLFVEQHKHYLDEIIEQISEFSKRVILADANLDKVLSAYNKHRDKPIREQAENIIHLFTLTNLGAPAAFKYFDTTIDRKRYTSTKEVLDATLIHQSITGLYETRIDLSQLGGDGGGGGGGGGGGGVLNLEEEYRLHEKPVPSSIDPSWLQLFPTVWAERAGMGLANQVPPVVVELRSGASPVAVRQYPMSKEAREGIRPHIQKFLDLGVLVPCRSPWNTPLLPVKKPGTNDYRPVQDLREINKRVQDIHPTVPNPYNLLSSLPPSYTWYSVLDLKDAFFCLRLHPNSQPLFAFEWKDPEKGNTGQLTWTRLPQGFKNSPTLFNEALHRDLAPFRALNPQVVLLQYVDDLLVAAPTYEDCKKGTQKLLQELSKLGYRVSAKKAQLCQREVTYLGYLLKEGKRWLTPARKATVMKIPVPTTPRQVREFLGKAGFCRLFIPGFASLAAPLYPLTKPSIPFIWTEEHQQAFDHIKKALLSAPALALPDLTKPFTLYIDERAGVARGVLTQTLGPWRRPVAYLSKKLDPVASGWPTCLKAVAAVALLLKDADKLTLGQNVTVIASHSLESIVRQPPDRWMTNARMTHYQSLLLNERVSFAPPAVLNPATLLPVESEATPVHRCSEILAEETGTRRDLEDQPLPGVPTWYTDGSSFITEGKRRAGAPIVDGKRTVWASSLPEGTSAQKAELVALTQALRLAEGKNINIYTDSRYAFATAHIHGAIYKQRGWLTSAGKDIKNKEEILALLEAIHLPRRVAIIHCPGHQRGSNPVATGNRRADEAAKQAALSTRVLAGTTKPAGKRTADGSEFEKRTADGSEFESPKKKAKVE

SEQ ID NO: 1466 - protein, 2094 aa, synthetic construct
MPAAKRVKLDGGDKKYSIGLDIGTNSVGWAVITDEYKVPSKKFKVLGNTDRHSIKKNLIGALLFDSGETAEATRLKRTARRRYTRRKNRICYLQEIFSNEMAKVDDSFFHRLEESFLVEEDKKHERHPIFGNIVDEVAYHEKYPTIYHLRKKLVDSTDKADLRLIYLALAHMIKFRGHFLIEGDLNPDNSDVDKLFIQLVQTYNQLFEENPINASGVDAKAILSARLSKSRRLENLIAQLPGEKKNGLFGNLIALSLGLTPNFKSNFDLAEDAKLQLSKDTYDDDLDNLLAQIGDQYADLFLAAKNLSDAILLSDILRVNTEITKAPLSASMIKRYDEHHQDLTLLKALVRQQLPEKYKEIFFDQSKNGYAGYIDGGASQEEFYKFIKPILEKMDGTEELLVKLNREDLLRKQRTFDNGSIPHQIHLGELHAILRRQEDFYPFLKDNREKIEKILTFRIPYYVGPLARGNSRFAWMTRKSEETITPWNFEEVVDKGASAQSFIERMTNFDKNLPNEKVLPKHSLLYEYFTVYNELTKVKYVTEGMRKPAFLSGEQKKAIVDLLFKTNRKVTVKQLKEDYFKKIECFDSVEISGVEDRFNASLGTYHDLLKIIKDKDFLDNEENEDILEDIVLTLTLFEDREMIEERLKTYAHLFDDKVMKQLKRRRYTGWGRLSRKLINGIRDKQSGKTILDFLKSDGFANRNFMQLIHDDSLTFKEDIQKAQVSGQGDSLHEHIANLAGSPAIKKGILQTVKVVDELVKVMGRHKPENIVIEMARENQTTQKGQKNSRERMKRIEEGIKELGSQILKEHPVENTQLQNEKLYLYYLQNGRDMYVDQELDINRLSDYDVDHIVPQSFLKDDSIDNKVLTRSDKARGKSDNVPSEEVVKKMKNYWRQLLNAKLITQRKFDNLTKAERGGLSELDKAGFIKRQLVETRQITKHVAQILDSRMNTKYDENDKLIREVKVITLKSKLVSDFRKDFQFYKVREINNYHHAHDAYLNAVVGTALIKKYPKLESEFVYGDYKVYDVRKMIAKSEQEIGKATAKYFFYSNIMNFFKTEITLANGEIRKRPLIETNGETGEIVWDKGRDFATVRKVLSMPQVNIVKKTEVQTGGFSKESILPKRNSDKLIARKKDWDPKKYGGFDSPTVAYSVLVVAKVEKGKSKKLKSVKELLGITIMERSSFEKNPIDFLEAKGYKEVKKDLIIKLPKYSLFELENGRKRMLASAGELQKGNELALPSKYVNFLYLASHYEKLKGSPEDNEQKQLFVEQHKHYLDEIIEQISEFSKRVILADANLDKVLSAYNKHRDKPIREQAENIIHLFTLTNLGAPAAFKYFDTTIDRKRYTSTKEVLDATLIHQSITGLYETRIDLSQLGGDGGGSSGGGEAAAKGGVLNLEEEYRLHEKPVPSSIDPSWLQLFPTVWAERAGMGLANQVPPVVVELRSGASPVAVRQYPMSKEAREGIRPHIQKFLDLGVLVPCRSPWNTPLLPVKKPGTNDYRPVQDLREINKRVQDIHPTVPNPYNLLSSLPPSYTWYSVLDLKDAFFCLRLHPNSQPLFAFEWKDPEKGNTGQLTWTRLPQGFKNSPTLFNEALHRDLAPFRALNPQVVLLQYVDDLLVAAPTYEDCKKGTQKLLQELSKLGYRVSAKKAQLCQREVTYLGYLLKEGKRWLTPARKATVMKIPVPTTPRQVREFLGKAGFCRLFIPGFASLAAPLYPLTKPSIPFIWTEEHQQAFDHIKKALLSAPALALPDLTKPFTLYIDERAGVARGVLTQTLGPWRRPVAYLSKKLDPVASGWPTCLKAVAAVALLLKDADKLTLGQNVTVIASHSLESIVRQPPDRWMTNARMTHYQSLLLNERVSFAPPAVLNPATLLPVESEATPVHRCSEILAEETGTRRDLEDQPLPGVPTWYTDGSSFITEGKRRAGAPIVDGKRTVWASSLPEGTSAQKAELVALTQALRLAEGKNINIYTDSRYAFATAHIHGAIYKQRGWLTSAGKDIKNKEEILALLEAIHLPRRVAIIHCPGHQRGSNPVATGNRRADEAAKQAALSTRVLAGTTKPAGKRTADGSEFEKRTADGSEFESPKKKAKVE

SEQ ID NO: 1467 - protein, 2094 aa, synthetic construct
MPAAKRVKLDGGDKKYSIGLDIGTNSVGWAVITDEYKVPSKKFKVLGNTDRHSIKKNLIGALLFDSGETAEATRLKRTARRRYTRRKNRICYLQEIFSNEMAKVDDSFFHRLEESFLVEEDKKHERHPIFGNIVDEVAYHEKYPTIYHLRKKLVDSTDKADLRLIYLALAHMIKFRGHFLIEGDLNPDNSDVDKLFIQLVQTYNQLFEENPINASGVDAKAILSARLSKSRRLENLIAQLPGEKKNGLFGNLIALSLGLTPNFKSNFDLAEDAKLQLSKDTYDDDLDNLLAQIGDQYADLFLAAKNLSDAILLSDILRVNTEITKAPLSASMIKRYDEHHQDLTLLKALVRQQLPEKYKEIFFDQSKNGYAGYIDGGASQEEFYKFIKPILEKMDGTEELLVKLNREDLLRKQRTFDNGSIPHQIHLGELHAILRRQEDFYPFLKDNREKIEKILTFRIPYYVGPLARGNSRFAWMTRKSEETITPWNFEEVVDKGASAQSFIERMTNFDKNLPNEKVLPKHSLLYEYFTVYNELTKVKYVTEGMRKPAFLSGEQKKAIVDLLFKTNRKVTVKQLKEDYFKKIECFDSVEISGVEDRFNASLGTYHDLLKIIKDKDFLDNEENEDILEDIVLTLTLFEDREMIEERLKTYAHLFDDKVMKQLKRRRYTGWGRLSRKLINGIRDKQSGKTILDFLKSDGFANRNFMQLIHDDSLTFKEDIQKAQVSGQGDSLHEHIANLAGSPAIKKGILQTVKVVDELVKVMGRHKPENIVIEMARENQTTQKGQKNSRERMKRIEEGIKELGSQILKEHPVENTQLQNEKLYLYYLQNGRDMYVDQELDINRLSDYDVDHIVPQSFLKDDSIDNKVLTRSDKARGKSDNVPSEEVVKKMKNYWRQLLNAKLITQRKFDNLTKAERGGLSELDKAGFIKRQLVETRQITKHVAQILDSRMNTKYDENDKLIREVKVITLKSKLVSDFRKDFQFYKVREINNYHHAHDAYLNAVVGTALIKKYPKLESEFVYGDYKVYDVRKMIAKSEQEIGKATAKYFFYSNIMNFFKTEITLANGEIRKRPLIETNGETGEIVWDKGRDFATVRKVLSMPQVNIVKKTEVQTGGFSKESILPKRNSDKLIARKKDWDPKKYGGFDSPTVAYSVLVVAKVEKGKSKKLKSVKELLGITIMERSSFEKNPIDFLEAKGYKEVKKDLIIKLPKYSLFELENGRKRMLASAGELQKGNELALPSKYVNFLYLASHYEKLKGSPEDNEQKQLFVEQHKHYLDEIIEQISEFSKRVILADANLDKVLSAYNKHRDKPIREQAENIIHLFTLTNLGAPAAFKYFDTTIDRKRYTSTKEVLDATLIHQSITGLYETRIDLSQLGGDGGEAAAKGSSPAPGGVLNLEEEYRLHEKPVPSSIDPSWLQLFPTVWAERAGMGLANQVPPVVVELRSGASPVAVRQYPMSKEAREGIRPHIQKFLDLGVLVPCRSPWNTPLLPVKKPGTNDYRPVQDLREINKRVQDIHPTVPNPYNLLSSLPPSYTWYSVLDLKDAFFCLRLHPNSQPLFAFEWKDPEKGNTGQLTWTRLPQGFKNSPTLFNEALHRDLAPFRALNPQVVLLQYVDDLLVAAPTYEDCKKGTQKLLQELSKLGYRVSAKKAQLCQREVTYLGYLLKEGKRWLTPARKATVMKIPVPTTPRQVREFLGKAGFCRLFIPGFASLAAPLYPLTKPSIPFIWTEEHQQAFDHIKKALLSAPALALPDLTKPFTLYIDERAGVARGVLTQTLGPWRRPVAYLSKKLDPVASGWPTCLKAVAAVALLLKDADKLTLGQNVTVIASHSLESIVRQPPDRWMTNARMTHYQSLLLNERVSFAPPAVLNPATLLPVESEATPVHRCSEILAEETGTRRDLEDQPLPGVPTWYTDGSSFITEGKRRAGAPIVDGKRTVWASSLPEGTSAQKAELVALTQALRLAEGKNINIYTDSRYAFATAHIHGAIYKQRGWLTSAGKDIKNKEEILALLEAIHLPRRVAIIHCPGHQRGSNPVATGNRRADEAAKQAALSTRVLAGTTKPAGKRTADGSEFEKRTADGSEFESPKKKAKVE

SEQ ID NO: 1468 - protein, 2094 aa, synthetic construct
MPAAKRVKLDGGDKKYSIGLDIGTNSVGWAVITDEYKVPSKKFKVLGNTDRHSIKKNLIGALLFDSGETAEATRLKRTARRRYTRRKNRICYLQEIFSNEMAKVDDSFFHRLEESFLVEEDKKHERHPIFGNIVDEVAYHEKYPTIYHLRKKLVDSTDKADLRLIYLALAHMIKFRGHFLIEGDLNPDNSDVDKLFIQLVQTYNQLFEENPINASGVDAKAILSARLSKSRRLENLIAQLPGEKKNGLFGNLIALSLGLTPNFKSNFDLAEDAKLQLSKDTYDDDLDNLLAQIGDQYADLFLAAKNLSDAILLSDILRVNTEITKAPLSASMIKRYDEHHQDLTLLKALVRQQLPEKYKEIFFDQSKNGYAGYIDGGASQEEFYKFIKPILEKMDGTEELLVKLNREDLLRKQRTFDNGSIPHQIHLGELHAILRRQEDFYPFLKDNREKIEKILTFRIPYYVGPLARGNSRFAWMTRKSEETITPWNFEEVVDKGASAQSFIERMTNFDKNLPNEKVLPKHSLLYEYFTVYNELTKVKYVTEGMRKPAFLSGEQKKAIVDLLFKTNRKVTVKQLKEDYFKKIECFDSVEISGVEDRFNASLGTYHDLLKIIKDKDFLDNEENEDILEDIVLTLTLFEDREMIEERLKTYAHLFDDKVMKQLKRRRYTGWGRLSRKLINGIRDKQSGKTILDFLKSDGFANRNFMQLIHDDSLTFKEDIQKAQVSGQGDSLHEHIANLAGSPAIKKGILQTVKVVDELVKVMGRHKPENIVIEMARENQTTQKGQKNSRERMKRIEEGIKELGSQILKEHPVENTQLQNEKLYLYYLQNGRDMYVDQELDINRLSDYDVDHIVPQSFLKDDSIDNKVLTRSDKARGKSDNVPSEEVVKKMKNYWRQLLNAKLITQRKFDNLTKAERGGLSELDKAGFIKRQLVETRQITKHVAQILDSRMNTKYDENDKLIREVKVITLKSKLVSDFRKDFQFYKVREINNYHHAHDAYLNAVVGTALIKKYPKLESEFVYGDYKVYDVRKMIAKSEQEIGKATAKYFFYSNIMNFFKTEITLANGEIRKRPLIETNGETGEIVWDKGRDFATVRKVLSMPQVNIVKKTEVQTGGFSKESILPKRNSDKLIARKKDWDPKKYGGFDSPTVAYSVLVVAKVEKGKSKKLKSVKELLGITIMERSSFEKNPIDFLEAKGYKEVKKDLIIKLPKYSLFELENGRKRMLASAGELQKGNELALPSKYVNFLYLASHYEKLKGSPEDNEQKQLFVEQHKHYLDEIIEQISEFSKRVILADANLDKVLSAYNKHRDKPIREQAENIIHLFTLTNLGAPAAFKYFDTTIDRKRYTSTKEVLDATLIHQSITGLYETRIDLSQLGGDGGGGSEAAAKPAPGGVLNLEEEYRLHEKPVPSSIDPSWLQLFPTVWAERAGMGLANQVPPVVVELRSGASPVAVRQYPMSKEAREGIRPHIQKFLDLGVLVPCRSPWNTPLLPVKKPGTNDYRPVQDLREINKRVQDIHPTVPNPYNLLSSLPPSYTWYSVLDLKDAFFCLRLHPNSQPLFAFEWKDPEKGNTGQLTWTRLPQGFKNSPTLFNEALHRDLAPFRALNPQVVLLQYVDDLLVAAPTYEDCKKGTQKLLQELSKLGYRVSAKKAQLCQREVTYLGYLLKEGKRWLTPARKATVMKIPVPTTPRQVREFLGKAGFCRLFIPGFASLAAPLYPLTKPSIPFIWTEEHQQAFDHIKKALLSAPALALPDLTKPFTLYIDERAGVARGVLTQTLGPWRRPVAYLSKKLDPVASGWPTCLKAVAAVALLLKDADKLTLGQNVTVIASHSLESIVRQPPDRWMTNARMTHYQSLLLNERVSFAPPAVLNPATLLPVESEATPVHRCSEILAEETGTRRDLEDQPLPGVPTWYTDGSSFITEGKRRAGAPIVDGKRTVWASSLPEGTSAQKAELVALTQALRLAEGKNINIYTDSRYAFATAHIHGAIYKQRGWLTSAGKDIKNKEEILALLEAIHLPRRVAIIHCPGHQRGSNPVATGNRRADEAAKQAALSTRVLAGTTKPAGKRTADGSEFEKRTADGSEFESPKKKAKVE

SEQ ID NO: 1469 - protein, 2094 aa, synthetic construct
MPAAKRVKLDGGDKKYSIGLDIGTNSVGWAVITDEYKVPSKKFKVLGNTDRHSIKKNLIGALLFDSGETAEATRLKRTARRRYTRRKNRICYLQEIFSNEMAKVDDSFFHRLEESFLVEEDKKHERHPIFGNIVDEVAYHEKYPTIYHLRKKLVDSTDKADLRLIYLALAHMIKFRGHFLIEGDLNPDNSDVDKLFIQLVQTYNQLFEENPINASGVDAKAILSARLSKSRRLENLIAQLPGEKKNGLFGNLIALSLGLTPNFKSNFDLAEDAKLQLSKDTYDDDLDNLLAQIGDQYADLFLAAKNLSDAILLSDILRVNTEITKAPLSASMIKRYDEHHQDLTLLKALVRQQLPEKYKEIFFDQSKNGYAGYIDGGASQEEFYKFIKPILEKMDGTEELLVKLNREDLLRKQRTFDNGSIPHQIHLGELHAILRRQEDFYPFLKDNREKIEKILTFRIPYYVGPLARGNSRFAWMTRKSEETITPWNFEEVVDKGASAQSFIERMTNFDKNLPNEKVLPKHSLLYEYFTVYNELTKVKYVTEGMRKPAFLSGEQKKAIVDLLFKTNRKVTVKQLKEDYFKKIECFDSVEISGVEDRFNASLGTYHDLLKIIKDKDFLDNEENEDILEDIVLTLTLFEDREMIEERLKTYAHLFDDKVMKQLKRRRYTGWGRLSRKLINGIRDKQSGKTILDFLKSDGFANRNFMQLIHDDSLTFKEDIQKAQVSGQGDSLHEHIANLAGSPAIKKGILQTVKVVDELVKVMGRHKPENIVIEMARENQTTQKGQKNSRERMKRIEEGIKELGSQILKEHPVENTQLQNEKLYLYYLQNGRDMYVDQELDINRLSDYDVDHIVPQSFLKDDSIDNKVLTRSDKARGKSDNVPSEEVVKKMKNYWRQLLNAKLITQRKFDNLTKAERGGLSELDKAGFIKRQLVETRQITKHVAQILDSRMNTKYDENDKLIREVKVITLKSKLVSDFRKDFQFYKVREINNYHHAHDAYLNAVVGTALIKKYPKLESEFVYGDYKVYDVRKMIAKSEQEIGKATAKYFFYSNIMNFFKTEITLANGEIRKRPLIETNGETGEIVWDKGRDFATVRKVLSMPQVNIVKKTEVQTGGFSKESILPKRNSDKLIARKKDWDPKKYGGFDSPTVAYSVLVVAKVEKGKSKKLKSVKELLGITIMERSSFEKNPIDFLEAKGYKEVKKDLIIKLPKYSLFELENGRKRMLASAGELQKGNELALPSKYVNFLYLASHYEKLKGSPEDNEQKQLFVEQHKHYLDEIIEQISEFSKRVILADANLDKVLSAYNKHRDKPIREQAENIIHLFTLTNLGAPAAFKYFDTTIDRKRYTSTKEVLDATLIHQSITGLYETRIDLSQLGGDGGEAAAKPAPGGSGGVLNLEEEYRLHEKPVPSSIDPSWLQLFPTVWAERAGMGLANQVPPVVVELRSGASPVAVRQYPMSKEAREGIRPHIQKFLDLGVLVPCRSPWNTPLLPVKKPGTNDYRPVQDLREINKRVQDIHPTVPNPYNLLSSLPPSYTWYSVLDLKDAFFCLRLHPNSQPLFAFEWKDPEKGNTGQLTWTRLPQGFKNSPTLFNEALHRDLAPFRALNPQVVLLQYVDDLLVAAPTYEDCKKGTQKLLQELSKLGYRVSAKKAQLCQREVTYLGYLLKEGKRWLTPARKATVMKIPVPTTPRQVREFLGKAGFCRLFIPGFASLAAPLYPLTKPSIPFIWTEEHQQAFDHIKKALLSAPALALPDLTKPFTLYIDERAGVARGVLTQTLGPWRRPVAYLSKKLDPVASGWPTCLKAVAAVALLLKDADKLTLGQNVTVIASHSLESIVRQPPDRWMTNARMTHYQSLLLNERVSFAPPAVLNPATLLPVESEATPVHRCSEILAEETGTRRDLEDQPLPGVPTWYTDGSSFITEGKRRAGAPIVDGKRTVWASSLPEGTSAQKAELVALTQALRLAEGKNINIYTDSRYAFATAHIHGAIYKQRGWLTSAGKDIKNKEEILALLEAIHLPRRVAIIHCPGHQRGSNPVATGNRRADEAAKQAALSTRVLAGTTKPAGKRTADGSEFEKRTADGSEFESPKKKAKVE

SEQ ID NO: 1470 - protein, 2089 aa, synthetic construct
MPAAKRVKLDGGDKKYSIGLDIGTNSVGWAVITDEYKVPSKKFKVLGNTDRHSIKKNLIGALLFDSGETAEATRLKRTARRRYTRRKNRICYLQEIFSNEMAKVDDSFFHRLEESFLVEEDKKHERHPIFGNIVDEVAYHEKYPTIYHLRKKLVDSTDKADLRLIYLALAHMIKFRGHFLIEGDLNPDNSDVDKLFIQLVQTYNQLFEENPINASGVDAKAILSARLSKSRRLENLIAQLPGEKKNGLFGNLIALSLGLTPNFKSNFDLAEDAKLQLSKDTYDDDLDNLLAQIGDQYADLFLAAKNLSDAILLSDILRVNTEITKAPLSASMIKRYDEHHQDLTLLKALVRQQLPEKYKEIFFDQSKNGYAGYIDGGASQEEFYKFIKPILEKMDGTEELLVKLNREDLLRKQRTFDNGSIPHQIHLGELHAILRRQEDFYPFLKDNREKIEKILTFRIPYYVGPLARGNSRFAWMTRKSEETITPWNFEEVVDKGASAQSFIERMTNFDKNLPNEKVLPKHSLLYEYFTVYNELTKVKYVTEGMRKPAFLSGEQKKAIVDLLFKTNRKVTVKQLKEDYFKKIECFDSVEISGVEDRFNASLGTYHDLLKIIKDKDFLDNEENEDILEDIVLTLTLFEDREMIEERLKTYAHLFDDKVMKQLKRRRYTGWGRLSRKLINGIRDKQSGKTILDFLKSDGFANRNFMQLIHDDSLTFKEDIQKAQVSGQGDSLHEHIANLAGSPAIKKGILQTVKVVDELVKVMGRHKPENIVIEMARENQTTQKGQKNSRERMKRIEEGIKELGSQILKEHPVENTQLQNEKLYLYYLQNGRDMYVDQELDINRLSDYDVDHIVPQSFLKDDSIDNKVLTRSDKARGKSDNVPSEEVVKKMKNYWRQLLNAKLITQRKFDNLTKAERGGLSELDKAGFIKRQLVETRQITKHVAQILDSRMNTKYDENDKLIREVKVITLKSKLVSDFRKDFQFYKVREINNYHHAHDAYLNAVVGTALIKKYPKLESEFVYGDYKVYDVRKMIAKSEQEIGKATAKYFFYSNIMNFFKTEITLANGEIRKRPLIETNGETGEIVWDKGRDFATVRKVLSMPQVNIVKKTEVQTGGFSKESILPKRNSDKLIARKKDWDPKKYGGFDSPTVAYSVLVVAKVEKGKSKKLKSVKELLGITIMERSSFEKNPIDFLEAKGYKEVKKDLIIKLPKYSLFELENGRKRMLASAGELQKGNELALPSKYVNFLYLASHYEKLKGSPEDNEQKQLFVEQHKHYLDEIIEQISEFSKRVILADANLDKVLSAYNKHRDKPIREQAENIIHLFTLTNLGAPAAFKYFDTTIDRKRYTSTKEVLDATLIHQSITGLYETRIDLSQLGGDGGGGSPAPGGVLNLEEEYRLHEKPVPSSIDPSWLQLFPTVWAERAGMGLANQVPPVVVELRSGASPVAVRQYPMSKEAREGIRPHIQKFLDLGVLVPCRSPWNTPLLPVKKPGTNDYRPVQDLREINKRVQDIHPTVPNPYNLLSSLPPSYTWYSVLDLKDAFFCLRLHPNSQPLFAFEWKDPEKGNTGQLTWTRLPQGFKNSPTLFNEALHRDLAPFRALNPQVVLLQYVDDLLVAAPTYEDCKKGTQKLLQELSKLGYRVSAKKAQLCQREVTYLGYLLKEGKRWLTPARKATVMKIPVPTTPRQVREFLGKAGFCRLFIPGFASLAAPLYPLTKPSIPFIWTEEHQQAFDHIKKALLSAPALALPDLTKPFTLYIDERAGVARGVLTQTLGPWRRPVAYLSKKLDPVASGWPTCLKAVAAVALLLKDADKLTLGQNVTVIASHSLESIVRQPPDRWMTNARMTHYQSLLLNERVSFAPPAVLNPATLLPVESEATPVHRCSEILAEETGTRRDLEDQPLPGVPTWYTDGSSFITEGKRRAGAPIVDGKRTVWASSLPEGTSAQKAELVALTQALRLAEGKNINIYTDSRYAFATAHIHGAIYKQRGWLTSAGKDIKNKEEILALLEAIHLPRRVAIIHCPGHQRGSNPVATGNRRADEAAKQAALSTRVLAGTTKPAGKRTADGSEFEKRTADGSEFESPKKKAKVE

SEQ ID NO: 1471 - protein, 2092 aa, synthetic construct
MPAAKRVKLDGGDKKYSIGLDIGTNSVGWAVITDEYKVPSKKFKVLGNTDRHSIKKNLIGALLFDSGETAEATRLKRTARRRYTRRKNRICYLQEIFSNEMAKVDDSFFHRLEESFLVEEDKKHERHPIFGNIVDEVAYHEKYPTIYHLRKKLVDSTDKADLRLIYLALAHMIKFRGHFLIEGDLNPDNSDVDKLFIQLVQTYNQLFEENPINASGVDAKAILSARLSKSRRLENLIAQLPGEKKNGLFGNLIALSLGLTPNFKSNFDLAEDAKLQLSKDTYDDDLDNLLAQIGDQYADLFLAAKNLSDAILLSDILRVNTEITKAPLSASMIKRYDEHHQDLTLLKALVRQQLPEKYKEIFFDQSKNGYAGYIDGGASQEEFYKFIKPILEKMDGTEELLVKLNREDLLRKQRTFDNGSIPHQIHLGELHAILRRQEDFYPFLKDNREKIEKILTFRIPYYVGPLARGNSRFAWMTRKSEETITPWNFEEVVDKGASAQSFIERMTNFDKNLPNEKVLPKHSLLYEYFTVYNELTKVKYVTEGMRKPAFLSGEQKKAIVDLLFKTNRKVTVKQLKEDYFKKIECFDSVEISGVEDRFNASLGTYHDLLKIIKDKDFLDNEENEDILEDIVLTLTLFEDREMIEERLKTYAHLFDDKVMKQLKRRRYTGWGRLSRKLINGIRDKQSGKTILDFLKSDGFANRNFMQLIHDDSLTFKEDIQKAQVSGQGDSLHEHIANLAGSPAIKKGILQTVKVVDELVKVMGRHKPENIVIEMARENQTTQKGQKNSRERMKRIEEGIKELGSQILKEHPVENTQLQNEKLYLYYLQNGRDMYVDQELDINRLSDYDVDHIVPQSFLKDDSIDNKVLTRSDKARGKSDNVPSEEVVKKMKNYWRQLLNAKLITQRKFDNLTKAERGGLSELDKAGFIKRQLVETRQITKHVAQILDSRMNTKYDENDKLIREVKVITLKSKLVSDFRKDFQFYKVREINNYHHAHDAYLNAVVGTALIKKYPKLESEFVYGDYKVYDVRKMIAKSEQEIGKATAKYFFYSNIMNFFKTEITLANGEIRKRPLIETNGETGEIVWDKGRDFATVRKVLSMPQVNIVKKTEVQTGGFSKESILPKRNSDKLIARKKDWDPKKYGGFDSPTVAYSVLVVAKVEKGKSKKLKSVKELLGITIMERSSFEKNPIDFLEAKGYKEVKKDLIIKLPKYSLFELENGRKRMLASAGELQKGNELALPSKYVNFLYLASHYEKLKGSPEDNEQKQLFVEQHKHYLDEIIEQISEFSKRVILADANLDKVLSAYNKHRDKPIREQAENIIHLFTLTNLGAPAAFKYFDTTIDRKRYTSTKEVLDATLIHQSITGLYETRIDLSQLGGDGGGGGGSSGGSGGVLNLEEEYRLHEKPVPSSIDPSWLQLFPTVWAERAGMGLANQVPPVVVELRSGASPVAVRQYPMSKEAREGIRPHIQKFLDLGVLVPCRSPWNTPLLPVKKPGTNDYRPVQDLREINKRVQDIHPTVPNPYNLLSSLPPSYTWYSVLDLKDAFFCLRLHPNSQPLFAFEWKDPEKGNTGQLTWTRLPQGFKNSPTLFNEALHRDLAPFRALNPQVVLLQYVDDLLVAAPTYEDCKKGTQKLLQELSKLGYRVSAKKAQLCQREVTYLGYLLKEGKRWLTPARKATVMKIPVPTTPRQVREFLGKAGFCRLFIPGFASLAAPLYPLTKPSIPFIWTEEHQQAFDHIKKALLSAPALALPDLTKPFTLYIDERAGVARGVLTQTLGPWRRPVAYLSKKLDPVASGWPTCLKAVAAVALLLKDADKLTLGQNVTVIASHSLESIVRQPPDRWMTNARMTHYQSLLLNERVSFAPPAVLNPATLLPVESEATPVHRCSEILAEETGTRRDLEDQPLPGVPTWYTDGSSFITEGKRRAGAPIVDGKRTVWASSLPEGTSAQKAELVALTQALRLAEGKNINIYTDSRYAFATAHIHGAIYKQRGWLTSAGKDIKNKEEILALLEAIHLPRRVAIIHCPGHQRGSNPVATGNRRADEAAKQAALSTRVLAGTTKPAGKRTADGSEFEKRTADGSEFESPKKKAKVE

SEQ ID NO: 1472 - protein, 2092 aa, synthetic construct
MPAAKRVKLDGGDKKYSIGLDIGTNSVGWAVITDEYKVPSKKFKVLGNTDRHSIKKNLIGALLFDSGETAEATRLKRTARRRYTRRKNRICYLQEIFSNEMAKVDDSFFHRLEESFLVEEDKKHERHPIFGNIVDEVAYHEKYPTIYHLRKKLVDSTDKADLRLIYLALAHMIKFRGHFLIEGDLNPDNSDVDKLFIQLVQTYNQLFEENPINASGVDAKAILSARLSKSRRLENLIAQLPGEKKNGLFGNLIALSLGLTPNFKSNFDLAEDAKLQLSKDTYDDDLDNLLAQIGDQYADLFLAAKNLSDAILLSDILRVNTEITKAPLSASMIKRYDEHHQDLTLLKALVRQQLPEKYKEIFFDQSKNGYAGYIDGGASQEEFYKFIKPILEKMDGTEELLVKLNREDLLRKQRTFDNGSIPHQIHLGELHAILRRQEDFYPFLKDNREKIEKILTFRIPYYVGPLARGNSRFAWMTRKSEETITPWNFEEVVDKGASAQSFIERMTNFDKNLPNEKVLPKHSLLYEYFTVYNELTKVKYVTEGMRKPAFLSGEQKKAIVDLLFKTNRKVTVKQLKEDYFKKIECFDSVEISGVEDRFNASLGTYHDLLKIIKDKDFLDNEENEDILEDIVLTLTLFEDREMIEERLKTYAHLFDDKVMKQLKRRRYTGWGRLSRKLINGIRDKQSGKTILDFLKSDGFANRNFMQLIHDDSLTFKEDIQKAQVSGQGDSLHEHIANLAGSPAIKKGILQTVKVVDELVKVMGRHKPENIVIEMARENQTTQKGQKNSRERMKRIEEGIKELGSQILKEHPVENTQLQNEKLYLYYLQNGRDMYVDQELDINRLSDYDVDHIVPQSFLKDDSIDNKVLTRSDKARGKSDNVPSEEVVKKMKNYWRQLLNAKLITQRKFDNLTKAERGGLSELDKAGFIKRQLVETRQITKHVAQILDSRMNTKYDENDKLIREVKVITLKSKLVSDFRKDFQFYKVREINNYHHAHDAYLNAVVGTALIKKYPKLESEFVYGDYKVYDVRKMIAKSEQEIGKATAKYFFYSNIMNFFKTEITLANGEIRKRPLIETNGETGEIVWDKGRDFATVRKVLSMPQVNIVKKTEVQTGGFSKESILPKRNSDKLIARKKDWDPKKYGGFDSPTVAYSVLVVAKVEKGKSKKLKSVKELLGITIMERSSFEKNPIDFLEAKGYKEVKKDLIIKLPKYSLFELENGRKRMLASAGELQKGNELALPSKYVNFLYLASHYEKLKGSPEDNEQKQLFVEQHKHYLDEIIEQISEFSKRVILADANLDKVLSAYNKHRDKPIREQAENIIHLFTLTNLGAPAAFKYFDTTIDRKRYTSTKEVLDATLIHQSITGLYETRIDLSQLGGDGGGGSGGGGSSGGVLNLEEEYRLHEKPVPSSIDPSWLQLFPTVWAERAGMGLANQVPPVVVELRSGASPVAVRQYPMSKEAREGIRPHIQKFLDLGVLVPCRSPWNTPLLPVKKPGTNDYRPVQDLREINKRVQDIHPTVPNPYNLLSSLPPSYTWYSVLDLKDAFFCLRLHPNSQPLFAFEWKDPEKGNTGQLTWTRLPQGFKNSPTLFNEALHRDLAPFRALNPQVVLLQYVDDLLVAAPTYEDCKKGTQKLLQELSKLGYRVSAKKAQLCQREVTYLGYLLKEGKRWLTPARKATVMKIPVPTTPRQVREFLGKAGFCRLFIPGFASLAAPLYPLTKPSIPFIWTEEHQQAFDHIKKALLSAPALALPDLTKPFTLYIDERAGVARGVLTQTLGPWRRPVAYLSKKLDPVASGWPTCLKAVAAVALLLKDADKLTLGQNVTVIASHSLESIVRQPPDRWMTNARMTHYQSLLLNERVSFAPPAVLNPATLLPVESEATPVHRCSEILAEETGTRRDLEDQPLPGVPTWYTDGSSFITEGKRRAGAPIVDGKRTVWASSLPEGTSAQKAELVALTQALRLAEGKNINIYTDSRYAFATAHIHGAIYKQRGWLTSAGKDIKNKEEILALLEAIHLPRRVAIIHCPGHQRGSNPVATGNRRADEAAKQAALSTRVLAGTTKPAGKRTADGSEFEKRTADGSEFESPKKKAKVE

SEQ ID NO: 1473 - protein, 2094 aa, synthetic construct
MPAAKRVKLDGGDKKYSIGLDIGTNSVGWAVITDEYKVPSKKFKVLGNTDRHSIKKNLIGALLFDSGETAEATRLKRTARRRYTRRKNRICYLQEIFSNEMAKVDDSFFHRLEESFLVEEDKKHERHPIFGNIVDEVAYHEKYPTIYHLRKKLVDSTDKADLRLIYLALAHMIKFRGHFLIEGDLNPDNSDVDKLFIQLVQTYNQLFEENPINASGVDAKAILSARLSKSRRLENLIAQLPGEKKNGLFGNLIALSLGLTPNFKSNFDLAEDAKLQLSKDTYDDDLDNLLAQIGDQYADLFLAAKNLSDAILLSDILRVNTEITKAPLSASMIKRYDEHHQDLTLLKALVRQQLPEKYKEIFFDQSKNGYAGYIDGGASQEEFYKFIKPILEKMDGTEELLVKLNREDLLRKQRTFDNGSIPHQIHLGELHAILRRQEDFYPFLKDNREKIEKILTFRIPYYVGPLARGNSRFAWMTRKSEETITPWNFEEVVDKGASAQSFIERMTNFDKNLPNEKVLPKHSLLYEYFTVYNELTKVKYVTEGMRKPAFLSGEQKKAIVDLLFKTNRKVTVKQLKEDYFKKIECFDSVEISGVEDRFNASLGTYHDLLKIIKDKDFLDNEENEDILEDIVLTLTLFEDREMIEERLKTYAHLFDDKVMKQLKRRRYTGWGRLSRKLINGIRDKQSGKTILDFLKSDGFANRNFMQLIHDDSLTFKEDIQKAQVSGQGDSLHEHIANLAGSPAIKKGILQTVKVVDELVKVMGRHKPENIVIEMARENQTTQKGQKNSRERMKRIEEGIKELGSQILKEHPVENTQLQNEKLYLYYLQNGRDMYVDQELDINRLSDYDVDHIVPQSFLKDDSIDNKVLTRSDKARGKSDNVPSEEVVKKMKNYWRQLLNAKLITQRKFDNLTKAERGGLSELDKAGFIKRQLVETRQITKHVAQILDSRMNTKYDENDKLIREVKVITLKSKLVSDFRKDFQFYKVREINNYHHAHDAYLNAVVGTALIKKYPKLESEFVYGDYKVYDVRKMIAKSEQEIGKATAKYFFYSNIMNFFKTEITLANGEIRKRPLIETNGETGEIVWDKGRDFATVRKVLSMPQVNIVKKTEVQTGGFSKESILPKRNSDKLIARKKDWDPKKYGGFDSPTVAYSVLVVAKVEKGKSKKLKSVKELLGITIMERSSFEKNPIDFLEAKGYKEVKKDLIIKLPKYSLFELENGRKRMLASAGELQKGNELALPSKYVNFLYLASHYEKLKGSPEDNEQKQLFVEQHKHYLDEIIEQISEFSKRVILADANLDKVLSAYNKHRDKPIREQAENIIHLFTLTNLGAPAAFKYFDTTIDRKRYTSTKEVLDATLIHQSITGLYETRIDLSQLGGDGGGGSEAAAKGSSGGVLNLEEEYRLHEKPVPSSIDPSWLQLFPTVWAERAGMGLANQVPPVVVELRSGASPVAVRQYPMSKEAREGIRPHIQKFLDLGVLVPCRSPWNTPLLPVKKPGTNDYRPVQDLREINKRVQDIHPTVPNPYNLLSSLPPSYTWYSVLDLKDAFFCLRLHPNSQPLFAFEWKDPEKGNTGQLTWTRLPQGFKNSPTLFNEALHRDLAPFRALNPQVVLLQYVDDLLVAAPTYEDCKKGTQKLLQELSKLGYRVSAKKAQLCQREVTYLGYLLKEGKRWLTPARKATVMKIPVPTTPRQVREFLGKAGFCRLFIPGFASLAAPLYPLTKPSIPFIWTEEHQQAFDHIKKALLSAPALALPDLTKPFTLYIDERAGVARGVLTQTLGPWRRPVAYLSKKLDPVASGWPTCLKAVAAVALLLKDADKLTLGQNVTVIASHSLESIVRQPPDRWMTNARMTHYQSLLLNERVSFAPPAVLNPATLLPVESEATPVHRCSEILAEETGTRRDLEDQPLPGVPTWYTDGSSFITEGKRRAGAPIVDGKRTVWASSLPEGTSAQKAELVALTQALRLAEGKNINIYTDSRYAFATAHIHGAIYKQRGWLTSAGKDIKNKEEILALLEAIHLPRRVAIIHCPGHQRGSNPVATGNRRADEAAKQAALSTRVLAGTTKPAGKRTADGSEFEKRTADGSEFESPKKKAKVE

SEQ ID NO: 1474 - protein, 2094 aa, synthetic construct
MPAAKRVKLDGGDKKYSIGLDIGTNSVGWAVITDEYKVPSKKFKVLGNTDRHSIKKNLIGALLFDSGETAEATRLKRTARRRYTRRKNRICYLQEIFSNEMAKVDDSFFHRLEESFLVEEDKKHERHPIFGNIVDEVAYHEKYPTIYHLRKKLVDSTDKADLRLIYLALAHMIKFRGHFLIEGDLNPDNSDVDKLFIQLVQTYNQLFEENPINASGVDAKAILSARLSKSRRLENLIAQLPGEKKNGLFGNLIALSLGLTPNFKSNFDLAEDAKLQLSKDTYDDDLDNLLAQIGDQYADLFLAAKNLSDAILLSDILRVNTEITKAPLSASMIKRYDEHHQDLTLLKALVRQQLPEKYKEIFFDQSKNGYAGYIDGGASQEEFYKFIKPILEKMDGTEELLVKLNREDLLRKQRTFDNGSIPHQIHLGELHAILRRQEDFYPFLKDNREKIEKILTFRIPYYVGPLARGNSRFAWMTRKSEETITPWNFEEVVDKGASAQSFIERMTNFDKNLPNEKVLPKHSLLYEYFTVYNELTKVKYVTEGMRKPAFLSGEQKKAIVDLLFKTNRKVTVKQLKEDYFKKIECFDSVEISGVEDRFNASLGTYHDLLKIIKDKDFLDNEENEDILEDIVLTLTLFEDREMIEERLKTYAHLFDDKVMKQLKRRRYTGWGRLSRKLINGIRDKQSGKTILDFLKSDGFANRNFMQLIHDDSLTFKEDIQKAQVSGQGDSLHEHIANLAGSPAIKKGILQTVKVVDELVKVMGRHKPENIVIEMARENQTTQKGQKNSRERMKRIEEGIKELGSQILKEHPVENTQLQNEKLYLYYLQNGRDMYVDQELDINRLSDYDVDHIVPQSFLKDDSIDNKVLTRSDKARGKSDNVPSEEVVKKMKNYWRQLLNAKLITQRKFDNLTKAERGGLSELDKAGFIKRQLVETRQITKHVAQILDSRMNTKYDENDKLIREVKVITLKSKLVSDFRKDFQFYKVREINNYHHAHDAYLNAVVGTALIKKYPKLESEFVYGDYKVYDVRKMIAKSEQEIGKATAKYFFYSNIMNFFKTEITLANGEIRKRPLIETNGETGEIVWDKGRDFATVRKVLSMPQVNIVKKTEVQTGGFSKESILPKRNSDKLIARKKDWDPKKYGGFDSPTVAYSVLVVAKVEKGKSKKLKSVKELLGITIMERSSFEKNPIDFLEAKGYKEVKKDLIIKLPKYSLFELENGRKRMLASAGELQKGNELALPSKYVNFLYLASHYEKLKGSPEDNEQKQLFVEQHKHYLDEIIEQISEFSKRVILADANLDKVLSAYNKHRDKPIREQAENIIHLFTLTNLGAPAAFKYFDTTIDRKRYTSTKEVLDATLIHQSITGLYETRIDLSQLGGDGGGSSEAAAKGGSGGVLNLEEEYRLHEKPVPSSIDPSWLQLFPTVWAERAGMGLANQVPPVVVELRSGASPVAVRQYPMSKEAREGIRPHIQKFLDLGVLVPCRSPWNTPLLPVKKPGTNDYRPVQDLREINKRVQDIHPTVPNPYNLLSSLPPSYTWYSVLDLKDAFFCLRLHPNSQPLFAFEWKDPEKGNTGQLTWTRLPQGFKNSPTLFNEALHRDLAPFRALNPQVVLLQYVDDLLVAAPTYEDCKKGTQKLLQELSKLGYRVSAKKAQLCQREVTYLGYLLKEGKRWLTPARKATVMKIPVPTTPRQVREFLGKAGFCRLFIPGFASLAAPLYPLTKPSIPFIWTEEHQQAFDHIKKALLSAPALALPDLTKPFTLYIDERAGVARGVLTQTLGPWRRPVAYLSKKLDPVASGWPTCLKAVAAVALLLKDADKLTLGQNVTVIASHSLESIVRQPPDRWMTNARMTHYQSLLLNERVSFAPPAVLNPATLLPVESEATPVHRCSEILAEETGTRRDLEDQPLPGVPTWYTDGSSFITEGKRRAGAPIVDGKRTVWASSLPEGTSAQKAELVALTQALRLAEGKNINIYTDSRYAFATAHIHGAIYKQRGWLTSAGKDIKNKEEILALLEAIHLPRRVAIIHCPGHQRGSNPVATGNRRADEAAKQAALSTRVLAGTTKPAGKRTADGSEFEKRTADGSEFESPKKKAKVE

SEQ ID NO: 1475 - protein, 2089 aa, synthetic construct
MPAAKRVKLDGGDKKYSIGLDIGTNSVGWAVITDEYKVPSKKFKVLGNTDRHSIKKNLIGALLFDSGETAEATRLKRTARRRYTRRKNRICYLQEIFSNEMAKVDDSFFHRLEESFLVEEDKKHERHPIFGNIVDEVAYHEKYPTIYHLRKKLVDSTDKADLRLIYLALAHMIKFRGHFLIEGDLNPDNSDVDKLFIQLVQTYNQLFEENPINASGVDAKAILSARLSKSRRLENLIAQLPGEKKNGLFGNLIALSLGLTPNFKSNFDLAEDAKLQLSKDTYDDDLDNLLAQIGDQYADLFLAAKNLSDAILLSDILRVNTEITKAPLSASMIKRYDEHHQDLTLLKALVRQQLPEKYKEIFFDQSKNGYAGYIDGGASQEEFYKFIKPILEKMDGTEELLVKLNREDLLRKQRTFDNGSIPHQIHLGELHAILRRQEDFYPFLKDNREKIEKILTFRIPYYVGPLARGNSRFAWMTRKSEETITPWNFEEVVDKGASAQSFIERMTNFDKNLPNEKVLPKHSLLYEYFTVYNELTKVKYVTEGMRKPAFLSGEQKKAIVDLLFKTNRKVTVKQLKEDYFKKIECFDSVEISGVEDRFNASLGTYHDLLKIIKDKDFLDNEENEDILEDIVLTLTLFEDREMIEERLKTYAHLFDDKVMKQLKRRRYTGWGRLSRKLINGIRDKQSGKTILDFLKSDGFANRNFMQLIHDDSLTFKEDIQKAQVSGQGDSLHEHIANLAGSPAIKKGILQTVKVVDELVKVMGRHKPENIVIEMARENQTTQKGQKNSRERMKRIEEGIKELGSQILKEHPVENTQLQNEKLYLYYLQNGRDMYVDQELDINRLSDYDVDHIVPQSFLKDDSIDNKVLTRSDKARGKSDNVPSEEVVKKMKNYWRQLLNAKLITQRKFDNLTKAERGGLSELDKAGFIKRQLVETRQITKHVAQILDSRMNTKYDENDKLIREVKVITLKSKLVSDFRKDFQFYKVREINNYHHAHDAYLNAVVGTALIKKYPKLESEFVYGDYKVYDVRKMIAKSEQEIGKATAKYFFYSNIMNFFKTEITLANGEIRKRPLIETNGETGEIVWDKGRDFATVRKVLSMPQVNIVKKTEVQTGGFSKESILPKRNSDKLIARKKDWDPKKYGGFDSPTVAYSVLVVAKVEKGKSKKLKSVKELLGITIMERSSFEKNPIDFLEAKGYKEVKKDLIIKLPKYSLFELENGRKRMLASAGELQKGNELALPSKYVNFLYLASHYEKLKGSPEDNEQKQLFVEQHKHYLDEIIEQISEFSKRVILADANLDKVLSAYNKHRDKPIREQAENIIHLFTLTNLGAPAAFKYFDTTIDRKRYTSTKEVLDATLIHQSITGLYETRIDLSQLGGDGGGGSGGSGGVLNLEEEYRLHEKPVPSSIDPSWLQLFPTVWAERAGMGLANQVPPVVVELRSGASPVAVRQYPMSKEAREGIRPHIQKFLDLGVLVPCRSPWNTPLLPVKKPGTNDYRPVQDLREINKRVQDIHPTVPNPYNLLSSLPPSYTWYSVLDLKDAFFCLRLHPNSQPLFAFEWKDPEKGNTGQLTWTRLPQGFKNSPTLFNEALHRDLAPFRALNPQVVLLQYVDDLLVAAPTYEDCKKGTQKLLQELSKLGYRVSAKKAQLCQREVTYLGYLLKEGKRWLTPARKATVMKIPVPTTPRQVREFLGKAGFCRLFIPGFASLAAPLYPLTKPSIPFIWTEEHQQAFDHIKKALLSAPALALPDLTKPFTLYIDERAGVARGVLTQTLGPWRRPVAYLSKKLDPVASGWPTCLKAVAAVALLLKDADKLTLGQNVTVIASHSLESIVRQPPDRWMTNARMTHYQSLLLNERVSFAPPAVLNPATLLPVESEATPVHRCSEILAEETGTRRDLEDQPLPGVPTWYTDGSSFITEGKRRAGAPIVDGKRTVWASSLPEGTSAQKAELVALTQALRLAEGKNINIYTDSRYAFATAHIHGAIYKQRGWLTSAGKDIKNKEEILALLEAIHLPRRVAIIHCPGHQRGSNPVATGNRRADEAAKQAALSTRVLAGTTKPAGKRTADGSEFEKRTADGSEFESPKKKAKVE

SEQ ID NO: 1476 - protein, 2092 aa, synthetic construct
MPAAKRVKLDGGDKKYSIGLDIGTNSVGWAVITDEYKVPSKKFKVLGNTDRHSIKKNLIGALLFDSGETAEATRLKRTARRRYTRRKNRICYLQEIFSNEMAKVDDSFFHRLEESFLVEEDKKHERHPIFGNIVDEVAYHEKYPTIYHLRKKLVDSTDKADLRLIYLALAHMIKFRGHFLIEGDLNPDNSDVDKLFIQLVQTYNQLFEENPINASGVDAKAILSARLSKSRRLENLIAQLPGEKKNGLFGNLIALSLGLTPNFKSNFDLAEDAKLQLSKDTYDDDLDNLLAQIGDQYADLFLAAKNLSDAILLSDILRVNTEITKAPLSASMIKRYDEHHQDLTLLKALVRQQLPEKYKEIFFDQSKNGYAGYIDGGASQEEFYKFIKPILEKMDGTEELLVKLNREDLLRKQRTFDNGSIPHQIHLGELHAILRRQEDFYPFLKDNREKIEKILTFRIPYYVGPLARGNSRFAWMTRKSEETITPWNFEEVVDKGASAQSFIERMTNFDKNLPNEKVLPKHSLLYEYFTVYNELTKVKYVTEGMRKPAFLSGEQKKAIVDLLFKTNRKVTVKQLKEDYFKKIECFDSVEISGVEDRFNASLGTYHDLLKIIKDKDFLDNEENEDILEDIVLTLTLFEDREMIEERLKTYAHLFDDKVMKQLKRRRYTGWGRLSRKLINGIRDKQSGKTILDFLKSDGFANRNFMQLIHDDSLTFKEDIQKAQVSGQGDSLHEHIANLAGSPAIKKGILQTVKVVDELVKVMGRHKPENIVIEMARENQTTQKGQKNSRERMKRIEEGIKELGSQILKEHPVENTQLQNEKLYLYYLQNGRDMYVDQELDINRLSDYDVDHIVPQSFLKDDSIDNKVLTRSDKARGKSDNVPSEEVVKKMKNYWRQLLNAKLITQRKFDNLTKAERGGLSELDKAGFIKRQLVETRQITKHVAQILDSRMNTKYDENDKLIREVKVITLKSKLVSDFRKDFQFYKVREINNYHHAHDAYLNAVVGTALIKKYPKLESEFVYGDYKVYDVRKMIAKSEQEIGKATAKYFFYSNIMNFFKTEITLANGEIRKRPLIETNGETGEIVWDKGRDFATVRKVLSMPQVNIVKKTEVQTGGFSKESILPKRNSDKLIARKKDWDPKKYGGFDSPTVAYSVLVVAKVEKGKSKKLKSVKELLGITIMERSSFEKNPIDFLEAKGYKEVKKDLIIKLPKYSLFELENGRKRMLASAGELQKGNELALPSKYVNFLYLASHYEKLKGSPEDNEQKQLFVEQHKHYLDEIIEQISEFSKRVILADANLDKVLSAYNKHRDKPIREQAENIIHLFTLTNLGAPAAFKYFDTTIDRKRYTSTKEVLDATLIHQSITGLYETRIDLSQLGGDGGGGSGSSPAPGGVLNLEEEYRLHEKPVPSSIDPSWLQLFPTVWAERAGMGLANQVPPVVVELRSGASPVAVRQYPMSKEAREGIRPHIQKFLDLGVLVPCRSPWNTPLLPVKKPGTNDYRPVQDLREINKRVQDIHPTVPNPYNLLSSLPPSYTWYSVLDLKDAFFCLRLHPNSQPLFAFEWKDPEKGNTGQLTWTRLPQGFKNSPTLFNEALHRDLAPFRALNPQVVLLQYVDDLLVAAPTYEDCKKGTQKLLQELSKLGYRVSAKKAQLCQREVTYLGYLLKEGKRWLTPARKATVMKIPVPTTPRQVREFLGKAGFCRLFIPGFASLAAPLYPLTKPSIPFIWTEEHQQAFDHIKKALLSAPALALPDLTKPFTLYIDERAGVARGVLTQTLGPWRRPVAYLSKKLDPVASGWPTCLKAVAAVALLLKDADKLTLGQNVTVIASHSLESIVRQPPDRWMTNARMTHYQSLLLNERVSFAPPAVLNPATLLPVESEATPVHRCSEILAEETGTRRDLEDQPLPGVPTWYTDGSSFITEGKRRAGAPIVDGKRTVWASSLPEGTSAQKAELVALTQALRLAEGKNINIYTDSRYAFATAHIHGAIYKQRGWLTSAGKDIKNKEEILALLEAIHLPRRVAIIHCPGHQRGSNPVATGNRRADEAAKQAALSTRVLAGTTKPAGKRTADGSEFEKRTADGSEFESPKKKAKVE

SEQ ID NO: 1477 - protein, 2092 aa, synthetic construct
MPAAKRVKLDGGDKKYSIGLDIGTNSVGWAVITDEYKVPSKKFKVLGNTDRHSIKKNLIGALLFDSGETAEATRLKRTARRRYTRRKNRICYLQEIFSNEMAKVDDSFFHRLEESFLVEEDKKHERHPIFGNIVDEVAYHEKYPTIYHLRKKLVDSTDKADLRLIYLALAHMIKFRGHFLIEGDLNPDNSDVDKLFIQLVQTYNQLFEENPINASGVDAKAILSARLSKSRRLENLIAQLPGEKKNGLFGNLIALSLGLTPNFKSNFDLAEDAKLQLSKDTYDDDLDNLLAQIGDQYADLFLAAKNLSDAILLSDILRVNTEITKAPLSASMIKRYDEHHQDLTLLKALVRQQLPEKYKEIFFDQSKNGYAGYIDGGASQEEFYKFIKPILEKMDGTEELLVKLNREDLLRKQRTFDNGSIPHQIHLGELHAILRRQEDFYPFLKDNREKIEKILTFRIPYYVGPLARGNSRFAWMTRKSEETITPWNFEEVVDKGASAQSFIERMTNFDKNLPNEKVLPKHSLLYEYFTVYNELTKVKYVTEGMRKPAFLSGEQKKAIVDLLFKTNRKVTVKQLKEDYFKKIECFDSVEISGVEDRFNASLGTYHDLLKIIKDKDFLDNEENEDILEDIVLTLTLFEDREMIEERLKTYAHLFDDKVMKQLKRRRYTGWGRLSRKLINGIRDKQSGKTILDFLKSDGFANRNFMQLIHDDSLTFKEDIQKAQVSGQGDSLHEHIANLAGSPAIKKGILQTVKVVDELVKVMGRHKPENIVIEMARENQTTQKGQKNSRERMKRIEEGIKELGSQILKEHPVENTQLQNEKLYLYYLQNGRDMYVDQELDINRLSDYDVDHIVPQSFLKDDSIDNKVLTRSDKARGKSDNVPSEEVVKKMKNYWRQLLNAKLITQRKFDNLTKAERGGLSELDKAGFIKRQLVETRQITKHVAQILDSRMNTKYDENDKLIREVKVITLKSKLVSDFRKDFQFYKVREINNYHHAHDAYLNAVVGTALIKKYPKLESEFVYGDYKVYDVRKMIAKSEQEIGKATAKYFFYSNIMNFFKTEITLANGEIRKRPLIETNGETGEIVWDKGRDFATVRKVLSMPQVNIVKKTEVQTGGFSKESILPKRNSDKLIARKKDWDPKKYGGFDSPTVAYSVLVVAKVEKGKSKKLKSVKELLGITIMERSSFEKNPIDFLEAKGYKEVKKDLIIKLPKYSLFELENGRKRMLASAGELQKGNELALPSKYVNFLYLASHYEKLKGSPEDNEQKQLFVEQHKHYLDEIIEQISEFSKRVILADANLDKVLSAYNKHRDKPIREQAENIIHLFTLTNLGAPAAFKYFDTTIDRKRYTSTKEVLDATLIHQSITGLYETRIDLSQLGGDGGGSSGGGGGSGGVLNLEEEYRLHEKPVPSSIDPSWLQLFPTVWAERAGMGLANQVPPVVVELRSGASPVAVRQYPMSKEAREGIRPHIQKFLDLGVLVPCRSPWNTPLLPVKKPGTNDYRPVQDLREINKRVQDIHPTVPNPYNLLSSLPPSYTWYSVLDLKDAFFCLRLHPNSQPLFAFEWKDPEKGNTGQLTWTRLPQGFKNSPTLFNEALHRDLAPFRALNPQVVLLQYVDDLLVAAPTYEDCKKGTQKLLQELSKLGYRVSAKKAQLCQREVTYLGYLLKEGKRWLTPARKATVMKIPVPTTPRQVREFLGKAGFCRLFIPGFASLAAPLYPLTKPSIPFIWTEEHQQAFDHIKKALLSAPALALPDLTKPFTLYIDERAGVARGVLTQTLGPWRRPVAYLSKKLDPVASGWPTCLKAVAAVALLLKDADKLTLGQNVTVIASHSLESIVRQPPDRWMTNARMTHYQSLLLNERVSFAPPAVLNPATLLPVESEATPVHRCSEILAEETGTRRDLEDQPLPGVPTWYTDGSSFITEGKRRAGAPIVDGKRTVWASSLPEGTSAQKAELVALTQALRLAEGKNINIYTDSRYAFATAHIHGAIYKQRGWLTSAGKDIKNKEEILALLEAIHLPRRVAIIHCPGHQRGSNPVATGNRRADEAAKQAALSTRVLAGTTKPAGKRTADGSEFEKRTADGSEFESPKKKAKVE

SEQ ID NO: 1478 - protein, 2007 aa, synthetic construct
MPAAKRVKLDGGDKKYSIGLDIGTNSVGWAVITDEYKVPSKKFKVLGNTDRHSIKKNLIGALLFDSGETAEATRLKRTARRRYTRRKNRICYLQEIFSNEMAKVDDSFFHRLEESFLVEEDKKHERHPIFGNIVDEVAYHEKYPTIYHLRKKLVDSTDKADLRLIYLALAHMIKFRGHFLIEGDLNPDNSDVDKLFIQLVQTYNQLFEENPINASGVDAKAILSARLSKSRRLENLIAQLPGEKKNGLFGNLIALSLGLTPNFKSNFDLAEDAKLQLSKDTYDDDLDNLLAQIGDQYADLFLAAKNLSDAILLSDILRVNTEITKAPLSASMIKRYDEHHQDLTLLKALVRQQLPEKYKEIFFDQSKNGYAGYIDGGASQEEFYKFIKPILEKMDGTEELLVKLNREDLLRKQRTFDNGSIPHQIHLGELHAILRRQEDFYPFLKDNREKIEKILTFRIPYYVGPLARGNSRFAWMTRKSEETITPWNFEEVVDKGASAQSFIERMTNFDKNLPNEKVLPKHSLLYEYFTVYNELTKVKYVTEGMRKPAFLSGEQKKAIVDLLFKTNRKVTVKQLKEDYFKKIECFDSVEISGVEDRFNASLGTYHDLLKIIKDKDFLDNEENEDILEDIVLTLTLFEDREMIEERLKTYAHLFDDKVMKQLKRRRYTGWGRLSRKLINGIRDKQSGKTILDFLKSDGFANRNFMQLIHDDSLTFKEDIQKAQVSGQGDSLHEHIANLAGSPAIKKGILQTVKVVDELVKVMGRHKPENIVIEMARENQTTQKGQKNSRERMKRIEEGIKELGSQILKEHPVENTQLQNEKLYLYYLQNGRDMYVDQELDINRLSDYDVDHIVPQSFLKDDSIDNKVLTRSDKARGKSDNVPSEEVVKKMKNYWRQLLNAKLITQRKFDNLTKAERGGLSELDKAGFIKRQLVETRQITKHVAQILDSRMNTKYDENDKLIREVKVITLKSKLVSDFRKDFQFYKVREINNYHHAHDAYLNAVVGTALIKKYPKLESEFVYGDYKVYDVRKMIAKSEQEIGKATAKYFFYSNIMNFFKTEITLANGEIRKRPLIETNGETGEIVWDKGRDFATVRKVLSMPQVNIVKKTEVQTGGFSKESILPKRNSDKLIARKKDWDPKKYGGFDSPTVAYSVLVVAKVEKGKSKKLKSVKELLGITIMERSSFEKNPIDFLEAKGYKEVKKDLIIKLPKYSLFELENGRKRMLASAGELQKGNELALPSKYVNFLYLASHYEKLKGSPEDNEQKQLFVEQHKHYLDEIIEQISEFSKRVILADANLDKVLSAYNKHRDKPIREQAENIIHLFTLTNLGAPAAFKYFDTTIDRKRYTSTKEVLDATLIHQSITGLYETRIDLSQLGGDGGGGGGGGGAVLGLEHLPRPPQISQFPLNPERLQALQHLVRKALEAGHIEPYTGPGNNPVFPVKKANGTWRFIHDLRATNSLTIDLSSSSPGPPDLSSLPTTLAHLQTIDLRDAFFQIPLPKQFQPYFAFTVPQQCNYGPGTRYAWKVLPQGFKNSPTLFEMQLAHILQPIRQAFPQCTILQYMDDILLASPSHEDLLLLSEATMASLISHGLPVSENKTQQTPGTIKFLGQIISPNHLTYDAVPTVPIRSRWALPELQALLGEIQWVSKGTPTLRQPLHSLYCALQRHTDPRDQIYLNPSQVQSLVQLRQALSQNCRSRLVQTLPLLGAIMLTLTGTTTVVFQSKEQWPLVWLHAPLPHTSQCPWGQLLASAVLLLDKYTLQSYGLLCQTIHHNISTQTFNQFIQTSDHPSVPILLHHSHRFKNLGAQTGELWNTFLKTAAPLAPVKALMPVFTLSPVIINTAPCLFSDGSTSRAAYILWDKQILSQRSFPLPPPHKSAQRAELLGLLHGLSSARSWRCLNIFLDSKYLYHYLRTLALGTFQGRSSQAPFQALLPRLLSRKVVYLHHVRSHTNLPDPISRLNALTDALLITPVLQLAGKRTADGSEFEKRTADGSEFESPKKKAKVE

SEQ ID NO: 1479 - protein, 2013 aa, synthetic construct
MPAAKRVKLDGGDKKYSIGLDIGTNSVGWAVITDEYKVPSKKFKVLGNTDRHSIKKNLIGALLFDSGETAEATRLKRTARRRYTRRKNRICYLQEIFSNEMAKVDDSFFHRLEESFLVEEDKKHERHPIFGNIVDEVAYHEKYPTIYHLRKKLVDSTDKADLRLIYLALAHMIKFRGHFLIEGDLNPDNSDVDKLFIQLVQTYNQLFEENPINASGVDAKAILSARLSKSRRLENLIAQLPGEKKNGLFGNLIALSLGLTPNFKSNFDLAEDAKLQLSKDTYDDDLDNLLAQIGDQYADLFLAAKNLSDAILLSDILRVNTEITKAPLSASMIKRYDEHHQDLTLLKALVRQQLPEKYKEIFFDQSKNGYAGYIDGGASQEEFYKFIKPILEKMDGTEELLVKLNREDLLRKQRTFDNGSIPHQIHLGELHAILRRQEDFYPFLKDNREKIEKILTFRIPYYVGPLARGNSRFAWMTRKSEETITPWNFEEVVDKGASAQSFIERMTNFDKNLPNEKVLPKHSLLYEYFTVYNELTKVKYVTEGMRKPAFLSGEQKKAIVDLLFKTNRKVTVKQLKEDYFKKIECFDSVEISGVEDRFNASLGTYHDLLKIIKDKDFLDNEENEDILEDIVLTLTLFEDREMIEERLKTYAHLFDDKVMKQLKRRRYTGWGRLSRKLINGIRDKQSGKTILDFLKSDGFANRNFMQLIHDDSLTFKEDIQKAQVSGQGDSLHEHIANLAGSPAIKKGILQTVKVVDELVKVMGRHKPENIVIEMARENQTTQKGQKNSRERMKRIEEGIKELGSQILKEHPVENTQLQNEKLYLYYLQNGRDMYVDQELDINRLSDYDVDHIVPQSFLKDDSIDNKVLTRSDKARGKSDNVPSEEVVKKMKNYWRQLLNAKLITQRKFDNLTKAERGGLSELDKAGFIKRQLVETRQITKHVAQILDSRMNTKYDENDKLIREVKVITLKSKLVSDFRKDFQFYKVREINNYHHAHDAYLNAVVGTALIKKYPKLESEFVYGDYKVYDVRKMIAKSEQEIGKATAKYFFYSNIMNFFKTEITLANGEIRKRPLIETNGETGEIVWDKGRDFATVRKVLSMPQVNIVKKTEVQTGGFSKESILPKRNSDKLIARKKDWDPKKYGGFDSPTVAYSVLVVAKVEKGKSKKLKSVKELLGITIMERSSFEKNPIDFLEAKGYKEVKKDLIIKLPKYSLFELENGRKRMLASAGELQKGNELALPSKYVNFLYLASHYEKLKGSPEDNEQKQLFVEQHKHYLDEIIEQISEFSKRVILADANLDKVLSAYNKHRDKPIREQAENIIHLFTLTNLGAPAAFKYFDTTIDRKRYTSTKEVLDATLIHQSITGLYETRIDLSQLGGDGGPAPAPAPAPAPGGAVLGLEHLPRPPQISQFPLNPERLQALQHLVRKALEAGHIEPYTGPGNNPVFPVKKANGTWRFIHDLRATNSLTIDLSSSSPGPPDLSSLPTTLAHLQTIDLRDAFFQIPLPKQFQPYFAFTVPQQCNYGPGTRYAWKVLPQGFKNSPTLFEMQLAHILQPIRQAFPQCTILQYMDDILLASPSHEDLLLLSEATMASLISHGLPVSENKTQQTPGTIKFLGQIISPNHLTYDAVPTVPIRSRWALPELQALLGEIQWVSKGTPTLRQPLHSLYCALQRHTDPRDQIYLNPSQVQSLVQLRQALSQNCRSRLVQTLPLLGAIMLTLTGTTTVVFQSKEQWPLVWLHAPLPHTSQCPWGQLLASAVLLLDKYTLQSYGLLCQTIHHNISTQTFNQFIQTSDHPSVPILLHHSHRFKNLGAQTGELWNTFLKTAAPLAPVKALMPVFTLSPVIINTAPCLFSDGSTSRAAYILWDKQILSQRSFPLPPPHKSAQRAELLGLLHGLSSARSWRCLNIFLDSKYLYHYLRTLALGTFQGRSSQAPFQALLPRLLSRKVVYLHHVRSHTNLPDPISRLNALTDALLITPVLQLAGKRTADGSEFEKRTADGSEFESPKKKAKVE

SEQ ID NO: 1480 - protein, 2013 aa, synthetic construct
MPAAKRVKLDGGDKKYSIGLDIGTNSVGWAVITDEYKVPSKKFKVLGNTDRHSIKKNLIGALLFDSGETAEATRLKRTARRRYTRRKNRICYLQEIFSNEMAKVDDSFFHRLEESFLVEEDKKHERHPIFGNIVDEVAYHEKYPTIYHLRKKLVDSTDKADLRLIYLALAHMIKFRGHFLIEGDLNPDNSDVDKLFIQLVQTYNQLFEENPINASGVDAKAILSARLSKSRRLENLIAQLPGEKKNGLFGNLIALSLGLTPNFKSNFDLAEDAKLQLSKDTYDDDLDNLLAQIGDQYADLFLAAKNLSDAILLSDILRVNTEITKAPLSASMIKRYDEHHQDLTLLKALVRQQLPEKYKEIFFDQSKNGYAGYIDGGASQEEFYKFIKPILEKMDGTEELLVKLNREDLLRKQRTFDNGSIPHQIHLGELHAILRRQEDFYPFLKDNREKIEKILTFRIPYYVGPLARGNSRFAWMTRKSEETITPWNFEEVVDKGASAQSFIERMTNFDKNLPNEKVLPKHSLLYEYFTVYNELTKVKYVTEGMRKPAFLSGEQKKAIVDLLFKTNRKVTVKQLKEDYFKKIECFDSVEISGVEDRFNASLGTYHDLLKIIKDKDFLDNEENEDILEDIVLTLTLFEDREMIEERLKTYAHLFDDKVMKQLKRRRYTGWGRLSRKLINGIRDKQSGKTILDFLKSDGFANRNFMQLIHDDSLTFKEDIQKAQVSGQGDSLHEHIANLAGSPAIKKGILQTVKVVDELVKVMGRHKPENIVIEMARENQTTQKGQKNSRERMKRIEEGIKELGSQILKEHPVENTQLQNEKLYLYYLQNGRDMYVDQELDINRLSDYDVDHIVPQSFLKDDSIDNKVLTRSDKARGKSDNVPSEEVVKKMKNYWRQLLNAKLITQRKFDNLTKAERGGLSELDKAGFIKRQLVETRQITKHVAQILDSRMNTKYDENDKLIREVKVITLKSKLVSDFRKDFQFYKVREINNYHHAHDAYLNAVVGTALIKKYPKLESEFVYGDYKVYDVRKMIAKSEQEIGKATAKYFFYSNIMNFFKTEITLANGEIRKRPLIETNGETGEIVWDKGRDFATVRKVLSMPQVNIVKKTEVQTGGFSKESILPKRNSDKLIARKKDWDPKKYGGFDSPTVAYSVLVVAKVEKGKSKKLKSVKELLGITIMERSSFEKNPIDFLEAKGYKEVKKDLIIKLPKYSLFELENGRKRMLASAGELQKGNELALPSKYVNFLYLASHYEKLKGSPEDNEQKQLFVEQHKHYLDEIIEQISEFSKRVILADANLDKVLSAYNKHRDKPIREQAENIIHLFTLTNLGAPAAFKYFDTTIDRKRYTSTKEVLDATLIHQSITGLYETRIDLSQLGGDGGPAPEAAAKGGSGGAVLGLEHLPRPPQISQFPLNPERLQALQHLVRKALEAGHIEPYTGPGNNPVFPVKKANGTWRFIHDLRATNSLTIDLSSSSPGPPDLSSLPTTLAHLQTIDLRDAFFQIPLPKQFQPYFAFTVPQQCNYGPGTRYAWKVLPQGFKNSPTLFEMQLAHILQPIRQAFPQCTILQYMDDILLASPSHEDLLLLSEATMASLISHGLPVSENKTQQTPGTIKFLGQIISPNHLTYDAVPTVPIRSRWALPELQALLGEIQWVSKGTPTLRQPLHSLYCALQRHTDPRDQIYLNPSQVQSLVQLRQALSQNCRSRLVQTLPLLGAIMLTLTGTTTVVFQSKEQWPLVWLHAPLPHTSQCPWGQLLASAVLLLDKYTLQSYGLLCQTIHHNISTQTFNQFIQTSDHPSVPILLHHSHRFKNLGAQTGELWNTFLKTAAPLAPVKALMPVFTLSPVIINTAPCLFSDGSTSRAAYILWDKQILSQRSFPLPPPHKSAQRAELLGLLHGLSSARSWRCLNIFLDSKYLYHYLRTLALGTFQGRSSQAPFQALLPRLLSRKVVYLHHVRSHTNLPDPISRLNALTDALLITPVLQLAGKRTADGSEFEKRTADGSEFESPKKKAKVE

SEQ ID NO: 1481 - protein, 2011 aa, synthetic construct
MPAAKRVKLDGGDKKYSIGLDIGTNSVGWAVITDEYKVPSKKFKVLGNTDRHSIKKNLIGALLFDSGETAEATRLKRTARRRYTRRKNRICYLQEIFSNEMAKVDDSFFHRLEESFLVEEDKKHERHPIFGNIVDEVAYHEKYPTIYHLRKKLVDSTDKADLRLIYLALAHMIKFRGHFLIEGDLNPDNSDVDKLFIQLVQTYNQLFEENPINASGVDAKAILSARLSKSRRLENLIAQLPGEKKNGLFGNLIALSLGLTPNFKSNFDLAEDAKLQLSKDTYDDDLDNLLAQIGDQYADLFLAAKNLSDAILLSDILRVNTEITKAPLSASMIKRYDEHHQDLTLLKALVRQQLPEKYKEIFFDQSKNGYAGYIDGGASQEEFYKFIKPILEKMDGTEELLVKLNREDLLRKQRTFDNGSIPHQIHLGELHAILRRQEDFYPFLKDNREKIEKILTFRIPYYVGPLARGNSRFAWMTRKSEETITPWNFEEVVDKGASAQSFIERMTNFDKNLPNEKVLPKHSLLYEYFTVYNELTKVKYVTEGMRKPAFLSGEQKKAIVDLLFKTNRKVTVKQLKEDYFKKIECFDSVEISGVEDRFNASLGTYHDLLKIIKDKDFLDNEENEDILEDIVLTLTLFEDREMIEERLKTYAHLFDDKVMKQLKRRRYTGWGRLSRKLINGIRDKQSGKTILDFLKSDGFANRNFMQLIHDDSLTFKEDIQKAQVSGQGDSLHEHIANLAGSPAIKKGILQTVKVVDELVKVMGRHKPENIVIEMARENQTTQKGQKNSRERMKRIEEGIKELGSQILKEHPVENTQLQNEKLYLYYLQNGRDMYVDQELDINRLSDYDVDHIVPQSFLKDDSIDNKVLTRSDKARGKSDNVPSEEVVKKMKNYWRQLLNAKLITQRKFDNLTKAERGGLSELDKAGFIKRQLVETRQITKHVAQILDSRMNTKYDENDKLIREVKVITLKSKLVSDFRKDFQFYKVREINNYHHAHDAYLNAVVGTALIKKYPKLESEFVYGDYKVYDVRKMIAKSEQEIGKATAKYFFYSNIMNFFKTEITLANGEIRKRPLIETNGETGEIVWDKGRDFATVRKVLSMPQVNIVKKTEVQTGGFSKESILPKRNSDKLIARKKDWDPKKYGGFDSPTVAYSVLVVAKVEKGKSKKLKSVKELLGITIMERSSFEKNPIDFLEAKGYKEVKKDLIIKLPKYSLFELENGRKRMLASAGELQKGNELALPSKYVNFLYLASHYEKLKGSPEDNEQKQLFVEQHKHYLDEIIEQISEFSKRVILADANLDKVLSAYNKHRDKPIREQAENIIHLFTLTNLGAPAAFKYFDTTIDRKRYTSTKEVLDATLIHQSITGLYETRIDLSQLGGDGGPAPGSSGGGGGAVLGLEHLPRPPQISQFPLNPERLQALQHLVRKALEAGHIEPYTGPGNNPVFPVKKANGTWRFIHDLRATNSLTIDLSSSSPGPPDLSSLPTTLAHLQTIDLRDAFFQIPLPKQFQPYFAFTVPQQCNYGPGTRYAWKVLPQGFKNSPTLFEMQLAHILQPIRQAFPQCTILQYMDDILLASPSHEDLLLLSEATMASLISHGLPVSENKTQQTPGTIKFLGQIISPNHLTYDAVPTVPIRSRWALPELQALLGEIQWVSKGTPTLRQPLHSLYCALQRHTDPRDQIYLNPSQVQSLVQLRQALSQNCRSRLVQTLPLLGAIMLTLTGTTTVVFQSKEQWPLVWLHAPLPHTSQCPWGQLLASAVLLLDKYTLQSYGLLCQTIHHNISTQTFNQFIQTSDHPSVPILLHHSHRFKNLGAQTGELWNTFLKTAAPLAPVKALMPVFTLSPVIINTAPCLFSDGSTSRAAYILWDKQILSQRSFPLPPPHKSAQRAELLGLLHGLSSARSWRCLNIFLDSKYLYHYLRTLALGTFQGRSSQAPFQALLPRLLSRKVVYLHHVRSHTNLPDPISRLNALTDALLITPVLQLAGKRTADGSEFEKRTADGSEFESPKKKAKVE

SEQ ID NO: 1482 - protein, 2013 aa, synthetic construct
MPAAKRVKLDGGDKKYSIGLDIGTNSVGWAVITDEYKVPSKKFKVLGNTDRHSIKKNLIGALLFDSGETAEATRLKRTARRRYTRRKNRICYLQEIFSNEMAKVDDSFFHRLEESFLVEEDKKHERHPIFGNIVDEVAYHEKYPTIYHLRKKLVDSTDKADLRLIYLALAHMIKFRGHFLIEGDLNPDNSDVDKLFIQLVQTYNQLFEENPINASGVDAKAILSARLSKSRRLENLIAQLPGEKKNGLFGNLIALSLGLTPNFKSNFDLAEDAKLQLSKDTYDDDLDNLLAQIGDQYADLFLAAKNLSDAILLSDILRVNTEITKAPLSASMIKRYDEHHQDLTLLKALVRQQLPEKYKEIFFDQSKNGYAGYIDGGASQEEFYKFIKPILEKMDGTEELLVKLNREDLLRKQRTFDNGSIPHQIHLGELHAILRRQEDFYPFLKDNREKIEKILTFRIPYYVGPLARGNSRFAWMTRKSEETITPWNFEEVVDKGASAQSFIERMTNFDKNLPNEKVLPKHSLLYEYFTVYNELTKVKYVTEGMRKPAFLSGEQKKAIVDLLFKTNRKVTVKQLKEDYFKKIECFDSVEISGVEDRFNASLGTYHDLLKIIKDKDFLDNEENEDILEDIVLTLTLFEDREMIEERLKTYAHLFDDKVMKQLKRRRYTGWGRLSRKLINGIRDKQSGKTILDFLKSDGFANRNFMQLIHDDSLTFKEDIQKAQVSGQGDSLHEHIANLAGSPAIKKGILQTVKVVDELVKVMGRHKPENIVIEMARENQTTQKGQKNSRERMKRIEEGIKELGSQILKEHPVENTQLQNEKLYLYYLQNGRDMYVDQELDINRLSDYDVDHIVPQSFLKDDSIDNKVLTRSDKARGKSDNVPSEEVVKKMKNYWRQLLNAKLITQRKFDNLTKAERGGLSELDKAGFIKRQLVETRQITKHVAQILDSRMNTKYDENDKLIREVKVITLKSKLVSDFRKDFQFYKVREINNYHHAHDAYLNAVVGTALIKKYPKLESEFVYGDYKVYDVRKMIAKSEQEIGKATAKYFFYSNIMNFFKTEITLANGEIRKRPLIETNGETGEIVWDKGRDFATVRKVLSMPQVNIVKKTEVQTGGFSKESILPKRNSDKLIARKKDWDPKKYGGFDSPTVAYSVLVVAKVEKGKSKKLKSVKELLGITIMERSSFEKNPIDFLEAKGYKEVKKDLIIKLPKYSLFELENGRKRMLASAGELQKGNELALPSKYVNFLYLASHYEKLKGSPEDNEQKQLFVEQHKHYLDEIIEQISEFSKRVILADANLDKVLSAYNKHRDKPIREQAENIIHLFTLTNLGAPAAFKYFDTTIDRKRYTSTKEVLDATLIHQSITGLYETRIDLSQLGGDGGEAAAKGSSGGSGGAVLGLEHLPRPPQISQFPLNPERLQALQHLVRKALEAGHIEPYTGPGNNPVFPVKKANGTWRFIHDLRATNSLTIDLSSSSPGPPDLSSLPTTLAHLQTIDLRDAFFQIPLPKQFQPYFAFTVPQQCNYGPGTRYAWKVLPQGFKNSPTLFQMQLAHILQPIRQAFPQCTILQYMDDILLASPSHEDLLLLSEATMASLISHGLPVSENKTQQTPGTIKFLGQIISPNHLTYDAVPTVPIRSRWALPELQALLGEIQWVSKGTPTLRQPLHSLYCALQPHTDPRDQIYLNPSQVQSLVQLRQALSQNCRSRLVQTLPLLGAIMLTLTGTTTVVFQSKEQWPLVWLHAPLPHTSQCPWGQLLASAVLLLDKYTLQSYGLLCQTIHHNISTQTFNQFIQTSDHPSVPILLHHSHRFKNLGAQTGELWNTFLKTAAPLAPVKALMPVFTLSPVIINTAPCLFSDGSTSRAAYILWDKQILSQRSFPLPPPHKSAQRAELLGLLHGLSSARSWRCLNIFLDSKYLYHYLRTLALGTFQGRSSQAPFQALLPRLLSRKVVYLHHVRSHTNLPDPISRLNALTDALLITPVLQLAGKRTADGSEFEKRTADGSEFESPKKKAKVE

SEQ ID NO: 1483 - protein, 2010 aa, synthetic construct
MPAAKRVKLDGGDKKYSIGLDIGTNSVGWAVITDEYKVPSKKFKVLGNTDRHSIKKNLIGALLFDSGETAEATRLKRTARRRYTRRKNRICYLQEIFSNEMAKVDDSFFHRLEESFLVEEDKKHERHPIFGNIVDEVAYHEKYPTIYHLRKKLVDSTDKADLRLIYLALAHMIKFRGHFLIEGDLNPDNSDVDKLFIQLVQTYNQLFEENPINASGVDAKAILSARLSKSRRLENLIAQLPGEKKNGLFGNLIALSLGLTPNFKSNFDLAEDAKLQLSKDTYDDDLDNLLAQIGDQYADLFLAAKNLSDAILLSDILRVNTEITKAPLSASMIKRYDEHHQDLTLLKALVRQQLPEKYKEIFFDQSKNGYAGYIDGGASQEEFYKFIKPILEKMDGTEELLVKLNREDLLRKQRTFDNGSIPHQIHLGELHAILRRQEDFYPFLKDNREKIEKILTFRIPYYVGPLARGNSRFAWMTRKSEETITPWNFEEVVDKGASAQSFIERMTNFDKNLPNEKVLPKHSLLYEYFTVYNELTKVKYVTEGMRKPAFLSGEQKKAIVDLLFKTNRKVTVKQLKEDYFKKIECFDSVEISGVEDRFNASLGTYHDLLKIIKDKDFLDNEENEDILEDIVLTLTLFEDREMIEERLKTYAHLFDDKVMKQLKRRRYTGWGRLSRKLINGIRDKQSGKTILDFLKSDGFANRNFMQLIHDDSLTFKEDIQKAQVSGQGDSLHEHIANLAGSPAIKKGILQTVKVVDELVKVMGRHKPENIVIEMARENQTTQKGQKNSRERMKRIEEGIKELGSQILKEHPVENTQLQNEKLYLYYLQNGRDMYVDQELDINRLSDYDVDHIVPQSFLKDDSIDNKVLTRSDKARGKSDNVPSEEVVKKMKNYWRQLLNAKLITQRKFDNLTKAERGGLSELDKAGFIKRQLVETRQITKHVAQILDSRMNTKYDENDKLIREVKVITLKSKLVSDFRKDFQFYKVREINNYHHAHDAYLNAVVGTALIKKYPKLESEFVYGDYKVYDVRKMIAKSEQEIGKATAKYFFYSNIMNFFKTEITLANGEIRKRPLIETNGETGEIVWDKGRDFATVRKVLSMPQVNIVKKTEVQTGGFSKESILPKRNSDKLIARKKDWDPKKYGGFDSPTVAYSVLVVAKVEKGKSKKLKSVKELLGITIMERSSFEKNPIDFLEAKGYKEVKKDLIIKLPKYSLFELENGRKRMLASAGELQKGNELALPSKYVNFLYLASHYEKLKGSPEDNEQKQLFVEQHKHYLDEIIEQISEFSKRVILADANLDKVLSAYNKHRDKPIREQAENIIHLFTLTNLGAPAAFKYFDTTIDRKRYTSTKEVLDATLIHQSITGLYETRIDLSQLGGDGGEAAAKGGSGGAVLGLEHLPRPPQISQFPLNPERLQALQHLVRKALEAGHIEPYTGPGNNPVFPVKKANGTWRFIHDLRATNSLTIDLSSSSPGPPDLSSLPTTLAHLQTIDLRDAFFQIPLPKQFQPYFAFTVPQQCNYGPGTRYAWKVLPQGFKNSPTLFQMQLAHILQPIRQAFPQCTILQYMDDILLASPSHEDLLLLSEATMASLISHGLPVSENKTQQTPGTIKFLGQIISPNHLTYDAVPTVPIRSRWALPELQALLGEIQWVSKGTPTLRQPLHSLYCALQPHTDPRDQIYLNPSQVQSLVQLRQALSQNCRSRLVQTLPLLGAIMLTLTGTTTVVFQSKEQWPLVWLHAPLPHTSQCPWGQLLASAVLLLDKYTLQSYGLLCQTIHHNISTQTFNQFIQTSDHPSVPILLHHSHRFKNLGAQTGELWNTFLKTAAPLAPVKALMPVFTLSPVIINTAPCLFSDGSTSRAAYILWDKQILSQRSFPLPPPHKSAQRAELLGLLHGLSSARSWRCLNIFLDSKYLYHYLRTLALGTFQGRSSQAPFQALLPRLLSRKVVYLHHVRSHTNLPDPISRLNALTDALLITPVLQLAGKRTADGSEFEKRTADGSEFESPKKKAKVE

SEQ ID NO: 1484 - protein, 2013 aa, synthetic construct
MPAAKRVKLDGGDKKYSIGLDIGTNSVGWAVITDEYKVPSKKFKVLGNTDRHSIKKNLIGALLFDSGETAEATRLKRTARRRYTRRKNRICYLQEIFSNEMAKVDDSFFHRLEESFLVEEDKKHERHPIFGNIVDEVAYHEKYPTIYHLRKKLVDSTDKADLRLIYLALAHMIKFRGHFLIEGDLNPDNSDVDKLFIQLVQTYNQLFEENPINASGVDAKAILSARLSKSRRLENLIAQLPGEKKNGLFGNLIALSLGLTPNFKSNFDLAEDAKLQLSKDTYDDDLDNLLAQIGDQYADLFLAAKNLSDAILLSDILRVNTEITKAPLSASMIKRYDEHHQDLTLLKALVRQQLPEKYKEIFFDQSKNGYAGYIDGGASQEEFYKFIKPILEKMDGTEELLVKLNREDLLRKQRTFDNGSIPHQIHLGELHAILRRQEDFYPFLKDNREKIEKILTFRIPYYVGPLARGNSRFAWMTRKSEETITPWNFEEVVDKGASAQSFIERMTNFDKNLPNEKVLPKHSLLYEYFTVYNELTKVKYVTEGMRKPAFLSGEQKKAIVDLLFKTNRKVTVKQLKEDYFKKIECFDSVEISGVEDRFNASLGTYHDLLKIIKDKDFLDNEENEDILEDIVLTLTLFEDREMIEERLKTYAHLFDDKVMKQLKRRRYTGWGRLSRKLINGIRDKQSGKTILDFLKSDGFANRNFMQLIHDDSLTFKEDIQKAQVSGQGDSLHEHIANLAGSPAIKKGILQTVKVVDELVKVMGRHKPENIVIEMARENQTTQKGQKNSRERMKRIEEGIKELGSQILKEHPVENTQLQNEKLYLYYLQNGRDMYVDQELDINRLSDYDVDHIVPQSFLKDDSIDNKVLTRSDKARGKSDNVPSEEVVKKMKNYWRQLLNAKLITQRKFDNLTKAERGGLSELDKAGFIKRQLVETRQITKHVAQILDSRMNTKYDENDKLIREVKVITLKSKLVSDFRKDFQFYKVREINNYHHAHDAYLNAVVGTALIKKYPKLESEFVYGDYKVYDVRKMIAKSEQEIGKATAKYFFYSNIMNFFKTEITLANGEIRKRPLIETNGETGEIVWDKGRDFATVRKVLSMPQVNIVKKTEVQTGGFSKESILPKRNSDKLIARKKDWDPKKYGGFDSPTVAYSVLVVAKVEKGKSKKLKSVKELLGITIMERSSFEKNPIDFLEAKGYKEVKKDLIIKLPKYSLFELENGRKRMLASAGELQKGNELALPSKYVNFLYLASHYEKLKGSPEDNEQKQLFVEQHKHYLDEIIEQISEFSKRVILADANLDKVLSAYNKHRDKPIREQAENIIHLFTLTNLGAPAAFKYFDTTIDRKRYTSTKEVLDATLIHQSITGLYETRIDLSQLGGDGGGGSEAAAKPAPGGAVLGLEHLPRPPQISQFPLNPERLQALQHLVRKALEAGHIEPYTGPGNNPVFPVKKANGTWRFIHDLRATNSLTIDLSSSSPGPPDLSSLPTTLAHLQTIDLRDAFFQIPLPKQFQPYFAFTVPQQCNYGPGTRYAWKVLPQGFKNSPTLFQMQLAHILQPIRQAFPQCTILQYMDDILLASPSHEDLLLLSEATMASLISHGLPVSENKTQQTPGTIKFLGQIISPNHLTYDAVPTVPIRSRWALPELQALLGEIQWVSKGTPTLRQPLHSLYCALQPHTDPRDQIYLNPSQVQSLVQLRQALSQNCRSRLVQTLPLLGAIMLTLTGTTTVVFQSKEQWPLVWLHAPLPHTSQCPWGQLLASAVLLLDKYTLQSYGLLCQTIHHNISTQTFNQFIQTSDHPSVPILLHHSHRFKNLGAQTGELWNTFLKTAAPLAPVKALMPVFTLSPVIINTAPCLFSDGSTSRAAYILWDKQILSQRSFPLPPPHKSAQRAELLGLLHGLSSARSWRCLNIFLDSKYLYHYLRTLALGTFQGRSSQAPFQALLPRLLSRKVVYLHHVRSHTNLPDPISRLNALTDALLITPVLQLAGKRTADGSEFEKRTADGSEFESPKKKAKVE

SEQ ID NO: 1485 - protein, 2011 aa, synthetic construct
MPAAKRVKLDGGDKKYSIGLDIGTNSVGWAVITDEYKVPSKKFKVLGNTDRHSIKKNLIGALLFDSGETAEATRLKRTARRRYTRRKNRICYLQEIFSNEMAKVDDSFFHRLEESFLVEEDKKHERHPIFGNIVDEVAYHEKYPTIYHLRKKLVDSTDKADLRLIYLALAHMIKFRGHFLIEGDLNPDNSDVDKLFIQLVQTYNQLFEENPINASGVDAKAILSARLSKSRRLENLIAQLPGEKKNGLFGNLIALSLGLTPNFKSNFDLAEDAKLQLSKDTYDDDLDNLLAQIGDQYADLFLAAKNLSDAILLSDILRVNTEITKAPLSASMIKRYDEHHQDLTLLKALVRQQLPEKYKEIFFDQSKNGYAGYIDGGASQEEFYKFIKPILEKMDGTEELLVKLNREDLLRKQRTFDNGSIPHQIHLGELHAILRRQEDFYPFLKDNREKIEKILTFRIPYYVGPLARGNSRFAWMTRKSEETITPWNFEEVVDKGASAQSFIERMTNFDKNLPNEKVLPKHSLLYEYFTVYNELTKVKYVTEGMRKPAFLSGEQKKAIVDLLFKTNRKVTVKQLKEDYFKKIECFDSVEISGVEDRFNASLGTYHDLLKIIKDKDFLDNEENEDILEDIVLTLTLFEDREMIEERLKTYAHLFDDKVMKQLKRRRYTGWGRLSRKLINGIRDKQSGKTILDFLKSDGFANRNFMQLIHDDSLTFKEDIQKAQVSGQGDSLHEHIANLAGSPAIKKGILQTVKVVDELVKVMGRHKPENIVIEMARENQTTQKGQKNSRERMKRIEEGIKELGSQILKEHPVENTQLQNEKLYLYYLQNGRDMYVDQELDINRLSDYDVDHIVPQSFLKDDSIDNKVLTRSDKARGKSDNVPSEEVVKKMKNYWRQLLNAKLITQRKFDNLTKAERGGLSELDKAGFIKRQLVETRQITKHVAQILDSRMNTKYDENDKLIREVKVITLKSKLVSDFRKDFQFYKVREINNYHHAHDAYLNAVVGTALIKKYPKLESEFVYGDYKVYDVRKMIAKSEQEIGKATAKYFFYSNIMNFFKTEITLANGEIRKRPLIETNGETGEIVWDKGRDFATVRKVLSMPQVNIVKKTEVQTGGFSKESILPKRNSDKLIARKKDWDPKKYGGFDSPTVAYSVLVVAKVEKGKSKKLKSVKELLGITIMERSSFEKNPIDFLEAKGYKEVKKDLIIKLPKYSLFELENGRKRMLASAGELQKGNELALPSKYVNFLYLASHYEKLKGSPEDNEQKQLFVEQHKHYLDEIIEQISEFSKRVILADANLDKVLSAYNKHRDKPIREQAENIIHLFTLTNLGAPAAFKYFDTTIDRKRYTSTKEVLDATLIHQSITGLYETRIDLSQLGGDGGGGGGGSGSSGGAVLGLEHLPRPPQISQFPLNPERLQALQHLVRKALEAGHIEPYTGPGNNPVFPVKKANGTWRFIHDLRATNSLTIDLSSSSPGPPDLSSPPTTLAHLQTIDLRDAFFQIPLPKQFQPYFAFTVPQQCNYGPGTRYAWKVLPQGFKNSPTLFQMQLAHILQPIRQAFPQCTILQYMDDILLASPSHEDLLLLSEATMASLISHGLPVSENKTQQTPGTIKFLGQIISPNHLTYDAVPTVPIRSRWALPELQALLGEIQWVSKGTPTLRQPLHSLYCALQPHTDPRDQIYLNPSQVQSLVQLRQALSQNCRSRLVQTLPLLGAIMLTLTGTTTVVFQSKEQWPLVWLHAPLPHTSQCPWGQLLASAVLLLDKYTLQSYGLLCQTIHHNISTQTFNQFIQTSDHPSVPILLHHSHRFKNLGAQTGELWNTFLKTAAPLAPVKALMPVFTLSPVIINTAPCLFSDGSTSRAAYILWDKQILSQRSFPLPPPHKSAQRAELLGLLHGLSSARSWRCLNIFLDSKYLYHYLRTLALGTFQGRSSQAPFQALLPRLLSRKVVYLHHVRSHTNLPDPISRLNALTDALLITPVLQLAGKRTADGSEFEKRTADGSEFESPKKKAKVE

SEQ ID NO: 1486 - protein, 2013 aa, synthetic construct
MPAAKRVKLDGGDKKYSIGLDIGTNSVGWAVITDEYKVPSKKFKVLGNTDRHSIKKNLIGALLFDSGETAEATRLKRTARRRYTRRKNRICYLQEIFSNEMAKVDDSFFHRLEESFLVEEDKKHERHPIFGNIVDEVAYHEKYPTIYHLRKKLVDSTDKADLRLIYLALAHMIKFRGHFLIEGDLNPDNSDVDKLFIQLVQTYNQLFEENPINASGVDAKAILSARLSKSRRLENLIAQLPGEKKNGLFGNLIALSLGLTPNFKSNFDLAEDAKLQLSKDTYDDDLDNLLAQIGDQYADLFLAAKNLSDAILLSDILRVNTEITKAPLSASMIKRYDEHHQDLTLLKALVRQQLPEKYKEIFFDQSKNGYAGYIDGGASQEEFYKFIKPILEKMDGTEELLVKLNREDLLRKQRTFDNGSIPHQIHLGELHAILRRQEDFYPFLKDNREKIEKILTFRIPYYVGPLARGNSRFAWMTRKSEETITPWNFEEVVDKGASAQSFIERMTNFDKNLPNEKVLPKHSLLYEYFTVYNELTKVKYVTEGMRKPAFLSGEQKKAIVDLLFKTNRKVTVKQLKEDYFKKIECFDSVEISGVEDRFNASLGTYHDLLKIIKDKDFLDNEENEDILEDIVLTLTLFEDREMIEERLKTYAHLFDDKVMKQLKRRRYTGWGRLSRKLINGIRDKQSGKTILDFLKSDGFANRNFMQLIHDDSLTFKEDIQKAQVSGQGDSLHEHIANLAGSPAIKKGILQTVKVVDELVKVMGRHKPENIVIEMARENQTTQKGQKNSRERMKRIEEGIKELGSQILKEHPVENTQLQNEKLYLYYLQNGRDMYVDQELDINRLSDYDVDHIVPQSFLKDDSIDNKVLTRSDKARGKSDNVPSEEVVKKMKNYWRQLLNAKLITQRKFDNLTKAERGGLSELDKAGFIKRQLVETRQITKHVAQILDSRMNTKYDENDKLIREVKVITLKSKLVSDFRKDFQFYKVREINNYHHAHDAYLNAVVGTALIKKYPKLESEFVYGDYKVYDVRKMIAKSEQEIGKATAKYFFYSNIMNFFKTEITLANGEIRKRPLIETNGETGEIVWDKGRDFATVRKVLSMPQVNIVKKTEVQTGGFSKESILPKRNSDKLIARKKDWDPKKYGGFDSPTVAYSVLVVAKVEKGKSKKLKSVKELLGITIMERSSFEKNPIDFLEAKGYKEVKKDLIIKLPKYSLFELENGRKRMLASAGELQKGNELALPSKYVNFLYLASHYEKLKGSPEDNEQKQLFVEQHKHYLDEIIEQISEFSKRVILADANLDKVLSAYNKHRDKPIREQAENIIHLFTLTNLGAPAAFKYFDTTIDRKRYTSTKEVLDATLIHQSITGLYETRIDLSQLGGDGGEAAAKGSSGGSGGAVLGLEHLPRPPQISQFPLNPERLQALQHLVRKALEAGHIEPYTGPGNNPVFPVKKANGTWRFIHDLRATNSLTIDLSSSSPGPPDLSSPPTTLAHLQTIDLRDAFFQIPLPKQFQPYFAFTVPQQCNYGPGTRYAWKVLPQGFKNSPTLFQMQLAHILQPIRQAFPQCTILQYMDDILLASPSHEDLLLLSEATMASLISHGLPVSENKTQQTPGTIKFLGQIISPNHLTYDAVPTVPIRSRWALPELQALLGEIQWVSKGTPTLRQPLHSLYCALQPHTDPRDQIYLNPSQVQSLVQLRQALSQNCRSRLVQTLPLLGAIMLTLTGTTTVVFQSKEQWPLVWLHAPLPHTSQCPWGQLLASAVLLLDKYTLQSYGLLCQTIHHNISTQTFNQFIQTSDHPSVPILLHHSHRFKNLGAQTGELWNTFLKTAAPLAPVKALMPVFTLSPVIINTAPCLFSDGSTSRAAYILWDKQILSQRSFPLPPPHKSAQRAELLGLLHGLSSARSWRCLNIFLDSKYLYHYLRTLALGTFQGRSSQAPFQALLPRLLSRKVVYLHHVRSHTNLPDPISRLNALTDALLITPVLQLAGKRTADGSEFEKRTADGSEFESPKKKAKVE

SEQ ID NO: 1487 - protein, 2013 aa, synthetic construct
MPAAKRVKLDGGDKKYSIGLDIGTNSVGWAVITDEYKVPSKKFKVLGNTDRHSIKKNLIGALLFDSGETAEATRLKRTARRRYTRRKNRICYLQEIFSNEMAKVDDSFFHRLEESFLVEEDKKHERHPIFGNIVDEVAYHEKYPTIYHLRKKLVDSTDKADLRLIYLALAHMIKFRGHFLIEGDLNPDNSDVDKLFIQLVQTYNQLFEENPINASGVDAKAILSARLSKSRRLENLIAQLPGEKKNGLFGNLIALSLGLTPNFKSNFDLAEDAKLQLSKDTYDDDLDNLLAQIGDQYADLFLAAKNLSDAILLSDILRVNTEITKAPLSASMIKRYDEHHQDLTLLKALVRQQLPEKYKEIFFDQSKNGYAGYIDGGASQEEFYKFIKPILEKMDGTEELLVKLNREDLLRKQRTFDNGSIPHQIHLGELHAILRRQEDFYPFLKDNREKIEKILTFRIPYYVGPLARGNSRFAWMTRKSEETITPWNFEEVVDKGASAQSFIERMTNFDKNLPNEKVLPKHSLLYEYFTVYNELTKVKYVTEGMRKPAFLSGEQKKAIVDLLFKTNRKVTVKQLKEDYFKKIECFDSVEISGVEDRFNASLGTYHDLLKIIKDKDFLDNEENEDILEDIVLTLTLFEDREMIEERLKTYAHLFDDKVMKQLKRRRYTGWGRLSRKLINGIRDKQSGKTILDFLKSDGFANRNFMQLIHDDSLTFKEDIQKAQVSGQGDSLHEHIANLAGSPAIKKGILQTVKVVDELVKVMGRHKPENIVIEMARENQTTQKGQKNSRERMKRIEEGIKELGSQILKEHPVENTQLQNEKLYLYYLQNGRDMYVDQELDINRLSDYDVDHIVPQSFLKDDSIDNKVLTRSDKARGKSDNVPSEEVVKKMKNYWRQLLNAKLITQRKFDNLTKAERGGLSELDKAGFIKRQLVETRQITKHVAQILDSRMNTKYDENDKLIREVKVITLKSKLVSDFRKDFQFYKVREINNYHHAHDAYLNAVVGTALIKKYPKLESEFVYGDYKVYDVRKMIAKSEQEIGKATAKYFFYSNIMNFFKTEITLANGEIRKRPLIETNGETGEIVWDKGRDFATVRKVLSMPQVNIVKKTEVQTGGFSKESILPKRNSDKLIARKKDWDPKKYGGFDSPTVAYSVLVVAKVEKGKSKKLKSVKELLGITIMERSSFEKNPIDFLEAKGYKEVKKDLIIKLPKYSLFELENGRKRMLASAGELQKGNELALPSKYVNFLYLASHYEKLKGSPEDNEQKQLFVEQHKHYLDEIIEQISEFSKRVILADANLDKVLSAYNKHRDKPIREQAENIIHLFTLTNLGAPAAFKYFDTTIDRKRYTSTKEVLDATLIHQSITGLYETRIDLSQLGGDGGPAPEAAAKGGGGGAVLGLEHLPRPPQISQFPLNPERLQALQHLVRKALEAGHIEPYTGPGNNPVFPVKKANGTWRFIHDLRATNSLTIDLSSSSPGPPDLSSPPTTLAHLQTIDLRDAFFQIPLPKQFQPYFAFTVPQQCNYGPGTRYAWKVLPQGFKNSPTLFQMQLAHILQPIRQAFPQCTILQYMDDILLASPSHEDLLLLSEATMASLISHGLPVSENKTQQTPGTIKFLGQIISPNHLTYDAVPTVPIRSRWALPELQALLGEIQWVSKGTPTLRQPLHSLYCALQPHTDPRDQIYLNPSQVQSLVQLRQALSQNCRSRLVQTLPLLGAIMLTLTGTTTVVFQSKEQWPLVWLHAPLPHTSQCPWGQLLASAVLLLDKYTLQSYGLLCQTIHHNISTQTFNQFIQTSDHPSVPILLHHSHRFKNLGAQTGELWNTFLKTAAPLAPVKALMPVFTLSPVIINTAPCLFSDGSTSRAAYILWDKQILSQRSFPLPPPHKSAQRAELLGLLHGLSSARSWRCLNIFLDSKYLYHYLRTLALGTFQGRSSQAPFQALLPRLLSRKVVYLHHVRSHTNLPDPISRLNALTDALLITPVLQLAGKRTADGSEFEKRTADGSEFESPKKKAKVE

SEQ ID NO: 1488 - protein, 2017 aa, synthetic construct
MPAAKRVKLDGGDKKYSIGLDIGTNSVGWAVITDEYKVPSKKFKVLGNTDRHSIKKNLIGALLFDSGETAEATRLKRTARRRYTRRKNRICYLQEIFSNEMAKVDDSFFHRLEESFLVEEDKKHERHPIFGNIVDEVAYHEKYPTIYHLRKKLVDSTDKADLRLIYLALAHMIKFRGHFLIEGDLNPDNSDVDKLFIQLVQTYNQLFEENPINASGVDAKAILSARLSKSRRLENLIAQLPGEKKNGLFGNLIALSLGLTPNFKSNFDLAEDAKLQLSKDTYDDDLDNLLAQIGDQYADLFLAAKNLSDAILLSDILRVNTEITKAPLSASMIKRYDEHHQDLTLLKALVRQQLPEKYKEIFFDQSKNGYAGYIDGGASQEEFYKFIKPILEKMDGTEELLVKLNREDLLRKQRTFDNGSIPHQIHLGELHAILRRQEDFYPFLKDNREKIEKILTFRIPYYVGPLARGNSRFAWMTRKSEETITPWNFEEVVDKGASAQSFIERMTNFDKNLPNEKVLPKHSLLYEYFTVYNELTKVKYVTEGMRKPAFLSGEQKKAIVDLLFKTNRKVTVKQLKEDYFKKIECFDSVEISGVEDRFNASLGTYHDLLKIIKDKDFLDNEENEDILEDIVLTLTLFEDREMIEERLKTYAHLFDDKVMKQLKRRRYTGWGRLSRKLINGIRDKQSGKTILDFLKSDGFANRNFMQLIHDDSLTFKEDIQKAQVSGQGDSLHEHIANLAGSPAIKKGILQTVKVVDELVKVMGRHKPENIVIEMARENQTTQKGQKNSRERMKRIEEGIKELGSQILKEHPVENTQLQNEKLYLYYLQNGRDMYVDQELDINRLSDYDVDHIVPQSFLKDDSIDNKVLTRSDKARGKSDNVPSEEVVKKMKNYWRQLLNAKLITQRKFDNLTKAERGGLSELDKAGFIKRQLVETRQITKHVAQILDSRMNTKYDENDKLIREVKVITLKSKLVSDFRKDFQFYKVREINNYHHAHDAYLNAVVGTALIKKYPKLESEFVYGDYKVYDVRKMIAKSEQEIGKATAKYFFYSNIMNFFKTEITLANGEIRKRPLIETNGETGEIVWDKGRDFATVRKVLSMPQVNIVKKTEVQTGGFSKESILPKRNSDKLIARKKDWDPKKYGGFDSPTVAYSVLVVAKVEKGKSKKLKSVKELLGITIMERSSFEKNPIDFLEAKGYKEVKKDLIIKLPKYSLFELENGRKRMLASAGELQKGNELALPSKYVNFLYLASHYEKLKGSPEDNEQKQLFVEQHKHYLDEIIEQISEFSKRVILADANLDKVLSAYNKHRDKPIREQAENIIHLFTLTNLGAPAAFKYFDTTIDRKRYTSTKEVLDATLIHQSITGLYETRIDLSQLGGDGGGGGGSEAAAKGGGGSGGAVLGLEHLPRPPEISQFPLNPERLQALQHLVRKALEAGHIEPYTGPGNNPVFPVKKANGTWRFIHDLRATNSLTIDLSSSSPGPPDLSSLPTTLAHLQTIDLKDAFFQIPLPKQFQPYFAFTVPQQCNYGPGTRYAWRVLPQGFKNSPTLFEMQLAHILQPIRQAFPQCTILQYMDDILLASPSHADLQLLSEATMASLISHGLPVSENKTQQTPGTIKFLGQIISPNHLTYDAVPKVPIRSRWALPELQALLGEIQWVSKGTPTLRQPLHSLYCALQRHTDPRDQIYLNPSQVQSLVQLRQALSQNCRSRLVQTLPLLGAIMLTLTGTTTVVFQSKQQWPLVWLHAPLPHTSQCPWGQLLASAVLLLDKYTLQSYGLLCQTIHHNISTQTFNQFIQTSDHPSVPILLHHSHRFKNLGAQTGELWNTFLKTTAPLAPVKALMPVFTLSPVIINTAPCLFSDGSTSQAAYILWDKHILSQRSFPLPPPHKSAQRAELLGLLHGLSSARSWRCLNIFLDSKYLYHYLRTLALGTFQGRSSQAPFQALLPRLLSRKVVYLHHVRSHTNLPDPISRLNALTDALLITPVLQLAGKRTADGSEFEKRTADGSEFESPKKKAKVE

SEQ ID NO: 1489 - protein, 2017 aa, synthetic construct
MPAAKRVKLDGGDKKYSIGLDIGTNSVGWAVITDEYKVPSKKFKVLGNTDRHSIKKNLIGALLFDSGETAEATRLKRTARRRYTRRKNRICYLQEIFSNEMAKVDDSFFHRLEESFLVEEDKKHERHPIFGNIVDEVAYHEKYPTIYHLRKKLVDSTDKADLRLIYLALAHMIKFRGHFLIEGDLNPDNSDVDKLFIQLVQTYNQLFEENPINASGVDAKAILSARLSKSRRLENLIAQLPGEKKNGLFGNLIALSLGLTPNFKSNFDLAEDAKLQLSKDTYDDDLDNLLAQIGDQYADLFLAAKNLSDAILLSDILRVNTEITKAPLSASMIKRYDEHHQDLTLLKALVRQQLPEKYKEIFFDQSKNGYAGYIDGGASQEEFYKFIKPILEKMDGTEELLVKLNREDLLRKQRTFDNGSIPHQIHLGELHAILRRQEDFYPFLKDNREKIEKILTFRIPYYVGPLARGNSRFAWMTRKSEETITPWNFEEVVDKGASAQSFIERMTNFDKNLPNEKVLPKHSLLYEYFTVYNELTKVKYVTEGMRKPAFLSGEQKKAIVDLLFKTNRKVTVKQLKEDYFKKIECFDSVEISGVEDRFNASLGTYHDLLKIIKDKDFLDNEENEDILEDIVLTLTLFEDREMIEERLKTYAHLFDDKVMKQLKRRRYTGWGRLSRKLINGIRDKQSGKTILDFLKSDGFANRNFMQLIHDDSLTFKEDIQKAQVSGQGDSLHEHIANLAGSPAIKKGILQTVKVVDELVKVMGRHKPENIVIEMARENQTTQKGQKNSRERMKRIEEGIKELGSQILKEHPVENTQLQNEKLYLYYLQNGRDMYVDQELDINRLSDYDVDHIVPQSFLKDDSIDNKVLTRSDKARGKSDNVPSEEVVKKMKNYWRQLLNAKLITQRKFDNLTKAERGGLSELDKAGFIKRQLVETRQITKHVAQILDSRMNTKYDENDKLIREVKVITLKSKLVSDFRKDFQFYKVREINNYHHAHDAYLNAVVGTALIKKYPKLESEFVYGDYKVYDVRKMIAKSEQEIGKATAKYFFYSNIMNFFKTEITLANGEIRKRPLIETNGETGEIVWDKGRDFATVRKVLSMPQVNIVKKTEVQTGGFSKESILPKRNSDKLIARKKDWDPKKYGGFDSPTVAYSVLVVAKVEKGKSKKLKSVKELLGITIMERSSFEKNPIDFLEAKGYKEVKKDLIIKLPKYSLFELENGRKRMLASAGELQKGNELALPSKYVNFLYLASHYEKLKGSPEDNEQKQLFVEQHKHYLDEIIEQISEFSKRVILADANLDKVLSAYNKHRDKPIREQAENIIHLFTLTNLGAPAAFKYFDTTIDRKRYTSTKEVLDATLIHQSITGLYETRIDLSQLGGDGGEAAAKEAAAKEAAAKGGAVLGLEHLPRPPEISQFPLNPERLQALQHLVRKALEAGHIEPYTGPGNNPVFPVKKANGTWRFIHDLRATNSLTIDLSSSSPGPPDLSSLPTTLAHLQTIDLKDAFFQIPLPKQFQPYFAFTVPQQCNYGPGTRYAWRVLPQGFKNSPTLFEMQLAHILQPIRQAFPQCTILQYMDDILLASPSHADLQLLSEATMASLISHGLPVSENKTQQTPGTIKFLGQIISPNHLTYDAVPKVPIRSRWALPELQALLGEIQWVSKGTPTLRQPLHSLYCALQRHTDPRDQIYLNPSQVQSLVQLRQALSQNCRSRLVQTLPLLGAIMLTLTGTTTVVFQSKQQWPLVWLHAPLPHTSQCPWGQLLASAVLLLDKYTLQSYGLLCQTIHHNISTQTFNQFIQTSDHPSVPILLHHSHRFKNLGAQTGELWNTFLKTTAPLAPVKALMPVFTLSPVIINTAPCLFSDGSTSQAAYILWDKHILSQRSFPLPPPHKSAQRAELLGLLHGLSSARSWRCLNIFLDSKYLYHYLRTLALGTFQGRSSQAPFQALLPRLLSRKVVYLHHVRSHTNLPDPISRLNALTDALLITPVLQLAGKRTADGSEFEKRTADGSEFESPKKKAKVE

SEQ ID NO: 1490 - protein, 2010 aa, synthetic construct
MPAAKRVKLDGGDKKYSIGLDIGTNSVGWAVITDEYKVPSKKFKVLGNTDRHSIKKNLIGALLFDSGETAEATRLKRTARRRYTRRKNRICYLQEIFSNEMAKVDDSFFHRLEESFLVEEDKKHERHPIFGNIVDEVAYHEKYPTIYHLRKKLVDSTDKADLRLIYLALAHMIKFRGHFLIEGDLNPDNSDVDKLFIQLVQTYNQLFEENPINASGVDAKAILSARLSKSRRLENLIAQLPGEKKNGLFGNLIALSLGLTPNFKSNFDLAEDAKLQLSKDTYDDDLDNLLAQIGDQYADLFLAAKNLSDAILLSDILRVNTEITKAPLSASMIKRYDEHHQDLTLLKALVRQQLPEKYKEIFFDQSKNGYAGYIDGGASQEEFYKFIKPILEKMDGTEELLVKLNREDLLRKQRTFDNGSIPHQIHLGELHAILRRQEDFYPFLKDNREKIEKILTFRIPYYVGPLARGNSRFAWMTRKSEETITPWNFEEVVDKGASAQSFIERMTNFDKNLPNEKVLPKHSLLYEYFTVYNELTKVKYVTEGMRKPAFLSGEQKKAIVDLLFKTNRKVTVKQLKEDYFKKIECFDSVEISGVEDRFNASLGTYHDLLKIIKDKDFLDNEENEDILEDIVLTLTLFEDREMIEERLKTYAHLFDDKVMKQLKRRRYTGWGRLSRKLINGIRDKQSGKTILDFLKSDGFANRNFMQLIHDDSLTFKEDIQKAQVSGQGDSLHEHIANLAGSPAIKKGILQTVKVVDELVKVMGRHKPENIVIEMARENQTTQKGQKNSRERMKRIEEGIKELGSQILKEHPVENTQLQNEKLYLYYLQNGRDMYVDQELDINRLSDYDVDHIVPQSFLKDDSIDNKVLTRSDKARGKSDNVPSEEVVKKMKNYWRQLLNAKLITQRKFDNLTKAERGGLSELDKAGFIKRQLVETRQITKHVAQILDSRMNTKYDENDKLIREVKVITLKSKLVSDFRKDFQFYKVREINNYHHAHDAYLNAVVGTALIKKYPKLESEFVYGDYKVYDVRKMIAKSEQEIGKATAKYFFYSNIMNFFKTEITLANGEIRKRPLIETNGETGEIVWDKGRDFATVRKVLSMPQVNIVKKTEVQTGGFSKESILPKRNSDKLIARKKDWDPKKYGGFDSPTVAYSVLVVAKVEKGKSKKLKSVKELLGITIMERSSFEKNPIDFLEAKGYKEVKKDLIIKLPKYSLFELENGRKRMLASAGELQKGNELALPSKYVNFLYLASHYEKLKGSPEDNEQKQLFVEQHKHYLDEIIEQISEFSKRVILADANLDKVLSAYNKHRDKPIREQAENIIHLFTLTNLGAPAAFKYFDTTIDRKRYTSTKEVLDATLIHQSITGLYETRIDLSQLGGDGGGGGEAAAKGGAVLGLEHLPRPPEISQFPLNPERLQALQHLVRKALEAGHIEPYTGPGNNPVFPVKKANGTWRFIHDLRATNSLTIDLSSSSPGPPDLSSLPTTLAHLQTIDLKDAFFQIPLPKQFQPYFAFTVPQQCNYGPGTRYAWRVLPQGFKNSPTLFEMQLAHILQPIRQAFPQCTILQYMDDILLASPSHADLQLLSEATMASLISHGLPVSENKTQQTPGTIKFLGQIISPNHLTYDAVPKVPIRSRWALPELQALLGEIQWVSKGTPTLRQPLHSLYCALQRHTDPRDQIYLNPSQVQSLVQLRQALSQNCRSRLVQTLPLLGAIMLTLTGTTTVVFQSKQQWPLVWLHAPLPHTSQCPWGQLLASAVLLLDKYTLQSYGLLCQTIHHNISTQTFNQFIQTSDHPSVPILLHHSHRFKNLGAQTGELWNTFLKTTAPLAPVKALMPVFTLSPVIINTAPCLFSDGSTSQAAYILWDKHILSQRSFPLPPPHKSAQRAELLGLLHGLSSARSWRCLNIFLDSKYLYHYLRTLALGTFQGRSSQAPFQALLPRLLSRKVVYLHHVRSHTNLPDPISRLNALTDALLITPVLQLAGKRTADGSEFEKRTADGSEFESPKKKAKVE

SEQ ID NO: 1491 - protein, 2027 aa, synthetic construct
MPAAKRVKLDGGDKKYSIGLDIGTNSVGWAVITDEYKVPSKKFKVLGNTDRHSIKKNLIGALLFDSGETAEATRLKRTARRRYTRRKNRICYLQEIFSNEMAKVDDSFFHRLEESFLVEEDKKHERHPIFGNIVDEVAYHEKYPTIYHLRKKLVDSTDKADLRLIYLALAHMIKFRGHFLIEGDLNPDNSDVDKLFIQLVQTYNQLFEENPINASGVDAKAILSARLSKSRRLENLIAQLPGEKKNGLFGNLIALSLGLTPNFKSNFDLAEDAKLQLSKDTYDDDLDNLLAQIGDQYADLFLAAKNLSDAILLSDILRVNTEITKAPLSASMIKRYDEHHQDLTLLKALVRQQLPEKYKEIFFDQSKNGYAGYIDGGASQEEFYKFIKPILEKMDGTEELLVKLNREDLLRKQRTFDNGSIPHQIHLGELHAILRRQEDFYPFLKDNREKIEKILTFRIPYYVGPLARGNSRFAWMTRKSEETITPWNFEEVVDKGASAQSFIERMTNFDKNLPNEKVLPKHSLLYEYFTVYNELTKVKYVTEGMRKPAFLSGEQKKAIVDLLFKTNRKVTVKQLKEDYFKKIECFDSVEISGVEDRFNASLGTYHDLLKIIKDKDFLDNEENEDILEDIVLTLTLFEDREMIEERLKTYAHLFDDKVMKQLKRRRYTGWGRLSRKLINGIRDKQSGKTILDFLKSDGFANRNFMQLIHDDSLTFKEDIQKAQVSGQGDSLHEHIANLAGSPAIKKGILQTVKVVDELVKVMGRHKPENIVIEMARENQTTQKGQKNSRERMKRIEEGIKELGSQILKEHPVENTQLQNEKLYLYYLQNGRDMYVDQELDINRLSDYDVDHIVPQSFLKDDSIDNKVLTRSDKARGKSDNVPSEEVVKKMKNYWRQLLNAKLITQRKFDNLTKAERGGLSELDKAGFIKRQLVETRQITKHVAQILDSRMNTKYDENDKLIREVKVITLKSKLVSDFRKDFQFYKVREINNYHHAHDAYLNAVVGTALIKKYPKLESEFVYGDYKVYDVRKMIAKSEQEIGKATAKYFFYSNIMNFFKTEITLANGEIRKRPLIETNGETGEIVWDKGRDFATVRKVLSMPQVNIVKKTEVQTGGFSKESILPKRNSDKLIARKKDWDPKKYGGFDSPTVAYSVLVVAKVEKGKSKKLKSVKELLGITIMERSSFEKNPIDFLEAKGYKEVKKDLIIKLPKYSLFELENGRKRMLASAGELQKGNELALPSKYVNFLYLASHYEKLKGSPEDNEQKQLFVEQHKHYLDEIIEQISEFSKRVILADANLDKVLSAYNKHRDKPIREQAENIIHLFTLTNLGAPAAFKYFDTTIDRKRYTSTKEVLDATLIHQSITGLYETRIDLSQLGGDGGGGGGSGGGGSGGGGSGGGGSGGGGSGGAVLGLEHLPRPPEISQFPLNPERLQALQHLVRKALEAGHIEPYTGPGNNPVFPVKKANGTWRFIHDLRATNSLTIDLSSSSPGPPDLSSLPTTLAHLQTIDLKDAFFQIPLPKQFQPYFAFTVPQQCNYGPGTRYAWRVLPQGFKNSPTLFEMQLAHILQPIRQAFPQCTILQYMDDILLASPSHADLQLLSEATMASLISHGLPVSENKTQQTPGTIKFLGQIISPNHLTYDAVPKVPIRSRWALPELQALLGEIQWVSKGTPTLRQPLHSLYCALQRHTDPRDQIYLNPSQVQSLVQLRQALSQNCRSRLVQTLPLLGAIMLTLTGTTTVVFQSKQQWPLVWLHAPLPHTSQCPWGQLLASAVLLLDKYTLQSYGLLCQTIHHNISTQTFNQFIQTSDHPSVPILLHHSHRFKNLGAQTGELWNTFLKTTAPLAPVKALMPVFTLSPVIINTAPCLFSDGSTSQAAYILWDKHILSQRSFPLPPPHKSAQRAELLGLLHGLSSARSWRCLNIFLDSKYLYHYLRTLALGTFQGRSSQAPFQALLPRLLSRKVVYLHHVRSHTNLPDPISRLNALTDALLITPVLQLAGKRTADGSEFEKRTADGSEFESPKKKAKVE

SEQ ID NO: 1492 - protein, 2011 aa, synthetic construct
MPAAKRVKLDGGDKKYSIGLDIGTNSVGWAVITDEYKVPSKKFKVLGNTDRHSIKKNLIGALLFDSGETAEATRLKRTARRRYTRRKNRICYLQEIFSNEMAKVDDSFFHRLEESFLVEEDKKHERHPIFGNIVDEVAYHEKYPTIYHLRKKLVDSTDKADLRLIYLALAHMIKFRGHFLIEGDLNPDNSDVDKLFIQLVQTYNQLFEENPINASGVDAKAILSARLSKSRRLENLIAQLPGEKKNGLFGNLIALSLGLTPNFKSNFDLAEDAKLQLSKDTYDDDLDNLLAQIGDQYADLFLAAKNLSDAILLSDILRVNTEITKAPLSASMIKRYDEHHQDLTLLKALVRQQLPEKYKEIFFDQSKNGYAGYIDGGASQEEFYKFIKPILEKMDGTEELLVKLNREDLLRKQRTFDNGSIPHQIHLGELHAILRRQEDFYPFLKDNREKIEKILTFRIPYYVGPLARGNSRFAWMTRKSEETITPWNFEEVVDKGASAQSFIERMTNFDKNLPNEKVLPKHSLLYEYFTVYNELTKVKYVTEGMRKPAFLSGEQKKAIVDLLFKTNRKVTVKQLKEDYFKKIECFDSVEISGVEDRFNASLGTYHDLLKIIKDKDFLDNEENEDILEDIVLTLTLFEDREMIEERLKTYAHLFDDKVMKQLKRRRYTGWGRLSRKLINGIRDKQSGKTILDFLKSDGFANRNFMQLIHDDSLTFKEDIQKAQVSGQGDSLHEHIANLAGSPAIKKGILQTVKVVDELVKVMGRHKPENIVIEMARENQTTQKGQKNSRERMKRIEEGIKELGSQILKEHPVENTQLQNEKLYLYYLQNGRDMYVDQELDINRLSDYDVDHIVPQSFLKDDSIDNKVLTRSDKARGKSDNVPSEEVVKKMKNYWRQLLNAKLITQRKFDNLTKAERGGLSELDKAGFIKRQLVETRQITKHVAQILDSRMNTKYDENDKLIREVKVITLKSKLVSDFRKDFQFYKVREINNYHHAHDAYLNAVVGTALIKKYPKLESEFVYGDYKVYDVRKMIAKSEQEIGKATAKYFFYSNIMNFFKTEITLANGEIRKRPLIETNGETGEIVWDKGRDFATVRKVLSMPQVNIVKKTEVQTGGFSKESILPKRNSDKLIARKKDWDPKKYGGFDSPTVAYSVLVVAKVEKGKSKKLKSVKELLGITIMERSSFEKNPIDFLEAKGYKEVKKDLIIKLPKYSLFELENGRKRMLASAGELQKGNELALPSKYVNFLYLASHYEKLKGSPEDNEQKQLFVEQHKHYLDEIIEQISEFSKRVILADANLDKVLSAYNKHRDKPIREQAENIIHLFTLTNLGAPAAFKYFDTTIDRKRYTSTKEVLDATLIHQSITGLYETRIDLSQLGGDGGGGGGGSPAPGGAVLGLEHLPRPPEISQFPLNPERLQALQHLVRKALEAGHIEPYTGPGNNPVFPVKKANGTWRFIHDLRATNSLTIDLSSSSPGPPDLSSLPTTLAHLQTIDLKDAFFQIPLPKQFQPYFAFTVPQQCNYGPGTRYAWRVLPQGFKNSPTLFQMQLAHILQPIRQAFPQCTILQYMDDILLASPSHADLQLLSEATMASLISHGLPVSENKTQQTPGTIKFLGQIISPNHLTYDAVPKVPIRSRWALPELQALLGEIQWVSKGTPTLRQPLHSLYCALQPHTDPRDQIYLNPSQVQSLVQLRQALSQNCRSRLVQTLPLLGAIMLTLTGTTTVVFQSKQQWPLVWLHAPLPHTSQCPWGQLLASAVLLLDKYTLQSYGLLCQTIHHNISTQTFNQFIQTSDHPSVPILLHHSHRFKNLGAQTGELWNTFLKTTAPLAPVKALMPVFTLSPVIINTAPCLFSDGSTSQAAYILWDKHILSQRSFPLPPPHKSAQRAELLGLLHGLSSARSWRCLNIFLDSKYLYHYLRTLALGTFQGRSSQAPFQALLPRLLSRKVVYLHHVRSHTNLPDPISRLNALTDALLITPVLQLAGKRTADGSEFEKRTADGSEFESPKKKAKVE

SEQ ID NO: 1493 - protein, 2008 aa, synthetic construct
MPAAKRVKLDGGDKKYSIGLDIGTNSVGWAVITDEYKVPSKKFKVLGNTDRHSIKKNLIGALLFDSGETAEATRLKRTARRRYTRRKNRICYLQEIFSNEMAKVDDSFFHRLEESFLVEEDKKHERHPIFGNIVDEVAYHEKYPTIYHLRKKLVDSTDKADLRLIYLALAHMIKFRGHFLIEGDLNPDNSDVDKLFIQLVQTYNQLFEENPINASGVDAKAILSARLSKSRRLENLIAQLPGEKKNGLFGNLIALSLGLTPNFKSNFDLAEDAKLQLSKDTYDDDLDNLLAQIGDQYADLFLAAKNLSDAILLSDILRVNTEITKAPLSASMIKRYDEHHQDLTLLKALVRQQLPEKYKEIFFDQSKNGYAGYIDGGASQEEFYKFIKPILEKMDGTEELLVKLNREDLLRKQRTFDNGSIPHQIHLGELHAILRRQEDFYPFLKDNREKIEKILTFRIPYYVGPLARGNSRFAWMTRKSEETITPWNFEEVVDKGASAQSFIERMTNFDKNLPNEKVLPKHSLLYEYFTVYNELTKVKYVTEGMRKPAFLSGEQKKAIVDLLFKTNRKVTVKQLKEDYFKKIECFDSVEISGVEDRFNASLGTYHDLLKIIKDKDFLDNEENEDILEDIVLTLTLFEDREMIEERLKTYAHLFDDKVMKQLKRRRYTGWGRLSRKLINGIRDKQSGKTILDFLKSDGFANRNFMQLIHDDSLTFKEDIQKAQVSGQGDSLHEHIANLAGSPAIKKGILQTVKVVDELVKVMGRHKPENIVIEMARENQTTQKGQKNSRERMKRIEEGIKELGSQILKEHPVENTQLQNEKLYLYYLQNGRDMYVDQELDINRLSDYDVDHIVPQSFLKDDSIDNKVLTRSDKARGKSDNVPSEEVVKKMKNYWRQLLNAKLITQRKFDNLTKAERGGLSELDKAGFIKRQLVETRQITKHVAQILDSRMNTKYDENDKLIREVKVITLKSKLVSDFRKDFQFYKVREINNYHHAHDAYLNAVVGTALIKKYPKLESEFVYGDYKVYDVRKMIAKSEQEIGKATAKYFFYSNIMNFFKTEITLANGEIRKRPLIETNGETGEIVWDKGRDFATVRKVLSMPQVNIVKKTEVQTGGFSKESILPKRNSDKLIARKKDWDPKKYGGFDSPTVAYSVLVVAKVEKGKSKKLKSVKELLGITIMERSSFEKNPIDFLEAKGYKEVKKDLIIKLPKYSLFELENGRKRMLASAGELQKGNELALPSKYVNFLYLASHYEKLKGSPEDNEQKQLFVEQHKHYLDEIIEQISEFSKRVILADANLDKVLSAYNKHRDKPIREQAENIIHLFTLTNLGAPAAFKYFDTTIDRKRYTSTKEVLDATLIHQSITGLYETRIDLSQLGGDGGPAPGGSGGAVLGLEHLPRPPEISQFPLNPERLQALQHLVRKALEAGHIEPYTGPGNNPVFPVKKANGTWRFIHDLRATNSLTIDLSSSSPGPPDLSSLPTTLAHLQTIDLKDAFFQIPLPKQFQPYFAFTVPQQCNYGPGTRYAWRVLPQGFKNSPTLFQMQLAHILQPIRQAFPQCTILQYMDDILLASPSHADLQLLSEATMASLISHGLPVSENKTQQTPGTIKFLGQIISPNHLTYDAVPKVPIRSRWALPELQALLGEIQWVSKGTPTLRQPLHSLYCALQPHTDPRDQIYLNPSQVQSLVQLRQALSQNCRSRLVQTLPLLGAIMLTLTGTTTVVFQSKQQWPLVWLHAPLPHTSQCPWGQLLASAVLLLDKYTLQSYGLLCQTIHHNISTQTFNQFIQTSDHPSVPILLHHSHRFKNLGAQTGELWNTFLKTTAPLAPVKALMPVFTLSPVIINTAPCLFSDGSTSQAAYILWDKHILSQRSFPLPPPHKSAQRAELLGLLHGLSSARSWRCLNIFLDSKYLYHYLRTLALGTFQGRSSQAPFQALLPRLLSRKVVYLHHVRSHTNLPDPISRLNALTDALLITPVLQLAGKRTADGSEFEKRTADGSEFESPKKKAKVE

SEQ ID NO: 1494 - protein, 2011 aa, synthetic construct
MPAAKRVKLDGGDKKYSIGLDIGTNSVGWAVITDEYKVPSKKFKVLGNTDRHSIKKNLIGALLFDSGETAEATRLKRTARRRYTRRKNRICYLQEIFSNEMAKVDDSFFHRLEESFLVEEDKKHERHPIFGNIVDEVAYHEKYPTIYHLRKKLVDSTDKADLRLIYLALAHMIKFRGHFLIEGDLNPDNSDVDKLFIQLVQTYNQLFEENPINASGVDAKAILSARLSKSRRLENLIAQLPGEKKNGLFGNLIALSLGLTPNFKSNFDLAEDAKLQLSKDTYDDDLDNLLAQIGDQYADLFLAAKNLSDAILLSDILRVNTEITKAPLSASMIKRYDEHHQDLTLLKALVRQQLPEKYKEIFFDQSKNGYAGYIDGGASQEEFYKFIKPILEKMDGTEELLVKLNREDLLRKQRTFDNGSIPHQIHLGELHAILRRQEDFYPFLKDNREKIEKILTFRIPYYVGPLARGNSRFAWMTRKSEETITPWNFEEVVDKGASAQSFIERMTNFDKNLPNEKVLPKHSLLYEYFTVYNELTKVKYVTEGMRKPAFLSGEQKKAIVDLLFKTNRKVTVKQLKEDYFKKIECFDSVEISGVEDRFNASLGTYHDLLKIIKDKDFLDNEENEDILEDIVLTLTLFEDREMIEERLKTYAHLFDDKVMKQLKRRRYTGWGRLSRKLINGIRDKQSGKTILDFLKSDGFANRNFMQLIHDDSLTFKEDIQKAQVSGQGDSLHEHIANLAGSPAIKKGILQTVKVVDELVKVMGRHKPENIVIEMARENQTTQKGQKNSRERMKRIEEGIKELGSQILKEHPVENTQLQNEKLYLYYLQNGRDMYVDQELDINRLSDYDVDHIVPQSFLKDDSIDNKVLTRSDKARGKSDNVPSEEVVKKMKNYWRQLLNAKLITQRKFDNLTKAERGGLSELDKAGFIKRQLVETRQITKHVAQILDSRMNTKYDENDKLIREVKVITLKSKLVSDFRKDFQFYKVREINNYHHAHDAYLNAVVGTALIKKYPKLESEFVYGDYKVYDVRKMIAKSEQEIGKATAKYFFYSNIMNFFKTEITLANGEIRKRPLIETNGETGEIVWDKGRDFATVRKVLSMPQVNIVKKTEVQTGGFSKESILPKRNSDKLIARKKDWDPKKYGGFDSPTVAYSVLVVAKVEKGKSKKLKSVKELLGITIMERSSFEKNPIDFLEAKGYKEVKKDLIIKLPKYSLFELENGRKRMLASAGELQKGNELALPSKYVNFLYLASHYEKLKGSPEDNEQKQLFVEQHKHYLDEIIEQISEFSKRVILADANLDKVLSAYNKHRDKPIREQAENIIHLFTLTNLGAPAAFKYFDTTIDRKRYTSTKEVLDATLIHQSITGLYETRIDLSQLGGDGGGGGPAPGGSGGAVLGLEHLPRPPEISQFPLNPERLQALQHLVRKALEAGHIEPYTGPGNNPVFPVKKANGTWRFIHDLRATNSLTIDLSSSSPGPPDLSSLPTTLAHLQTIDLKDAFFQIPLPKQFQPYFAFTVPQQCNYGPGTRYAWRVLPQGFKNSPTLFQMQLAHILQPIRQAFPQCTILQYMDDILLASPSHADLQLLSEATMASLISHGLPVSENKTQQTPGTIKFLGQIISPNHLTYDAVPKVPIRSRWALPELQALLGEIQWVSKGTPTLRQPLHSLYCALQPHTDPRDQIYLNPSQVQSLVQLRQALSQNCRSRLVQTLPLLGAIMLTLTGTTTVVFQSKQQWPLVWLHAPLPHTSQCPWGQLLASAVLLLDKYTLQSYGLLCQTIHHNISTQTFNQFIQTSDHPSVPILLHHSHRFKNLGAQTGELWNTFLKTTAPLAPVKALMPVFTLSPVIINTAPCLFSDGSTSQAAYILWDKHILSQRSFPLPPPHKSAQRAELLGLLHGLSSARSWRCLNIFLDSKYLYHYLRTLALGTFQGRSSQAPFQALLPRLLSRKVVYLHHVRSHTNLPDPISRLNALTDALLITPVLQLAGKRTADGSEFEKRTADGSEFESPKKKAKVE

SEQ ID NO: 1495 - protein, 2017 aa, synthetic construct
MPAAKRVKLDGGDKKYSIGLDIGTNSVGWAVITDEYKVPSKKFKVLGNTDRHSIKKNLIGALLFDSGETAEATRLKRTARRRYTRRKNRICYLQEIFSNEMAKVDDSFFHRLEESFLVEEDKKHERHPIFGNIVDEVAYHEKYPTIYHLRKKLVDSTDKADLRLIYLALAHMIKFRGHFLIEGDLNPDNSDVDKLFIQLVQTYNQLFEENPINASGVDAKAILSARLSKSRRLENLIAQLPGEKKNGLFGNLIALSLGLTPNFKSNFDLAEDAKLQLSKDTYDDDLDNLLAQIGDQYADLFLAAKNLSDAILLSDILRVNTEITKAPLSASMIKRYDEHHQDLTLLKALVRQQLPEKYKEIFFDQSKNGYAGYIDGGASQEEFYKFIKPILEKMDGTEELLVKLNREDLLRKQRTFDNGSIPHQIHLGELHAILRRQEDFYPFLKDNREKIEKILTFRIPYYVGPLARGNSRFAWMTRKSEETITPWNFEEVVDKGASAQSFIERMTNFDKNLPNEKVLPKHSLLYEYFTVYNELTKVKYVTEGMRKPAFLSGEQKKAIVDLLFKTNRKVTVKQLKEDYFKKIECFDSVEISGVEDRFNASLGTYHDLLKIIKDKDFLDNEENEDILEDIVLTLTLFEDREMIEERLKTYAHLFDDKVMKQLKRRRYTGWGRLSRKLINGIRDKQSGKTILDFLKSDGFANRNFMQLIHDDSLTFKEDIQKAQVSGQGDSLHEHIANLAGSPAIKKGILQTVKVVDELVKVMGRHKPENIVIEMARENQTTQKGQKNSRERMKRIEEGIKELGSQILKEHPVENTQLQNEKLYLYYLQNGRDMYVDQELDINRLSDYDVDHIVPQSFLKDDSIDNKVLTRSDKARGKSDNVPSEEVVKKMKNYWRQLLNAKLITQRKFDNLTKAERGGLSELDKAGFIKRQLVETRQITKHVAQILDSRMNTKYDENDKLIREVKVITLKSKLVSDFRKDFQFYKVREINNYHHAHDAYLNAVVGTALIKKYPKLESEFVYGDYKVYDVRKMIAKSEQEIGKATAKYFFYSNIMNFFKTEITLANGEIRKRPLIETNGETGEIVWDKGRDFATVRKVLSMPQVNIVKKTEVQTGGFSKESILPKRNSDKLIARKKDWDPKKYGGFDSPTVAYSVLVVAKVEKGKSKKLKSVKELLGITIMERSSFEKNPIDFLEAKGYKEVKKDLIIKLPKYSLFELENGRKRMLASAGELQKGNELALPSKYVNFLYLASHYEKLKGSPEDNEQKQLFVEQHKHYLDEIIEQISEFSKRVILADANLDKVLSAYNKHRDKPIREQAENIIHLFTLTNLGAPAAFKYFDTTIDRKRYTSTKEVLDATLIHQSITGLYETRIDLSQLGGDGGGSSGSSGSSGSSGSSGGAVLGLEHLPRPPEISQFPLNPERLQALQHLVRKALEAGHIEPYTGPGNNPVFPVKKANGTWRFIHDLRATNSLTIDLSSSSPGPPDLSSLPTTLAHLQTIDLKDAFFQIPLPKQFQPYFAFTVPQQCNYGPGTRYAWRVLPQGFKNSPTLFQMQLAHILQPIRQAFPQCTILQYMDDILLASPSHADLQLLSEATMASLISHGLPVSENKTQQTPGTIKFLGQIISPNHLTYDAVPKVPIRSRWALPELQALLGEIQWVSKGTPTLRQPLHSLYCALQPHTDPRDQIYLNPSQVQSLVQLRQALSQNCRSRLVQTLPLLGAIMLTLTGTTTVVFQSKQQWPLVWLHAPLPHTSQCPWGQLLASAVLLLDKYTLQSYGLLCQTIHHNISTQTFNQFIQTSDHPSVPILLHHSHRFKNLGAQTGELWNTFLKTTAPLAPVKALMPVFTLSPVIINTAPCLFSDGSTSQAAYILWDKHILSQRSFPLPPPHKSAQRAELLGLLHGLSSARSWRCLNIFLDSKYLYHYLRTLALGTFQGRSSQAPFQALLPRLLSRKVVYLHHVRSHTNLPDPISRLNALTDALLITPVLQLAGKRTADGSEFEKRTADGSEFESPKKKAKVE

SEQ ID NO: 1496 - protein, 2002 aa, synthetic construct
MPAAKRVKLDGGDKKYSIGLDIGTNSVGWAVITDEYKVPSKKFKVLGNTDRHSIKKNLIGALLFDSGETAEATRLKRTARRRYTRRKNRICYLQEIFSNEMAKVDDSFFHRLEESFLVEEDKKHERHPIFGNIVDEVAYHEKYPTIYHLRKKLVDSTDKADLRLIYLALAHMIKFRGHFLIEGDLNPDNSDVDKLFIQLVQTYNQLFEENPINASGVDAKAILSARLSKSRRLENLIAQLPGEKKNGLFGNLIALSLGLTPNFKSNFDLAEDAKLQLSKDTYDDDLDNLLAQIGDQYADLFLAAKNLSDAILLSDILRVNTEITKAPLSASMIKRYDEHHQDLTLLKALVRQQLPEKYKEIFFDQSKNGYAGYIDGGASQEEFYKFIKPILEKMDGTEELLVKLNREDLLRKQRTFDNGSIPHQIHLGELHAILRRQEDFYPFLKDNREKIEKILTFRIPYYVGPLARGNSRFAWMTRKSEETITPWNFEEVVDKGASAQSFIERMTNFDKNLPNEKVLPKHSLLYEYFTVYNELTKVKYVTEGMRKPAFLSGEQKKAIVDLLFKTNRKVTVKQLKEDYFKKIECFDSVEISGVEDRFNASLGTYHDLLKIIKDKDFLDNEENEDILEDIVLTLTLFEDREMIEERLKTYAHLFDDKVMKQLKRRRYTGWGRLSRKLINGIRDKQSGKTILDFLKSDGFANRNFMQLIHDDSLTFKEDIQKAQVSGQGDSLHEHIANLAGSPAIKKGILQTVKVVDELVKVMGRHKPENIVIEMARENQTTQKGQKNSRERMKRIEEGIKELGSQILKEHPVENTQLQNEKLYLYYLQNGRDMYVDQELDINRLSDYDVDHIVPQSFLKDDSIDNKVLTRSDKARGKSDNVPSEEVVKKMKNYWRQLLNAKLITQRKFDNLTKAERGGLSELDKAGFIKRQLVETRQITKHVAQILDSRMNTKYDENDKLIREVKVITLKSKLVSDFRKDFQFYKVREINNYHHAHDAYLNAVVGTALIKKYPKLESEFVYGDYKVYDVRKMIAKSEQEIGKATAKYFFYSNIMNFFKTEITLANGEIRKRPLIETNGETGEIVWDKGRDFATVRKVLSMPQVNIVKKTEVQTGGFSKESILPKRNSDKLIARKKDWDPKKYGGFDSPTVAYSVLVVAKVEKGKSKKLKSVKELLGITIMERSSFEKNPIDFLEAKGYKEVKKDLIIKLPKYSLFELENGRKRMLASAGELQKGNELALPSKYVNFLYLASHYEKLKGSPEDNEQKQLFVEQHKHYLDEIIEQISEFSKRVILADANLDKVLSAYNKHRDKPIREQAENIIHLFTLTNLGAPAAFKYFDTTIDRKRYTSTKEVLDATLIHQSITGLYETRIDLSQLGGDGGEAAAKGGGLEHLPRPPEISQFPLNPERLQALQHLVRKALEAGHIEPYTGPGNNPVFPVKKANGTWRFIHDLRATNSLTVDLSSSSPGPPDLSSLPTTLAHLQTIDLKDAFFQIPLPKQFQPYFAFTVPQQCNYGPGTRYAWKVLPQGFKNSPTLFEMQLASILQPIRQAFPQCVILQYMDDILLASPSPEDLQQLSEATMASLISHGLPVSQDKTQQTPGTIKFLGQIISPNHITYDAVPTVPIRSRWALPELQALLGEIQWVSKGTPTLRQPLHSLYCALQGHTDPRDQIYLNPSQVQSLMQLQQALSQNCRSRLAQTLPLLGAIMLTLTGTTTVVFQSKQQWPLVWLHAPLPHTSQCPWGQLLASAVLLLDKYTLQSYGLLCQTIHHNISIQTFNQFIQTSDHPSVPILLHHSHRFKNLGAQTGELWNTFLKTAAPLAPVKALTPVFTLSPIIINTAPCLFSDGSTSQAAYILWDKHILSQRSFPLPPPHKSAQQAELLGLLHGLSSARSWHCLNIFLDSKYLYHYLRTLALGTFQGKSSQAPFQALLPRLLAHKVIYLHHVRSHTNLPDPISKLNALTDALLITPILAGKRTADGSEFEKRTADGSEFESPKKKAKVE

SEQ ID NO: 1497 - protein, 2015 aa, synthetic construct
MPAAKRVKLDGGDKKYSIGLDIGTNSVGWAVITDEYKVPSKKFKVLGNTDRHSIKKNLIGALLFDSGETAEATRLKRTARRRYTRRKNRICYLQEIFSNEMAKVDDSFFHRLEESFLVEEDKKHERHPIFGNIVDEVAYHEKYPTIYHLRKKLVDSTDKADLRLIYLALAHMIKFRGHFLIEGDLNPDNSDVDKLFIQLVQTYNQLFEENPINASGVDAKAILSARLSKSRRLENLIAQLPGEKKNGLFGNLIALSLGLTPNFKSNFDLAEDAKLQLSKDTYDDDLDNLLAQIGDQYADLFLAAKNLSDAILLSDILRVNTEITKAPLSASMIKRYDEHHQDLTLLKALVRQQLPEKYKEIFFDQSKNGYAGYIDGGASQEEFYKFIKPILEKMDGTEELLVKLNREDLLRKQRTFDNGSIPHQIHLGELHAILRRQEDFYPFLKDNREKIEKILTFRIPYYVGPLARGNSRFAWMTRKSEETITPWNFEEVVDKGASAQSFIERMTNFDKNLPNEKVLPKHSLLYEYFTVYNELTKVKYVTEGMRKPAFLSGEQKKAIVDLLFKTNRKVTVKQLKEDYFKKIECFDSVEISGVEDRFNASLGTYHDLLKIIKDKDFLDNEENEDILEDIVLTLTLFEDREMIEERLKTYAHLFDDKVMKQLKRRRYTGWGRLSRKLINGIRDKQSGKTILDFLKSDGFANRNFMQLIHDDSLTFKEDIQKAQVSGQGDSLHEHIANLAGSPAIKKGILQTVKVVDELVKVMGRHKPENIVIEMARENQTTQKGQKNSRERMKRIEEGIKELGSQILKEHPVENTQLQNEKLYLYYLQNGRDMYVDQELDINRLSDYDVDHIVPQSFLKDDSIDNKVLTRSDKARGKSDNVPSEEVVKKMKNYWRQLLNAKLITQRKFDNLTKAERGGLSELDKAGFIKRQLVETRQITKHVAQILDSRMNTKYDENDKLIREVKVITLKSKLVSDFRKDFQFYKVREINNYHHAHDAYLNAVVGTALIKKYPKLESEFVYGDYKVYDVRKMIAKSEQEIGKATAKYFFYSNIMNFFKTEITLANGEIRKRPLIETNGETGEIVWDKGRDFATVRKVLSMPQVNIVKKTEVQTGGFSKESILPKRNSDKLIARKKDWDPKKYGGFDSPTVAYSVLVVAKVEKGKSKKLKSVKELLGITIMERSSFEKNPIDFLEAKGYKEVKKDLIIKLPKYSLFELENGRKRMLASAGELQKGNELALPSKYVNFLYLASHYEKLKGSPEDNEQKQLFVEQHKHYLDEIIEQISEFSKRVILADANLDKVLSAYNKHRDKPIREQAENIIHLFTLTNLGAPAAFKYFDTTIDRKRYTSTKEVLDATLIHQSITGLYETRIDLSQLGGDGGGSSGSSGSSGSSGSSGSSGGGLEHLPRPPEISQFPLNPERLQALQHLVRKALEAGHIEPYTGPGNNPVFPVKKANGTWRFIHDLRATNSLTVDLSSSSPGPPDLSSLPTTLAHLQTIDLKDAFFQIPLPKQFQPYFAFTVPQQCNYGPGTRYAWKVLPQGFKNSPTLFEMQLASILQPIRQAFPQCVILQYMDDILLASPSPEDLQQLSEATMASLISHGLPVSQDKTQQTPGTIKFLGQIISPNHITYDAVPTVPIRSRWALPELQALLGEIQWVSKGTPTLRQPLHSLYCALQGHTDPRDQIYLNPSQVQSLMQLQQALSQNCRSRLAQTLPLLGAIMLTLTGTTTVVFQSKQQWPLVWLHAPLPHTSQCPWGQLLASAVLLLDKYTLQSYGLLCQTIHHNISIQTFNQFIQTSDHPSVPILLHHSHRFKNLGAQTGELWNTFLKTAAPLAPVKALTPVFTLSPIIINTAPCLFSDGSTSQAAYILWDKHILSQRSFPLPPPHKSAQQAELLGLLHGLSSARSWHCLNIFLDSKYLYHYLRTLALGTFQGKSSQAPFQALLPRLLAHKVIYLHHVRSHTNLPDPISKLNALTDALLITPILAGKRTADGSEFEKRTADGSEFESPKKKAKVE

SEQ ID NO: 1498 - protein, 2008 aa, synthetic construct
MPAAKRVKLDGGDKKYSIGLDIGTNSVGWAVITDEYKVPSKKFKVLGNTDRHSIKKNLIGALLFDSGETAEATRLKRTARRRYTRRKNRICYLQEIFSNEMAKVDDSFFHRLEESFLVEEDKKHERHPIFGNIVDEVAYHEKYPTIYHLRKKLVDSTDKADLRLIYLALAHMIKFRGHFLIEGDLNPDNSDVDKLFIQLVQTYNQLFEENPINASGVDAKAILSARLSKSRRLENLIAQLPGEKKNGLFGNLIALSLGLTPNFKSNFDLAEDAKLQLSKDTYDDDLDNLLAQIGDQYADLFLAAKNLSDAILLSDILRVNTEITKAPLSASMIKRYDEHHQDLTLLKALVRQQLPEKYKEIFFDQSKNGYAGYIDGGASQEEFYKFIKPILEKMDGTEELLVKLNREDLLRKQRTFDNGSIPHQIHLGELHAILRRQEDFYPFLKDNREKIEKILTFRIPYYVGPLARGNSRFAWMTRKSEETITPWNFEEVVDKGASAQSFIERMTNFDKNLPNEKVLPKHSLLYEYFTVYNELTKVKYVTEGMRKPAFLSGEQKKAIVDLLFKTNRKVTVKQLKEDYFKKIECFDSVEISGVEDRFNASLGTYHDLLKIIKDKDFLDNEENEDILEDIVLTLTLFEDREMIEERLKTYAHLFDDKVMKQLKRRRYTGWGRLSRKLINGIRDKQSGKTILDFLKSDGFANRNFMQLIHDDSLTFKEDIQKAQVSGQGDSLHEHIANLAGSPAIKKGILQTVKVVDELVKVMGRHKPENIVIEMARENQTTQKGQKNSRERMKRIEEGIKELGSQILKEHPVENTQLQNEKLYLYYLQNGRDMYVDQELDINRLSDYDVDHIVPQSFLKDDSIDNKVLTRSDKARGKSDNVPSEEVVKKMKNYWRQLLNAKLITQRKFDNLTKAERGGLSELDKAGFIKRQLVETRQITKHVAQILDSRMNTKYDENDKLIREVKVITLKSKLVSDFRKDFQFYKVREINNYHHAHDAYLNAVVGTALIKKYPKLESEFVYGDYKVYDVRKMIAKSEQEIGKATAKYFFYSNIMNFFKTEITLANGEIRKRPLIETNGETGEIVWDKGRDFATVRKVLSMPQVNIVKKTEVQTGGFSKESILPKRNSDKLIARKKDWDPKKYGGFDSPTVAYSVLVVAKVEKGKSKKLKSVKELLGITIMERSSFEKNPIDFLEAKGYKEVKKDLIIKLPKYSLFELENGRKRMLASAGELQKGNELALPSKYVNFLYLASHYEKLKGSPEDNEQKQLFVEQHKHYLDEIIEQISEFSKRVILADANLDKVLSAYNKHRDKPIREQAENIIHLFTLTNLGAPAAFKYFDTTIDRKRYTSTKEVLDATLIHQSITGLYETRIDLSQLGGDGGEAAAKGGGGGSGGGLEHLPRPPEISQFPLNPERLQALQHLVRKALEAGHIEPYTGPGNNPVFPVKKANGTWRFIHDLRATNSLTVDLSSSSPGPPDLSSLPTTLAHLQTIDLKDAFFQIPLPKQFQPYFAFTVPQQCNYGPGTRYAWKVLPQGFKNSPTLFEMQLASILQPIRQAFPQCVILQYMDDILLASPSPEDLQQLSEATMASLISHGLPVSQDKTQQTPGTIKFLGQIISPNHITYDAVPTVPIRSRWALPELQALLGEIQWVSKGTPTLRQPLHSLYCALQGHTDPRDQIYLNPSQVQSLMQLQQALSQNCRSRLAQTLPLLGAIMLTLTGTTTVVFQSKQQWPLVWLHAPLPHTSQCPWGQLLASAVLLLDKYTLQSYGLLCQTIHHNISIQTFNQFIQTSDHPSVPILLHHSHRFKNLGAQTGELWNTFLKTAAPLAPVKALTPVFTLSPIIINTAPCLFSDGSTSQAAYILWDKHILSQRSFPLPPPHKSAQQAELLGLLHGLSSARSWHCLNIFLDSKYLYHYLRTLALGTFQGKSSQAPFQALLPRLLAHKVIYLHHVRSHTNLPDPISKLNALTDALLITPILAGKRTADGSEFEKRTADGSEFESPKKKAKVE

SEQ ID NO: 1499 - protein, 2008 aa, synthetic construct
MPAAKRVKLDGGDKKYSIGLDIGTNSVGWAVITDEYKVPSKKFKVLGNTDRHSIKKNLIGALLFDSGETAEATRLKRTARRRYTRRKNRICYLQEIFSNEMAKVDDSFFHRLEESFLVEEDKKHERHPIFGNIVDEVAYHEKYPTIYHLRKKLVDSTDKADLRLIYLALAHMIKFRGHFLIEGDLNPDNSDVDKLFIQLVQTYNQLFEENPINASGVDAKAILSARLSKSRRLENLIAQLPGEKKNGLFGNLIALSLGLTPNFKSNFDLAEDAKLQLSKDTYDDDLDNLLAQIGDQYADLFLAAKNLSDAILLSDILRVNTEITKAPLSASMIKRYDEHHQDLTLLKALVRQQLPEKYKEIFFDQSKNGYAGYIDGGASQEEFYKFIKPILEKMDGTEELLVKLNREDLLRKQRTFDNGSIPHQIHLGELHAILRRQEDFYPFLKDNREKIEKILTFRIPYYVGPLARGNSRFAWMTRKSEETITPWNFEEVVDKGASAQSFIERMTNFDKNLPNEKVLPKHSLLYEYFTVYNELTKVKYVTEGMRKPAFLSGEQKKAIVDLLFKTNRKVTVKQLKEDYFKKIECFDSVEISGVEDRFNASLGTYHDLLKIIKDKDFLDNEENEDILEDIVLTLTLFEDREMIEERLKTYAHLFDDKVMKQLKRRRYTGWGRLSRKLINGIRDKQSGKTILDFLKSDGFANRNFMQLIHDDSLTFKEDIQKAQVSGQGDSLHEHIANLAGSPAIKKGILQTVKVVDELVKVMGRHKPENIVIEMARENQTTQKGQKNSRERMKRIEEGIKELGSQILKEHPVENTQLQNEKLYLYYLQNGRDMYVDQELDINRLSDYDVDHIVPQSFLKDDSIDNKVLTRSDKARGKSDNVPSEEVVKKMKNYWRQLLNAKLITQRKFDNLTKAERGGLSELDKAGFIKRQLVETRQITKHVAQILDSRMNTKYDENDKLIREVKVITLKSKLVSDFRKDFQFYKVREINNYHHAHDAYLNAVVGTALIKKYPKLESEFVYGDYKVYDVRKMIAKSEQEIGKATAKYFFYSNIMNFFKTEITLANGEIRKRPLIETNGETGEIVWDKGRDFATVRKVLSMPQVNIVKKTEVQTGGFSKESILPKRNSDKLIARKKDWDPKKYGGFDSPTVAYSVLVVAKVEKGKSKKLKSVKELLGITIMERSSFEKNPIDFLEAKGYKEVKKDLIIKLPKYSLFELENGRKRMLASAGELQKGNELALPSKYVNFLYLASHYEKLKGSPEDNEQKQLFVEQHKHYLDEIIEQISEFSKRVILADANLDKVLSAYNKHRDKPIREQAENIIHLFTLTNLGAPAAFKYFDTTIDRKRYTSTKEVLDATLIHQSITGLYETRIDLSQLGGDGGEAAAKGGSGGGGGGLEHLPRPPEISQFPLNPERLQALQHLVRKALEAGHIEPYTGPGNNPVFPVKKANGTWRFIHDLRATNSLTVDLSSSSPGPPDLSSLPTTLAHLQTIDLKDAFFQIPLPKQFQPYFAFTVPQQCNYGPGTRYAWKVLPQGFKNSPTLFEMQLASILQPIRQAFPQCVILQYMDDILLASPSPEDLQQLSEATMASLISHGLPVSQDKTQQTPGTIKFLGQIISPNHITYDAVPTVPIRSRWALPELQALLGEIQWVSKGTPTLRQPLHSLYCALQGHTDPRDQIYLNPSQVQSLMQLQQALSQNCRSRLAQTLPLLGAIMLTLTGTTTVVFQSKQQWPLVWLHAPLPHTSQCPWGQLLASAVLLLDKYTLQSYGLLCQTIHHNISIQTFNQFIQTSDHPSVPILLHHSHRFKNLGAQTGELWNTFLKTAAPLAPVKALTPVFTLSPIIINTAPCLFSDGSTSQAAYILWDKHILSQRSFPLPPPHKSAQQAELLGLLHGLSSARSWHCLNIFLDSKYLYHYLRTLALGTFQGKSSQAPFQALLPRLLAHKVIYLHHVRSHTNLPDPISKLNALTDALLITPILAGKRTADGSEFEKRTADGSEFESPKKKAKVE

SEQ ID NO: 1500 - protein, 2008 aa, synthetic construct
MPAAKRVKLDGGDKKYSIGLDIGTNSVGWAVITDEYKVPSKKFKVLGNTDRHSIKKNLIGALLFDSGETAEATRLKRTARRRYTRRKNRICYLQEIFSNEMAKVDDSFFHRLEESFLVEEDKKHERHPIFGNIVDEVAYHEKYPTIYHLRKKLVDSTDKADLRLIYLALAHMIKFRGHFLIEGDLNPDNSDVDKLFIQLVQTYNQLFEENPINASGVDAKAILSARLSKSRRLENLIAQLPGEKKNGLFGNLIALSLGLTPNFKSNFDLAEDAKLQLSKDTYDDDLDNLLAQIGDQYADLFLAAKNLSDAILLSDILRVNTEITKAPLSASMIKRYDEHHQDLTLLKALVRQQLPEKYKEIFFDQSKNGYAGYIDGGASQEEFYKFIKPILEKMDGTEELLVKLNREDLLRKQRTFDNGSIPHQIHLGELHAILRRQEDFYPFLKDNREKIEKILTFRIPYYVGPLARGNSRFAWMTRKSEETITPWNFEEVVDKGASAQSFIERMTNFDKNLPNEKVLPKHSLLYEYFTVYNELTKVKYVTEGMRKPAFLSGEQKKAIVDLLFKTNRKVTVKQLKEDYFKKIECFDSVEISGVEDRFNASLGTYHDLLKIIKDKDFLDNEENEDILEDIVLTLTLFEDREMIEERLKTYAHLFDDKVMKQLKRRRYTGWGRLSRKLINGIRDKQSGKTILDFLKSDGFANRNFMQLIHDDSLTFKEDIQKAQVSGQGDSLHEHIANLAGSPAIKKGILQTVKVVDELVKVMGRHKPENIVIEMARENQTTQKGQKNSRERMKRIEEGIKELGSQILKEHPVENTQLQNEKLYLYYLQNGRDMYVDQELDINRLSDYDVDHIVPQSFLKDDSIDNKVLTRSDKARGKSDNVPSEEVVKKMKNYWRQLLNAKLITQRKFDNLTKAERGGLSELDKAGFIKRQLVETRQITKHVAQILDSRMNTKYDENDKLIREVKVITLKSKLVSDFRKDFQFYKVREINNYHHAHDAYLNAVVGTALIKKYPKLESEFVYGDYKVYDVRKMIAKSEQEIGKATAKYFFYSNIMNFFKTEITLANGEIRKRPLIETNGETGEIVWDKGRDFATVRKVLSMPQVNIVKKTEVQTGGFSKESILPKRNSDKLIARKKDWDPKKYGGFDSPTVAYSVLVVAKVEKGKSKKLKSVKELLGITIMERSSFEKNPIDFLEAKGYKEVKKDLIIKLPKYSLFELENGRKRMLASAGELQKGNELALPSKYVNFLYLASHYEKLKGSPEDNEQKQLFVEQHKHYLDEIIEQISEFSKRVILADANLDKVLSAYNKHRDKPIREQAENIIHLFTLTNLGAPAAFKYFDTTIDRKRYTSTKEVLDATLIHQSITGLYETRIDLSQLGGDGGPAPAPAPAPAPGGGLEHLPRPPEISQFPLNPERLQALQHLVRKALEAGHIEPYTGPGNNPVFPVKKANGTWRFIHDLRATNSLTVDLSSSSPGPPDLSSLPTTLAHLQTIDLKDAFFQIPLPKQFQPYFAFTVPQQCNYGPGTRYAWKVLPQGFKNSPTLFQMQLASILQPIRQAFPQCVILQYMDDILLASPSPEDLQQLSEATMASLISHGLPVSQDKTQQTPGTIKFLGQIISPNHITYDAVPTVPIRSRWALPELQALLGEIQWVSKGTPTLRQPLHSLYCALQGHTDPRDQIYLNPSQVQSLMQLQQALSQNCRSRLAQTLPLLGAIMLTLTGTTTVVFQSKQQWPLVWLHAPLPHTSQCPWGQLLASAVLLLDKYTLQSYGLLCQTIHHNISIQTFNQFIQTSDHPSVPILLHHSHRFKNLGAQTGELWNTFLKTAAPLAPVKALTPVFTLSPIIINTAPCLFSDGSTSQAAYILWDKHILSQRSFPLPPPHKSAQQAELLGLLHGLSSARSWHCLNIFLDSKYLYHYLRTLAWGTFQGKSSQAPFQALLPRLLAHKVIYLHHVRSHTNLPDPISKLNALTDALLITPILAGKRTADGSEFEKRTADGSEFESPKKKAKVE

SEQ ID NO: 1501 - protein, 2006 aa, synthetic construct
MPAAKRVKLDGGDKKYSIGLDIGTNSVGWAVITDEYKVPSKKFKVLGNTDRHSIKKNLIGALLFDSGETAEATRLKRTARRRYTRRKNRICYLQEIFSNEMAKVDDSFFHRLEESFLVEEDKKHERHPIFGNIVDEVAYHEKYPTIYHLRKKLVDSTDKADLRLIYLALAHMIKFRGHFLIEGDLNPDNSDVDKLFIQLVQTYNQLFEENPINASGVDAKAILSARLSKSRRLENLIAQLPGEKKNGLFGNLIALSLGLTPNFKSNFDLAEDAKLQLSKDTYDDDLDNLLAQIGDQYADLFLAAKNLSDAILLSDILRVNTEITKAPLSASMIKRYDEHHQDLTLLKALVRQQLPEKYKEIFFDQSKNGYAGYIDGGASQEEFYKFIKPILEKMDGTEELLVKLNREDLLRKQRTFDNGSIPHQIHLGELHAILRRQEDFYPFLKDNREKIEKILTFRIPYYVGPLARGNSRFAWMTRKSEETITPWNFEEVVDKGASAQSFIERMTNFDKNLPNEKVLPKHSLLYEYFTVYNELTKVKYVTEGMRKPAFLSGEQKKAIVDLLFKTNRKVTVKQLKEDYFKKIECFDSVEISGVEDRFNASLGTYHDLLKIIKDKDFLDNEENEDILEDIVLTLTLFEDREMIEERLKTYAHLFDDKVMKQLKRRRYTGWGRLSRKLINGIRDKQSGKTILDFLKSDGFANRNFMQLIHDDSLTFKEDIQKAQVSGQGDSLHEHIANLAGSPAIKKGILQTVKVVDELVKVMGRHKPENIVIEMARENQTTQKGQKNSRERMKRIEEGIKELGSQILKEHPVENTQLQNEKLYLYYLQNGRDMYVDQELDINRLSDYDVDHIVPQSFLKDDSIDNKVLTRSDKARGKSDNVPSEEVVKKMKNYWRQLLNAKLITQRKFDNLTKAERGGLSELDKAGFIKRQLVETRQITKHVAQILDSRMNTKYDENDKLIREVKVITLKSKLVSDFRKDFQFYKVREINNYHHAHDAYLNAVVGTALIKKYPKLESEFVYGDYKVYDVRKMIAKSEQEIGKATAKYFFYSNIMNFFKTEITLANGEIRKRPLIETNGETGEIVWDKGRDFATVRKVLSMPQVNIVKKTEVQTGGFSKESILPKRNSDKLIARKKDWDPKKYGGFDSPTVAYSVLVVAKVEKGKSKKLKSVKELLGITIMERSSFEKNPIDFLEAKGYKEVKKDLIIKLPKYSLFELENGRKRMLASAGELQKGNELALPSKYVNFLYLASHYEKLKGSPEDNEQKQLFVEQHKHYLDEIIEQISEFSKRVILADANLDKVLSAYNKHRDKPIREQAENIIHLFTLTNLGAPAAFKYFDTTIDRKRYTSTKEVLDATLIHQSITGLYETRIDLSQLGGDGGGGGGGSPAPGGGLEHLPRPPEISQFPLNPERLQALQHLVRKALEAGHIEPYTGPGNNPVFPVKKANGTWRFIHDLRATNSLTVDLSSSSPGPPDLSSLPTTLAHLQTIDLKDAFFQIPLPKQFQPYFAFTVPQQCNYGPGTRYAWKVLPQGFKNSPTLFQMQLASILQPIRQAFPQCVILQYMDDILLASPSPEDLQQLSEATMASLISHGLPVSQDKTQQTPGTIKFLGQIISPNHITYDAVPTVPIRSRWALPELQALLGEIQWVSKGTPTLRQPLHSLYCALQGHTDPRDQIYLNPSQVQSLMQLQQALSQNCRSRLAQTLPLLGAIMLTLTGTTTVVFQSKQQWPLVWLHAPLPHTSQCPWGQLLASAVLLLDKYTLQSYGLLCQTIHHNISIQTFNQFIQTSDHPSVPILLHHSHRFKNLGAQTGELWNTFLKTAAPLAPVKALTPVFTLSPIIINTAPCLFSDGSTSQAAYILWDKHILSQRSFPLPPPHKSAQQAELLGLLHGLSSARSWHCLNIFLDSKYLYHYLRTLAWGTFQGKSSQAPFQALLPRLLAHKVIYLHHVRSHTNLPDPISKLNALTDALLITPILAGKRTADGSEFEKRTADGSEFESPKKKAKVE

SEQ ID NO: 1502 - protein, 2012 aa, synthetic construct
MPAAKRVKLDGGDKKYSIGLDIGTNSVGWAVITDEYKVPSKKFKVLGNTDRHSIKKNLIGALLFDSGETAEATRLKRTARRRYTRRKNRICYLQEIFSNEMAKVDDSFFHRLEESFLVEEDKKHERHPIFGNIVDEVAYHEKYPTIYHLRKKLVDSTDKADLRLIYLALAHMIKFRGHFLIEGDLNPDNSDVDKLFIQLVQTYNQLFEENPINASGVDAKAILSARLSKSRRLENLIAQLPGEKKNGLFGNLIALSLGLTPNFKSNFDLAEDAKLQLSKDTYDDDLDNLLAQIGDQYADLFLAAKNLSDAILLSDILRVNTEITKAPLSASMIKRYDEHHQDLTLLKALVRQQLPEKYKEIFFDQSKNGYAGYIDGGASQEEFYKFIKPILEKMDGTEELLVKLNREDLLRKQRTFDNGSIPHQIHLGELHAILRRQEDFYPFLKDNREKIEKILTFRIPYYVGPLARGNSRFAWMTRKSEETITPWNFEEVVDKGASAQSFIERMTNFDKNLPNEKVLPKHSLLYEYFTVYNELTKVKYVTEGMRKPAFLSGEQKKAIVDLLFKTNRKVTVKQLKEDYFKKIECFDSVEISGVEDRFNASLGTYHDLLKIIKDKDFLDNEENEDILEDIVLTLTLFEDREMIEERLKTYAHLFDDKVMKQLKRRRYTGWGRLSRKLINGIRDKQSGKTILDFLKSDGFANRNFMQLIHDDSLTFKEDIQKAQVSGQGDSLHEHIANLAGSPAIKKGILQTVKVVDELVKVMGRHKPENIVIEMARENQTTQKGQKNSRERMKRIEEGIKELGSQILKEHPVENTQLQNEKLYLYYLQNGRDMYVDQELDINRLSDYDVDHIVPQSFLKDDSIDNKVLTRSDKARGKSDNVPSEEVVKKMKNYWRQLLNAKLITQRKFDNLTKAERGGLSELDKAGFIKRQLVETRQITKHVAQILDSRMNTKYDENDKLIREVKVITLKSKLVSDFRKDFQFYKVREINNYHHAHDAYLNAVVGTALIKKYPKLESEFVYGDYKVYDVRKMIAKSEQEIGKATAKYFFYSNIMNFFKTEITLANGEIRKRPLIETNGETGEIVWDKGRDFATVRKVLSMPQVNIVKKTEVQTGGFSKESILPKRNSDKLIARKKDWDPKKYGGFDSPTVAYSVLVVAKVEKGKSKKLKSVKELLGITIMERSSFEKNPIDFLEAKGYKEVKKDLIIKLPKYSLFELENGRKRMLASAGELQKGNELALPSKYVNFLYLASHYEKLKGSPEDNEQKQLFVEQHKHYLDEIIEQISEFSKRVILADANLDKVLSAYNKHRDKPIREQAENIIHLFTLTNLGAPAAFKYFDTTIDRKRYTSTKEVLDATLIHQSITGLYETRIDLSQLGGDGGGGSGGSGGSGGSGGSGGGLEHLPRPPEISQFPLNPERLQALQHLVRKALEAGHIEPYTGPGNNPVFPVKKANGTWRFIHDLRATNSLTVDLSSSSPGPPDLSSLPTTLAHLQTIDLKDAFFQIPLPKQFQPYFAFTVPQQCNYGPGTRYAWKVLPQGFKNSPTLFQMQLASILQPIRQAFPQCVILQYMDDILLASPSPEDLQQLSEATMASLISHGLPVSQDKTQQTPGTIKFLGQIISPNHITYDAVPTVPIRSRWALPELQALLGEIQWVSKGTPTLRQPLHSLYCALQGHTDPRDQIYLNPSQVQSLMQLQQALSQNCRSRLAQTLPLLGAIMLTLTGTTTVVFQSKQQWPLVWLHAPLPHTSQCPWGQLLASAVLLLDKYTLQSYGLLCQTIHHNISIQTFNQFIQTSDHPSVPILLHHSHRFKNLGAQTGELWNTFLKTAAPLAPVKALTPVFTLSPIIINTAPCLFSDGSTSQAAYILWDKHILSQRSFPLPPPHKSAQQAELLGLLHGLSSARSWHCLNIFLDSKYLYHYLRTLAWGTFQGKSSQAPFQALLPRLLAHKVIYLHHVRSHTNLPDPISKLNALTDALLITPILAGKRTADGSEFEKRTADGSEFESPKKKAKVE

SEQ ID NO: 1503 - protein, 2015 aa, synthetic construct
MPAAKRVKLDGGDKKYSIGLDIGTNSVGWAVITDEYKVPSKKFKVLGNTDRHSIKKNLIGALLFDSGETAEATRLKRTARRRYTRRKNRICYLQEIFSNEMAKVDDSFFHRLEESFLVEEDKKHERHPIFGNIVDEVAYHEKYPTIYHLRKKLVDSTDKADLRLIYLALAHMIKFRGHFLIEGDLNPDNSDVDKLFIQLVQTYNQLFEENPINASGVDAKAILSARLSKSRRLENLIAQLPGEKKNGLFGNLIALSLGLTPNFKSNFDLAEDAKLQLSKDTYDDDLDNLLAQIGDQYADLFLAAKNLSDAILLSDILRVNTEITKAPLSASMIKRYDEHHQDLTLLKALVRQQLPEKYKEIFFDQSKNGYAGYIDGGASQEEFYKFIKPILEKMDGTEELLVKLNREDLLRKQRTFDNGSIPHQIHLGELHAILRRQEDFYPFLKDNREKIEKILTFRIPYYVGPLARGNSRFAWMTRKSEETITPWNFEEVVDKGASAQSFIERMTNFDKNLPNEKVLPKHSLLYEYFTVYNELTKVKYVTEGMRKPAFLSGEQKKAIVDLLFKTNRKVTVKQLKEDYFKKIECFDSVEISGVEDRFNASLGTYHDLLKIIKDKDFLDNEENEDILEDIVLTLTLFEDREMIEERLKTYAHLFDDKVMKQLKRRRYTGWGRLSRKLINGIRDKQSGKTILDFLKSDGFANRNFMQLIHDDSLTFKEDIQKAQVSGQGDSLHEHIANLAGSPAIKKGILQTVKVVDELVKVMGRHKPENIVIEMARENQTTQKGQKNSRERMKRIEEGIKELGSQILKEHPVENTQLQNEKLYLYYLQNGRDMYVDQELDINRLSDYDVDHIVPQSFLKDDSIDNKVLTRSDKARGKSDNVPSEEVVKKMKNYWRQLLNAKLITQRKFDNLTKAERGGLSELDKAGFIKRQLVETRQITKHVAQILDSRMNTKYDENDKLIREVKVITLKSKLVSDFRKDFQFYKVREINNYHHAHDAYLNAVVGTALIKKYPKLESEFVYGDYKVYDVRKMIAKSEQEIGKATAKYFFYSNIMNFFKTEITLANGEIRKRPLIETNGETGEIVWDKGRDFATVRKVLSMPQVNIVKKTEVQTGGFSKESILPKRNSDKLIARKKDWDPKKYGGFDSPTVAYSVLVVAKVEKGKSKKLKSVKELLGITIMERSSFEKNPIDFLEAKGYKEVKKDLIIKLPKYSLFELENGRKRMLASAGELQKGNELALPSKYVNFLYLASHYEKLKGSPEDNEQKQLFVEQHKHYLDEIIEQISEFSKRVILADANLDKVLSAYNKHRDKPIREQAENIIHLFTLTNLGAPAAFKYFDTTIDRKRYTSTKEVLDATLIHQSITGLYETRIDLSQLGGDGGGGSGGSGGSGGSGGSGGSGGGLEHLPRPPEISQFPLNPERLQALQHLVRKALEAGHIEPYTGPGNNPVFPVKKANGTWRFIHDLRATNSLTVDLSSSSPGPPDLSSPPTTLAHLQTIDLKDAFFQIPLPKQFQPYFAFTVPQQCNYGPGTRYAWKVLPQGFKNSPTLFQMQLASILQPIRQAFPQCVILQYMDDILLASPSPEDLQQLSEATMASLISHGLPVSQDKTQQTPGTIKFLGQIISPNHITYDAVPTVPIRSRWALPELQALLGEIQWVSKGTPTLRQPLHSLYCALQGHTDPRDQIYLNPSQVQSLMQLQQALSQNCRSRLAQTLPLLGAIMLTLTGTTTVVFQSKQQWPLVWLHAPLPHTSQCPWGQLLASAVLLLDKYTLQSYGLLCQTIHHNISIQTFNQFIQTSDHPSVPILLHHSHRFKNLGAQTGELWNTFLKTAAPLAPVKALTPVFTLSPIIINTAPCLFSDGSTSQAAYILWDKHILSQRSFPLPPPHKSAQQAELLGLLHGLSSARSWHCLNIFLDSKYLYHYLRTLAWGTFQGKSSQAPFQALLPRLLAHKVIYLHHVRSHTNLPDPISKLNALTDALLITPILAGKRTADGSEFEKRTADGSEFESPKKKAKVE

SEQ ID NO: 1504 - protein, 2099 aa, synthetic construct
MPAAKRVKLDGGDKKYSIGLDIGTNSVGWAVITDEYKVPSKKFKVLGNTDRHSIKKNLIGALLFDSGETAEATRLKRTARRRYTRRKNRICYLQEIFSNEMAKVDDSFFHRLEESFLVEEDKKHERHPIFGNIVDEVAYHEKYPTIYHLRKKLVDSTDKADLRLIYLALAHMIKFRGHFLIEGDLNPDNSDVDKLFIQLVQTYNQLFEENPINASGVDAKAILSARLSKSRRLENLIAQLPGEKKNGLFGNLIALSLGLTPNFKSNFDLAEDAKLQLSKDTYDDDLDNLLAQIGDQYADLFLAAKNLSDAILLSDILRVNTEITKAPLSASMIKRYDEHHQDLTLLKALVRQQLPEKYKEIFFDQSKNGYAGYIDGGASQEEFYKFIKPILEKMDGTEELLVKLNREDLLRKQRTFDNGSIPHQIHLGELHAILRRQEDFYPFLKDNREKIEKILTFRIPYYVGPLARGNSRFAWMTRKSEETITPWNFEEVVDKGASAQSFIERMTNFDKNLPNEKVLPKHSLLYEYFTVYNELTKVKYVTEGMRKPAFLSGEQKKAIVDLLFKTNRKVTVKQLKEDYFKKIECFDSVEISGVEDRFNASLGTYHDLLKIIKDKDFLDNEENEDILEDIVLTLTLFEDREMIEERLKTYAHLFDDKVMKQLKRRRYTGWGRLSRKLINGIRDKQSGKTILDFLKSDGFANRNFMQLIHDDSLTFKEDIQKAQVSGQGDSLHEHIANLAGSPAIKKGILQTVKVVDELVKVMGRHKPENIVIEMARENQTTQKGQKNSRERMKRIEEGIKELGSQILKEHPVENTQLQNEKLYLYYLQNGRDMYVDQELDINRLSDYDVDHIVPQSFLKDDSIDNKVLTRSDKARGKSDNVPSEEVVKKMKNYWRQLLNAKLITQRKFDNLTKAERGGLSELDKAGFIKRQLVETRQITKHVAQILDSRMNTKYDENDKLIREVKVITLKSKLVSDFRKDFQFYKVREINNYHHAHDAYLNAVVGTALIKKYPKLESEFVYGDYKVYDVRKMIAKSEQEIGKATAKYFFYSNIMNFFKTEITLANGEIRKRPLIETNGETGEIVWDKGRDFATVRKVLSMPQVNIVKKTEVQTGGFSKESILPKRNSDKLIARKKDWDPKKYGGFDSPTVAYSVLVVAKVEKGKSKKLKSVKELLGITIMERSSFEKNPIDFLEAKGYKEVKKDLIIKLPKYSLFELENGRKRMLASAGELQKGNELALPSKYVNFLYLASHYEKLKGSPEDNEQKQLFVEQHKHYLDEIIEQISEFSKRVILADANLDKVLSAYNKHRDKPIREQAENIIHLFTLTNLGAPAAFKYFDTTIDRKRYTSTKEVLDATLIHQSITGLYETRIDLSQLGGDGGEAAAKPAPGGTVSLQDEHRLFDIPVTTSLPDVWLQDFPQAWAETGGLGRAKCQAPIIIDLKPTAVPVSIKQYPMSLEAHMGIRQHIIKFLELGVLRPCRSPWNTPLLPVKKPGTQDYRPVQDLREINKRTVDIHPTVPNPYNLLSTLKPDYSWYTVLDLKDAFFCLPLAPQSQELFAFEWKDPERGISGQLTWTRLPQGFKNSPTLFDEALHRDLTDFRTQHPEVTLLQYVDDLLLAAPTKKACTQGTRHLLQELGEKGYRASAKKAQICQTKVTYLGYILSEGKRWLTPGRIETVARIPPPRNPREVREFLGTAGFCRLWIPGFAELAAPLYALTKESTPFTWQTEHQLAFEALKKALLSAPALGLPDTSKPFTLFLDERQGIAKGVLTQKLGPWKRPVAYLSKKLDPVAAGWPPCLRIMAATAMLVKDSAKLTLGQPLTVITPHTLEAIVRQPPDRWITNARLTHYQALLLDTDRVQFGPPVTLNPATLLPVPENQPSPHDCRQVLAETHGTREDLKDQELPDADHTWYTDGSSYLDSGTRRAGAAVVDGHNTIWAQSLPPGTSAQKAELIALTKALELSKGKKANIYTDSRYAFATAHTHGSIYERRGLLTSEGKEIKNKAEIIALLKALFLPQEVAIIHCPGHQKGQDPVAVGNRQADRVARQAAMAEVLTLATEPDNTSHITAGKRTADGSEFEKRTADGSEFESPKKKAKVE

SEQ ID NO: 1505 - protein, 2100 aa, synthetic construct
MPAAKRVKLDGGDKKYSIGLDIGTNSVGWAVITDEYKVPSKKFKVLGNTDRHSIKKNLIGALLFDSGETAEATRLKRTARRRYTRRKNRICYLQEIFSNEMAKVDDSFFHRLEESFLVEEDKKHERHPIFGNIVDEVAYHEKYPTIYHLRKKLVDSTDKADLRLIYLALAHMIKFRGHFLIEGDLNPDNSDVDKLFIQLVQTYNQLFEENPINASGVDAKAILSARLSKSRRLENLIAQLPGEKKNGLFGNLIALSLGLTPNFKSNFDLAEDAKLQLSKDTYDDDLDNLLAQIGDQYADLFLAAKNLSDAILLSDILRVNTEITKAPLSASMIKRYDEHHQDLTLLKALVRQQLPEKYKEIFFDQSKNGYAGYIDGGASQEEFYKFIKPILEKMDGTEELLVKLNREDLLRKQRTFDNGSIPHQIHLGELHAILRRQEDFYPFLKDNREKIEKILTFRIPYYVGPLARGNSRFAWMTRKSEETITPWNFEEVVDKGASAQSFIERMTNFDKNLPNEKVLPKHSLLYEYFTVYNELTKVKYVTEGMRKPAFLSGEQKKAIVDLLFKTNRKVTVKQLKEDYFKKIECFDSVEISGVEDRFNASLGTYHDLLKIIKDKDFLDNEENEDILEDIVLTLTLFEDREMIEERLKTYAHLFDDKVMKQLKRRRYTGWGRLSRKLINGIRDKQSGKTILDFLKSDGFANRNFMQLIHDDSLTFKEDIQKAQVSGQGDSLHEHIANLAGSPAIKKGILQTVKVVDELVKVMGRHKPENIVIEMARENQTTQKGQKNSRERMKRIEEGIKELGSQILKEHPVENTQLQNEKLYLYYLQNGRDMYVDQELDINRLSDYDVDHIVPQSFLKDDSIDNKVLTRSDKARGKSDNVPSEEVVKKMKNYWRQLLNAKLITQRKFDNLTKAERGGLSELDKAGFIKRQLVETRQITKHVAQILDSRMNTKYDENDKLIREVKVITLKSKLVSDFRKDFQFYKVREINNYHHAHDAYLNAVVGTALIKKYPKLESEFVYGDYKVYDVRKMIAKSEQEIGKATAKYFFYSNIMNFFKTEITLANGEIRKRPLIETNGETGEIVWDKGRDFATVRKVLSMPQVNIVKKTEVQTGGFSKESILPKRNSDKLIARKKDWDPKKYGGFDSPTVAYSVLVVAKVEKGKSKKLKSVKELLGITIMERSSFEKNPIDFLEAKGYKEVKKDLIIKLPKYSLFELENGRKRMLASAGELQKGNELALPSKYVNFLYLASHYEKLKGSPEDNEQKQLFVEQHKHYLDEIIEQISEFSKRVILADANLDKVLSAYNKHRDKPIREQAENIIHLFTLTNLGAPAAFKYFDTTIDRKRYTSTKEVLDATLIHQSITGLYETRIDLSQLGGDGGGGGGSSPAPGGTVSLQDEHRLFDIPVTTSLPDVWLQDFPQAWAETGGLGRAKCQAPIIIDLKPTAVPVSIKQYPMSLEAHMGIRQHIIKFLELGVLRPCRSPWNTPLLPVKKPGTQDYRPVQDLREINKRTVDIHPTVPNPYNLLSTLKPDYSWYTVLDLKDAFFCLPLAPQSQELFAFEWKDPERGISGQLTWTRLPQGFKNSPTLFDEALHRDLTDFRTQHPEVTLLQYVDDLLLAAPTKKACTQGTRHLLQELGEKGYRASAKKAQICQTKVTYLGYILSEGKRWLTPGRIETVARIPPPRNPREVREFLGTAGFCRLWIPGFAELAAPLYALTKESTPFTWQTEHQLAFEALKKALLSAPALGLPDTSKPFTLFLDERQGIAKGVLTQKLGPWKRPVAYLSKKLDPVAAGWPPCLRIMAATAMLVKDSAKLTLGQPLTVITPHTLEAIVRQPPDRWITNARLTHYQALLLDTDRVQFGPPVTLNPATLLPVPENQPSPHDCRQVLAETHGTREDLKDQELPDADHTWYTDGSSYLDSGTRRAGAAVVDGHNTIWAQSLPPGTSAQKAELIALTKALELSKGKKANIYTDSRYAFATAHTHGSIYERRGLLTSEGKEIKNKAEIIALLKALFLPQEVAIIHCPGHQKGQDPVAVGNRQADRVARQAAMAEVLTLATEPDNTSHITAGKRTADGSEFEKRTADGSEFESPKKKAKVE

SEQ ID NO: 1506 - protein, 2100 aa, synthetic construct
MPAAKRVKLDGGDKKYSIGLDIGTNSVGWAVITDEYKVPSKKFKVLGNTDRHSIKKNLIGALLFDSGETAEATRLKRTARRRYTRRKNRICYLQEIFSNEMAKVDDSFFHRLEESFLVEEDKKHERHPIFGNIVDEVAYHEKYPTIYHLRKKLVDSTDKADLRLIYLALAHMIKFRGHFLIEGDLNPDNSDVDKLFIQLVQTYNQLFEENPINASGVDAKAILSARLSKSRRLENLIAQLPGEKKNGLFGNLIALSLGLTPNFKSNFDLAEDAKLQLSKDTYDDDLDNLLAQIGDQYADLFLAAKNLSDAILLSDILRVNTEITKAPLSASMIKRYDEHHQDLTLLKALVRQQLPEKYKEIFFDQSKNGYAGYIDGGASQEEFYKFIKPILEKMDGTEELLVKLNREDLLRKQRTFDNGSIPHQIHLGELHAILRRQEDFYPFLKDNREKIEKILTFRIPYYVGPLARGNSRFAWMTRKSEETITPWNFEEVVDKGASAQSFIERMTNFDKNLPNEKVLPKHSLLYEYFTVYNELTKVKYVTEGMRKPAFLSGEQKKAIVDLLFKTNRKVTVKQLKEDYFKKIECFDSVEISGVEDRFNASLGTYHDLLKIIKDKDFLDNEENEDILEDIVLTLTLFEDREMIEERLKTYAHLFDDKVMKQLKRRRYTGWGRLSRKLINGIRDKQSGKTILDFLKSDGFANRNFMQLIHDDSLTFKEDIQKAQVSGQGDSLHEHIANLAGSPAIKKGILQTVKVVDELVKVMGRHKPENIVIEMARENQTTQKGQKNSRERMKRIEEGIKELGSQILKEHPVENTQLQNEKLYLYYLQNGRDMYVDQELDINRLSDYDVDHIVPQSFLKDDSIDNKVLTRSDKARGKSDNVPSEEVVKKMKNYWRQLLNAKLITQRKFDNLTKAERGGLSELDKAGFIKRQLVETRQITKHVAQILDSRMNTKYDENDKLIREVKVITLKSKLVSDFRKDFQFYKVREINNYHHAHDAYLNAVVGTALIKKYPKLESEFVYGDYKVYDVRKMIAKSEQEIGKATAKYFFYSNIMNFFKTEITLANGEIRKRPLIETNGETGEIVWDKGRDFATVRKVLSMPQVNIVKKTEVQTGGFSKESILPKRNSDKLIARKKDWDPKKYGGFDSPTVAYSVLVVAKVEKGKSKKLKSVKELLGITIMERSSFEKNPIDFLEAKGYKEVKKDLIIKLPKYSLFELENGRKRMLASAGELQKGNELALPSKYVNFLYLASHYEKLKGSPEDNEQKQLFVEQHKHYLDEIIEQISEFSKRVILADANLDKVLSAYNKHRDKPIREQAENIIHLFTLTNLGAPAAFKYFDTTIDRKRYTSTKEVLDATLIHQSITGLYETRIDLSQLGGDGGPAPGGSGGGGGTVSLQDEHRLFDIPVTTSLPDVWLQDFPQAWAETGGLGRAKCQAPIIIDLKPTAVPVSIKQYPMSLEAHMGIRQHIIKFLELGVLRPCRSPWNTPLLPVKKPGTQDYRPVQDLREINKRTVDIHPTVPNPYNLLSTLKPDYSWYTVLDLKDAFFCLPLAPQSQELFAFEWKDPERGISGQLTWTRLPQGFKNSPTLFDEALHRDLTDFRTQHPEVTLLQYVDDLLLAAPTKKACTQGTRHLLQELGEKGYRASAKKAQICQTKVTYLGYILSEGKRWLTPGRIETVARIPPPRNPREVREFLGTAGFCRLWIPGFAELAAPLYALTKESTPFTWQTEHQLAFEALKKALLSAPALGLPDTSKPFTLFLDERQGIAKGVLTQKLGPWKRPVAYLSKKLDPVAAGWPPCLRIMAATAMLVKDSAKLTLGQPLTVITPHTLEAIVRQPPDRWITNARLTHYQALLLDTDRVQFGPPVTLNPATLLPVPENQPSPHDCRQVLAETHGTREDLKDQELPDADHTWYTDGSSYLDSGTRRAGAAVVDGHNTIWAQSLPPGTSAQKAELIALTKALELSKGKKANIYTDSRYAFATAHTHGSIYERRGLLTSEGKEIKNKAEIIALLKALFLPQEVAIIHCPGHQKGQDPVAVGNRQADRVARQAAMAEVLTLATEPDNTSHITAGKRTADGSEFEKRTADGSEFESPKKKAKVE

SEQ ID NO: 1507 - protein, 2106 aa, synthetic construct
MPAAKRVKLDGGDKKYSIGLDIGTNSVGWAVITDEYKVPSKKFKVLGNTDRHSIKKNLIGALLFDSGETAEATRLKRTARRRYTRRKNRICYLQEIFSNEMAKVDDSFFHRLEESFLVEEDKKHERHPIFGNIVDEVAYHEKYPTIYHLRKKLVDSTDKADLRLIYLALAHMIKFRGHFLIEGDLNPDNSDVDKLFIQLVQTYNQLFEENPINASGVDAKAILSARLSKSRRLENLIAQLPGEKKNGLFGNLIALSLGLTPNFKSNFDLAEDAKLQLSKDTYDDDLDNLLAQIGDQYADLFLAAKNLSDAILLSDILRVNTEITKAPLSASMIKRYDEHHQDLTLLKALVRQQLPEKYKEIFFDQSKNGYAGYIDGGASQEEFYKFIKPILEKMDGTEELLVKLNREDLLRKQRTFDNGSIPHQIHLGELHAILRRQEDFYPFLKDNREKIEKILTFRIPYYVGPLARGNSRFAWMTRKSEETITPWNFEEVVDKGASAQSFIERMTNFDKNLPNEKVLPKHSLLYEYFTVYNELTKVKYVTEGMRKPAFLSGEQKKAIVDLLFKTNRKVTVKQLKEDYFKKIECFDSVEISGVEDRFNASLGTYHDLLKIIKDKDFLDNEENEDILEDIVLTLTLFEDREMIEERLKTYAHLFDDKVMKQLKRRRYTGWGRLSRKLINGIRDKQSGKTILDFLKSDGFANRNFMQLIHDDSLTFKEDIQKAQVSGQGDSLHEHIANLAGSPAIKKGILQTVKVVDELVKVMGRHKPENIVIEMARENQTTQKGQKNSRERMKRIEEGIKELGSQILKEHPVENTQLQNEKLYLYYLQNGRDMYVDQELDINRLSDYDVDHIVPQSFLKDDSIDNKVLTRSDKARGKSDNVPSEEVVKKMKNYWRQLLNAKLITQRKFDNLTKAERGGLSELDKAGFIKRQLVETRQITKHVAQILDSRMNTKYDENDKLIREVKVITLKSKLVSDFRKDFQFYKVREINNYHHAHDAYLNAVVGTALIKKYPKLESEFVYGDYKVYDVRKMIAKSEQEIGKATAKYFFYSNIMNFFKTEITLANGEIRKRPLIETNGETGEIVWDKGRDFATVRKVLSMPQVNIVKKTEVQTGGFSKESILPKRNSDKLIARKKDWDPKKYGGFDSPTVAYSVLVVAKVEKGKSKKLKSVKELLGITIMERSSFEKNPIDFLEAKGYKEVKKDLIIKLPKYSLFELENGRKRMLASAGELQKGNELALPSKYVNFLYLASHYEKLKGSPEDNEQKQLFVEQHKHYLDEIIEQISEFSKRVILADANLDKVLSAYNKHRDKPIREQAENIIHLFTLTNLGAPAAFKYFDTTIDRKRYTSTKEVLDATLIHQSITGLYETRIDLSQLGGDGGGGSGGSGGSGGSGGSGGTVSLQDEHRLFDIPVTTSLPDVWLQDFPQAWAETGGLGRAKCQAPIIIDLKPTAVPVSIKQYPMSLEAHMGIRQHIIKFLELGVLRPCRSPWNTPLLPVKKPGTQDYRPVQDLREINKRTVDIHPTVPNPYNLLSTLKPDYSWYTVLDLKDAFFCLPLAPQSQELFAFEWKDPERGISGQLTWTRLPQGFKNSPTLFDEALHRDLTDFRTQHPEVTLLQYVDDLLLAAPTKKACTQGTRHLLQELGEKGYRASAKKAQICQTKVTYLGYILSEGKRWLTPGRIETVARIPPPRNPREVREFLGTAGFCRLWIPGFAELAAPLYALTKESTPFTWQTEHQLAFEALKKALLSAPALGLPDTSKPFTLFLDERQGIAKGVLTQKLGPWKRPVAYLSKKLDPVAAGWPPCLRIMAATAMLVKDSAKLTLGQPLTVITPHTLEAIVRQPPDRWITNARLTHYQALLLDTDRVQFGPPVTLNPATLLPVPENQPSPHDCRQVLAETHGTREDLKDQELPDADHTWYTDGSSYLDSGTRRAGAAVVDGHNTIWAQSLPPGTSAQKAELIALTKALELSKGKKANIYTDSRYAFATAHTHGSIYERRGLLTSEGKEIKNKAEIIALLKALFLPQEVAIIHCPGHQKGQDPVAVGNRQADRVARQAAMAEVLTLATEPDNTSHITAGKRTADGSEFEKRTADGSEFESPKKKAKVE

SEQ ID NO: 1508 - protein, 2100 aa, synthetic construct
MPAAKRVKLDGGDKKYSIGLDIGTNSVGWAVITDEYKVPSKKFKVLGNTDRHSIKKNLIGALLFDSGETAEATRLKRTARRRYTRRKNRICYLQEIFSNEMAKVDDSFFHRLEESFLVEEDKKHERHPIFGNIVDEVAYHEKYPTIYHLRKKLVDSTDKADLRLIYLALAHMIKFRGHFLIEGDLNPDNSDVDKLFIQLVQTYNQLFEENPINASGVDAKAILSARLSKSRRLENLIAQLPGEKKNGLFGNLIALSLGLTPNFKSNFDLAEDAKLQLSKDTYDDDLDNLLAQIGDQYADLFLAAKNLSDAILLSDILRVNTEITKAPLSASMIKRYDEHHQDLTLLKALVRQQLPEKYKEIFFDQSKNGYAGYIDGGASQEEFYKFIKPILEKMDGTEELLVKLNREDLLRKQRTFDNGSIPHQIHLGELHAILRRQEDFYPFLKDNREKIEKILTFRIPYYVGPLARGNSRFAWMTRKSEETITPWNFEEVVDKGASAQSFIERMTNFDKNLPNEKVLPKHSLLYEYFTVYNELTKVKYVTEGMRKPAFLSGEQKKAIVDLLFKTNRKVTVKQLKEDYFKKIECFDSVEISGVEDRFNASLGTYHDLLKIIKDKDFLDNEENEDILEDIVLTLTLFEDREMIEERLKTYAHLFDDKVMKQLKRRRYTGWGRLSRKLINGIRDKQSGKTILDFLKSDGFANRNFMQLIHDDSLTFKEDIQKAQVSGQGDSLHEHIANLAGSPAIKKGILQTVKVVDELVKVMGRHKPENIVIEMARENQTTQKGQKNSRERMKRIEEGIKELGSQILKEHPVENTQLQNEKLYLYYLQNGRDMYVDQELDINRLSDYDVDHIVPQSFLKDDSIDNKVLTRSDKARGKSDNVPSEEVVKKMKNYWRQLLNAKLITQRKFDNLTKAERGGLSELDKAGFIKRQLVETRQITKHVAQILDSRMNTKYDENDKLIREVKVITLKSKLVSDFRKDFQFYKVREINNYHHAHDAYLNAVVGTALIKKYPKLESEFVYGDYKVYDVRKMIAKSEQEIGKATAKYFFYSNIMNFFKTEITLANGEIRKRPLIETNGETGEIVWDKGRDFATVRKVLSMPQVNIVKKTEVQTGGFSKESILPKRNSDKLIARKKDWDPKKYGGFDSPTVAYSVLVVAKVEKGKSKKLKSVKELLGITIMERSSFEKNPIDFLEAKGYKEVKKDLIIKLPKYSLFELENGRKRMLASAGELQKGNELALPSKYVNFLYLASHYEKLKGSPEDNEQKQLFVEQHKHYLDEIIEQISEFSKRVILADANLDKVLSAYNKHRDKPIREQAENIIHLFTLTNLGAPAAFKYFDTTIDRKRYTSTKEVLDATLIHQSITGLYETRIDLSQLGGDGGGSSGGSPAPGGTVSLQDEHRLFDIPVTTSLPDVWLQDFPQAWAETGGLGRAKCQAPIIIDLKPTAVPVSIKQYPMSLEAHMGIRQHIIKFLELGVLRPCRSPWNTPLLPVKKPGTQDYRPVQDLREINKRTVDIHPTVPNPYNLLSTLKPDYSWYTVLDLKDAFFCLPLAPQSQELFAFEWKDPERGISGQLTWTRLPQGFKNSPTLFDEALHRDLTDFRTQHPEVTLLQYVDDLLLAAPTKKACTQGTRHLLQELGEKGYRASAKKAQICQTKVTYLGYILSEGKRWLTPGRIETVARIPPPRNPREVREFLGTAGFCRLWIPGFAELAAPLYALTKESTPFTWQTEHQLAFEALKKALLSAPALGLPDTSKPFTLFLDERQGIAKGVLTQKLGPWKRPVAYLSKKLDPVAAGWPPCLRIMAATAMLVKDSAKLTLGQPLTVITPHTLEAIVRQPPDRWITNARLTHYQALLLDTDRVQFGPPVTLNPATLLPVPENQPSPHDCRQVLAETHGTREDLKDQELPDADHTWYTDGSSYLDSGTRRAGAAVVDGHNTIWAQSLPPGTSAQKAELIALTKALELSKGKKANIYTDSRYAFATAHTHGSIYERRGLLTSEGKEIKNKAEIIALLKALFLPQEVAIIHCPGHQKGQDPVAVGNRQADRVARQAAMAEVLTLATEPDNTSHITAGKRTADGSEFEKRTADGSEFESPKKKAKVE

SEQ ID NO: 1509 - protein, 2097 aa, synthetic construct
MPAAKRVKLDGGDKKYSIGLDIGTNSVGWAVITDEYKVPSKKFKVLGNTDRHSIKKNLIGALLFDSGETAEATRLKRTARRRYTRRKNRICYLQEIFSNEMAKVDDSFFHRLEESFLVEEDKKHERHPIFGNIVDEVAYHEKYPTIYHLRKKLVDSTDKADLRLIYLALAHMIKFRGHFLIEGDLNPDNSDVDKLFIQLVQTYNQLFEENPINASGVDAKAILSARLSKSRRLENLIAQLPGEKKNGLFGNLIALSLGLTPNFKSNFDLAEDAKLQLSKDTYDDDLDNLLAQIGDQYADLFLAAKNLSDAILLSDILRVNTEITKAPLSASMIKRYDEHHQDLTLLKALVRQQLPEKYKEIFFDQSKNGYAGYIDGGASQEEFYKFIKPILEKMDGTEELLVKLNREDLLRKQRTFDNGSIPHQIHLGELHAILRRQEDFYPFLKDNREKIEKILTFRIPYYVGPLARGNSRFAWMTRKSEETITPWNFEEVVDKGASAQSFIERMTNFDKNLPNEKVLPKHSLLYEYFTVYNELTKVKYVTEGMRKPAFLSGEQKKAIVDLLFKTNRKVTVKQLKEDYFKKIECFDSVEISGVEDRFNASLGTYHDLLKIIKDKDFLDNEENEDILEDIVLTLTLFEDREMIEERLKTYAHLFDDKVMKQLKRRRYTGWGRLSRKLINGIRDKQSGKTILDFLKSDGFANRNFMQLIHDDSLTFKEDIQKAQVSGQGDSLHEHIANLAGSPAIKKGILQTVKVVDELVKVMGRHKPENIVIEMARENQTTQKGQKNSRERMKRIEEGIKELGSQILKEHPVENTQLQNEKLYLYYLQNGRDMYVDQELDINRLSDYDVDHIVPQSFLKDDSIDNKVLTRSDKARGKSDNVPSEEVVKKMKNYWRQLLNAKLITQRKFDNLTKAERGGLSELDKAGFIKRQLVETRQITKHVAQILDSRMNTKYDENDKLIREVKVITLKSKLVSDFRKDFQFYKVREINNYHHAHDAYLNAVVGTALIKKYPKLESEFVYGDYKVYDVRKMIAKSEQEIGKATAKYFFYSNIMNFFKTEITLANGEIRKRPLIETNGETGEIVWDKGRDFATVRKVLSMPQVNIVKKTEVQTGGFSKESILPKRNSDKLIARKKDWDPKKYGGFDSPTVAYSVLVVAKVEKGKSKKLKSVKELLGITIMERSSFEKNPIDFLEAKGYKEVKKDLIIKLPKYSLFELENGRKRMLASAGELQKGNELALPSKYVNFLYLASHYEKLKGSPEDNEQKQLFVEQHKHYLDEIIEQISEFSKRVILADANLDKVLSAYNKHRDKPIREQAENIIHLFTLTNLGAPAAFKYFDTTIDRKRYTSTKEVLDATLIHQSITGLYETRIDLSQLGGDGGPAPGSSGGTVSLQDEHRLFDIPVTTSLPDVWLQDFPQAWAETGGLGRAKCQAPIIIDLKPTAVPVSIKQYPMSLEAHMGIRQHIIKFLELGVLRPCRSPWNTPLLPVKKPGTQDYRPVQDLREINKRTVDIHPTVPNPYNLLSTLKPDYSWYTVLDLKDAFFCLPLAPQSQELFAFEWKDPERGISGQLTWTRLPQGFKNSPTLFDEALHRDLTDFRTQHPEVTLLQYVDDLLLAAPTKKACTQGTRHLLQELGEKGYRASAKKAQICQTKVTYLGYILSEGKRWLTPGRIETVARIPPPRNPREVREFLGTAGFCRLWIPGFAELAAPLYALTKESTPFTWQTEHQLAFEALKKALLSAPALGLPDTSKPFTLFLDERQGIAKGVLTQKLGPWKRPVAYLSKKLDPVAAGWPPCLRIMAATAMLVKDSAKLTLGQPLTVITPHTLEAIVRQPPDRWITNARLTHYQALLLDTDRVQFGPPVTLNPATLLPVPENQPSPHDCRQVLAETHGTREDLKDQELPDADHTWYTDGSSYLDSGTRRAGAAVVDGHNTIWAQSLPPGTSAQKAELIALTKALELSKGKKANIYTDSRYAFATAHTHGSIYERRGLLTSEGKEIKNKAEIIALLKALFLPQEVAIIHCPGHQKGQDPVAVGNRQADRVARQAAMAEVLTLATEPDNTSHITAGKRTADGSEFEKRTADGSEFESPKKKAKVE

SEQ ID NO: 1510 - protein, 2009 aa, synthetic construct
MPAAKRVKLDGGDKKYSIGLDIGTNSVGWAVITDEYKVPSKKFKVLGNTDRHSIKKNLIGALLFDSGETAEATRLKRTARRRYTRRKNRICYLQEIFSNEMAKVDDSFFHRLEESFLVEEDKKHERHPIFGNIVDEVAYHEKYPTIYHLRKKLVDSTDKADLRLIYLALAHMIKFRGHFLIEGDLNPDNSDVDKLFIQLVQTYNQLFEENPINASGVDAKAILSARLSKSRRLENLIAQLPGEKKNGLFGNLIALSLGLTPNFKSNFDLAEDAKLQLSKDTYDDDLDNLLAQIGDQYADLFLAAKNLSDAILLSDILRVNTEITKAPLSASMIKRYDEHHQDLTLLKALVRQQLPEKYKEIFFDQSKNGYAGYIDGGASQEEFYKFIKPILEKMDGTEELLVKLNREDLLRKQRTFDNGSIPHQIHLGELHAILRRQEDFYPFLKDNREKIEKILTFRIPYYVGPLARGNSRFAWMTRKSEETITPWNFEEVVDKGASAQSFIERMTNFDKNLPNEKVLPKHSLLYEYFTVYNELTKVKYVTEGMRKPAFLSGEQKKAIVDLLFKTNRKVTVKQLKEDYFKKIECFDSVEISGVEDRFNASLGTYHDLLKIIKDKDFLDNEENEDILEDIVLTLTLFEDREMIEERLKTYAHLFDDKVMKQLKRRRYTGWGRLSRKLINGIRDKQSGKTILDFLKSDGFANRNFMQLIHDDSLTFKEDIQKAQVSGQGDSLHEHIANLAGSPAIKKGILQTVKVVDELVKVMGRHKPENIVIEMARENQTTQKGQKNSRERMKRIEEGIKELGSQILKEHPVENTQLQNEKLYLYYLQNGRDMYVDQELDINRLSDYDVDHIVPQSFLKDDSIDNKVLTRSDKARGKSDNVPSEEVVKKMKNYWRQLLNAKLITQRKFDNLTKAERGGLSELDKAGFIKRQLVETRQITKHVAQILDSRMNTKYDENDKLIREVKVITLKSKLVSDFRKDFQFYKVREINNYHHAHDAYLNAVVGTALIKKYPKLESEFVYGDYKVYDVRKMIAKSEQEIGKATAKYFFYSNIMNFFKTEITLANGEIRKRPLIETNGETGEIVWDKGRDFATVRKVLSMPQVNIVKKTEVQTGGFSKESILPKRNSDKLIARKKDWDPKKYGGFDSPTVAYSVLVVAKVEKGKSKKLKSVKELLGITIMERSSFEKNPIDFLEAKGYKEVKKDLIIKLPKYSLFELENGRKRMLASAGELQKGNELALPSKYVNFLYLASHYEKLKGSPEDNEQKQLFVEQHKHYLDEIIEQISEFSKRVILADANLDKVLSAYNKHRDKPIREQAENIIHLFTLTNLGAPAAFKYFDTTIDRKRYTSTKEVLDATLIHQSITGLYETRIDLSQLGGDGGEAAAKGGGPAPGGGLEHLPPPPEVSQFPLNPERLQALTDLVSRALEAKHIEPYQGPGNNPIFPVKKPNGKWRFIHDLRATNSVTRDLASPSPGPPDLTSLPQGLPHLRTIDLTDAFFQIPLPTIFQPYFAFTLPQPNNYGPGTRYSWRVLPQGFKNSPTLFEQQLSHILTPVRKTFPNSLIIQYMDDILLASPAPGELAALTDKVTNALTKEGLPLSPEKTQATPGPIHFLGQVISQDCITYETLPSINVKSTWSLAELQSMLGELQWVSKGTPVLRSSLHQLYLALRGHRDPRDTIKLTSIQVQALRTIQKALTLNCRSRLVNQLPILALIMLRPTGTTAVLFQTKQKWPLVWLHTPHPATSLRPWGQLLANAVIILDKYSLQHYGQVCKSFHHNISNQALTYYLHTSDQSSVAILLQHSHRFHNLGAQPSGPWRSLLQMPQIFQNIDVLRPPFTISPVVINHAPCLFSDGSASKAAFIIWDRQVIHQQVLSLPSTCSAQAGELFGLLAGLQKSQPWVALNIFLDSKFLIGHLRRMALGAFPGPSTQCELHTQLLPLLQGKTVYVHHVRSHTLLQDPISRLNEATDALMLAPLLPLAGKRTADGSEFEKRTADGSEFESPKKKAKVE

SEQ ID NO: 1511 - protein, 2001 aa, synthetic construct
MPAAKRVKLDGGDKKYSIGLDIGTNSVGWAVITDEYKVPSKKFKVLGNTDRHSIKKNLIGALLFDSGETAEATRLKRTARRRYTRRKNRICYLQEIFSNEMAKVDDSFFHRLEESFLVEEDKKHERHPIFGNIVDEVAYHEKYPTIYHLRKKLVDSTDKADLRLIYLALAHMIKFRGHFLIEGDLNPDNSDVDKLFIQLVQTYNQLFEENPINASGVDAKAILSARLSKSRRLENLIAQLPGEKKNGLFGNLIALSLGLTPNFKSNFDLAEDAKLQLSKDTYDDDLDNLLAQIGDQYADLFLAAKNLSDAILLSDILRVNTEITKAPLSASMIKRYDEHHQDLTLLKALVRQQLPEKYKEIFFDQSKNGYAGYIDGGASQEEFYKFIKPILEKMDGTEELLVKLNREDLLRKQRTFDNGSIPHQIHLGELHAILRRQEDFYPFLKDNREKIEKILTFRIPYYVGPLARGNSRFAWMTRKSEETITPWNFEEVVDKGASAQSFIERMTNFDKNLPNEKVLPKHSLLYEYFTVYNELTKVKYVTEGMRKPAFLSGEQKKAIVDLLFKTNRKVTVKQLKEDYFKKIECFDSVEISGVEDRFNASLGTYHDLLKIIKDKDFLDNEENEDILEDIVLTLTLFEDREMIEERLKTYAHLFDDKVMKQLKRRRYTGWGRLSRKLINGIRDKQSGKTILDFLKSDGFANRNFMQLIHDDSLTFKEDIQKAQVSGQGDSLHEHIANLAGSPAIKKGILQTVKVVDELVKVMGRHKPENIVIEMARENQTTQKGQKNSRERMKRIEEGIKELGSQILKEHPVENTQLQNEKLYLYYLQNGRDMYVDQELDINRLSDYDVDHIVPQSFLKDDSIDNKVLTRSDKARGKSDNVPSEEVVKKMKNYWRQLLNAKLITQRKFDNLTKAERGGLSELDKAGFIKRQLVETRQITKHVAQILDSRMNTKYDENDKLIREVKVITLKSKLVSDFRKDFQFYKVREINNYHHAHDAYLNAVVGTALIKKYPKLESEFVYGDYKVYDVRKMIAKSEQEIGKATAKYFFYSNIMNFFKTEITLANGEIRKRPLIETNGETGEIVWDKGRDFATVRKVLSMPQVNIVKKTEVQTGGFSKESILPKRNSDKLIARKKDWDPKKYGGFDSPTVAYSVLVVAKVEKGKSKKLKSVKELLGITIMERSSFEKNPIDFLEAKGYKEVKKDLIIKLPKYSLFELENGRKRMLASAGELQKGNELALPSKYVNFLYLASHYEKLKGSPEDNEQKQLFVEQHKHYLDEIIEQISEFSKRVILADANLDKVLSAYNKHRDKPIREQAENIIHLFTLTNLGAPAAFKYFDTTIDRKRYTSTKEVLDATLIHQSITGLYETRIDLSQLGGDGGGGSGGGLEHLPPPPEVSQFPLNPERLQALTDLVSRALEAKHIEPYQGPGNNPIFPVKKPNGKWRFIHDLRATNSVTRDLASPSPGPPDLTSLPQGLPHLRTIDLTDAFFQIPLPTIFQPYFAFTLPQPNNYGPGTRYSWRVLPQGFKNSPTLFQQQLSHILTPVRKTFPNSLIIQYMDDILLASPAPGELAALTDKVTNALTKEGLPLSPEKTQATPGPIHFLGQVISQDCITYETLPSINVKSTWSLAELQSMLGELQWVSKGTPVLRSSLHQLYLALRGHRDPRDTIKLTSIQVQALRTIQKALTLNCRSRLVNQLPILALIMLRPTGTTAVLFQTKQKWPLVWLHTPHPATSLRPWGQLLANAVIILDKYSLQHYGQVCKSFHHNISNQALTYYLHTSDQSSVAILLQHSHRFHNLGAQPSGPWRSLLQMPQIFQNIDVLRPPFTISPVVINHAPCLFSDGSASKAAFIIWDRQVIHQQVLSLPSTCSAQAGELFGLLAGLQKSQPWVALNIFLDSKFLIGHLRRMAWGAFPGPSTQCELHTQLLPLLQGKTVYVHHVRSHTLLQDPISRLNEATDALMLAPLLPLAGKRTADGSEFEKRTADGSEFESPKKKAKVE

SEQ ID NO: 1512 - protein, 2004 aa, synthetic construct
MPAAKRVKLDGGDKKYSIGLDIGTNSVGWAVITDEYKVPSKKFKVLGNTDRHSIKKNLIGALLFDSGETAEATRLKRTARRRYTRRKNRICYLQEIFSNEMAKVDDSFFHRLEESFLVEEDKKHERHPIFGNIVDEVAYHEKYPTIYHLRKKLVDSTDKADLRLIYLALAHMIKFRGHFLIEGDLNPDNSDVDKLFIQLVQTYNQLFEENPINASGVDAKAILSARLSKSRRLENLIAQLPGEKKNGLFGNLIALSLGLTPNFKSNFDLAEDAKLQLSKDTYDDDLDNLLAQIGDQYADLFLAAKNLSDAILLSDILRVNTEITKAPLSASMIKRYDEHHQDLTLLKALVRQQLPEKYKEIFFDQSKNGYAGYIDGGASQEEFYKFIKPILEKMDGTEELLVKLNREDLLRKQRTFDNGSIPHQIHLGELHAILRRQEDFYPFLKDNREKIEKILTFRIPYYVGPLARGNSRFAWMTRKSEETITPWNFEEVVDKGASAQSFIERMTNFDKNLPNEKVLPKHSLLYEYFTVYNELTKVKYVTEGMRKPAFLSGEQKKAIVDLLFKTNRKVTVKQLKEDYFKKIECFDSVEISGVEDRFNASLGTYHDLLKIIKDKDFLDNEENEDILEDIVLTLTLFEDREMIEERLKTYAHLFDDKVMKQLKRRRYTGWGRLSRKLINGIRDKQSGKTILDFLKSDGFANRNFMQLIHDDSLTFKEDIQKAQVSGQGDSLHEHIANLAGSPAIKKGILQTVKVVDELVKVMGRHKPENIVIEMARENQTTQKGQKNSRERMKRIEEGIKELGSQILKEHPVENTQLQNEKLYLYYLQNGRDMYVDQELDINRLSDYDVDHIVPQSFLKDDSIDNKVLTRSDKARGKSDNVPSEEVVKKMKNYWRQLLNAKLITQRKFDNLTKAERGGLSELDKAGFIKRQLVETRQITKHVAQILDSRMNTKYDENDKLIREVKVITLKSKLVSDFRKDFQFYKVREINNYHHAHDAYLNAVVGTALIKKYPKLESEFVYGDYKVYDVRKMIAKSEQEIGKATAKYFFYSNIMNFFKTEITLANGEIRKRPLIETNGETGEIVWDKGRDFATVRKVLSMPQVNIVKKTEVQTGGFSKESILPKRNSDKLIARKKDWDPKKYGGFDSPTVAYSVLVVAKVEKGKSKKLKSVKELLGITIMERSSFEKNPIDFLEAKGYKEVKKDLIIKLPKYSLFELENGRKRMLASAGELQKGNELALPSKYVNFLYLASHYEKLKGSPEDNEQKQLFVEQHKHYLDEIIEQISEFSKRVILADANLDKVLSAYNKHRDKPIREQAENIIHLFTLTNLGAPAAFKYFDTTIDRKRYTSTKEVLDATLIHQSITGLYETRIDLSQLGGDGGGGSGGGGGGLEHLPPPPEVSQFPLNPERLQALTDLVSRALEAKHIEPYQGPGNNPIFPVKKPNGKWRFIHDLRATNSVTRDLASPSPGPPDLTSLPQGLPHLRTIDLTDAFFQIPLPTIFQPYFAFTLPQPNNYGPGTRYSWRVLPQGFKNSPTLFQQQLSHILTPVRKTFPNSLIIQYMDDILLASPAPGELAALTDKVTNALTKEGLPLSPEKTQATPGPIHFLGQVISQDCITYETLPSINVKSTWSLAELQSMLGELQWVSKGTPVLRSSLHQLYLALRGHRDPRDTIKLTSIQVQALRTIQKALTLNCRSRLVNQLPILALIMLRPTGTTAVLFQTKQKWPLVWLHTPHPATSLRPWGQLLANAVIILDKYSLQHYGQVCKSFHHNISNQALTYYLHTSDQSSVAILLQHSHRFHNLGAQPSGPWRSLLQMPQIFQNIDVLRPPFTISPVVINHAPCLFSDGSASKAAFIIWDRQVIHQQVLSLPSTCSAQAGELFGLLAGLQKSQPWVALNIFLDSKFLIGHLRRMAWGAFPGPSTQCELHTQLLPLLQGKTVYVHHVRSHTLLQDPISRLNEATDALMLAPLLPLAGKRTADGSEFEKRTADGSEFESPKKKAKVE

SEQ ID NO: 1513 - protein, 2007 aa, synthetic construct
MPAAKRVKLDGGDKKYSIGLDIGTNSVGWAVITDEYKVPSKKFKVLGNTDRHSIKKNLIGALLFDSGETAEATRLKRTARRRYTRRKNRICYLQEIFSNEMAKVDDSFFHRLEESFLVEEDKKHERHPIFGNIVDEVAYHEKYPTIYHLRKKLVDSTDKADLRLIYLALAHMIKFRGHFLIEGDLNPDNSDVDKLFIQLVQTYNQLFEENPINASGVDAKAILSARLSKSRRLENLIAQLPGEKKNGLFGNLIALSLGLTPNFKSNFDLAEDAKLQLSKDTYDDDLDNLLAQIGDQYADLFLAAKNLSDAILLSDILRVNTEITKAPLSASMIKRYDEHHQDLTLLKALVRQQLPEKYKEIFFDQSKNGYAGYIDGGASQEEFYKFIKPILEKMDGTEELLVKLNREDLLRKQRTFDNGSIPHQIHLGELHAILRRQEDFYPFLKDNREKIEKILTFRIPYYVGPLARGNSRFAWMTRKSEETITPWNFEEVVDKGASAQSFIERMTNFDKNLPNEKVLPKHSLLYEYFTVYNELTKVKYVTEGMRKPAFLSGEQKKAIVDLLFKTNRKVTVKQLKEDYFKKIECFDSVEISGVEDRFNASLGTYHDLLKIIKDKDFLDNEENEDILEDIVLTLTLFEDREMIEERLKTYAHLFDDKVMKQLKRRRYTGWGRLSRKLINGIRDKQSGKTILDFLKSDGFANRNFMQLIHDDSLTFKEDIQKAQVSGQGDSLHEHIANLAGSPAIKKGILQTVKVVDELVKVMGRHKPENIVIEMARENQTTQKGQKNSRERMKRIEEGIKELGSQILKEHPVENTQLQNEKLYLYYLQNGRDMYVDQELDINRLSDYDVDHIVPQSFLKDDSIDNKVLTRSDKARGKSDNVPSEEVVKKMKNYWRQLLNAKLITQRKFDNLTKAERGGLSELDKAGFIKRQLVETRQITKHVAQILDSRMNTKYDENDKLIREVKVITLKSKLVSDFRKDFQFYKVREINNYHHAHDAYLNAVVGTALIKKYPKLESEFVYGDYKVYDVRKMIAKSEQEIGKATAKYFFYSNIMNFFKTEITLANGEIRKRPLIETNGETGEIVWDKGRDFATVRKVLSMPQVNIVKKTEVQTGGFSKESILPKRNSDKLIARKKDWDPKKYGGFDSPTVAYSVLVVAKVEKGKSKKLKSVKELLGITIMERSSFEKNPIDFLEAKGYKEVKKDLIIKLPKYSLFELENGRKRMLASAGELQKGNELALPSKYVNFLYLASHYEKLKGSPEDNEQKQLFVEQHKHYLDEIIEQISEFSKRVILADANLDKVLSAYNKHRDKPIREQAENIIHLFTLTNLGAPAAFKYFDTTIDRKRYTSTKEVLDATLIHQSITGLYETRIDLSQLGGDGGPAPGGGGSSGGGLEHLPPPPEVSQFPLNPERLQALTDLVSRALEAKHIEPYQGPGNNPIFPVKKPNGKWRFIHDLRATNSVTRDLASPSPGPPDLTSLPQGLPHLRTIDLTDAFFQIPLPTIFQPYFAFTLPQPNNYGPGTRYSWRVLPQGFKNSPTLFQQQLSHILTPVRKTFPNSLIIQYMDDILLASPAPGELAALTDKVTNALTKEGLPLSPEKTQATPGPIHFLGQVISQDCITYETLPSINVKSTWSLAELQSMLGELQWVSKGTPVLRSSLHQLYLALRGHRDPRDTIKLTSIQVQALRTIQKALTLNCRSRLVNQLPILALIMLRPTGTTAVLFQTKQKWPLVWLHTPHPATSLRPWGQLLANAVIILDKYSLQHYGQVCKSFHHNISNQALTYYLHTSDQSSVAILLQHSHRFHNLGAQPSGPWRSLLQMPQIFQNIDVLRPPFTISPVVINHAPCLFSDGSASKAAFIIWDRQVIHQQVLSLPSTCSAQAGELFGLLAGLQKSQPWVALNIFLDSKFLIGHLRRMAWGAFPGPSTQCELHTQLLPLLQGKTVYVHHVRSHTLLQDPISRLNEATDALMLAPLLPLAGKRTADGSEFEKRTADGSEFESPKKKAKVE

SEQ ID NO: 1514 - protein, 2007 aa, synthetic construct
MPAAKRVKLDGGDKKYSIGLDIGTNSVGWAVITDEYKVPSKKFKVLGNTDRHSIKKNLIGALLFDSGETAEATRLKRTARRRYTRRKNRICYLQEIFSNEMAKVDDSFFHRLEESFLVEEDKKHERHPIFGNIVDEVAYHEKYPTIYHLRKKLVDSTDKADLRLIYLALAHMIKFRGHFLIEGDLNPDNSDVDKLFIQLVQTYNQLFEENPINASGVDAKAILSARLSKSRRLENLIAQLPGEKKNGLFGNLIALSLGLTPNFKSNFDLAEDAKLQLSKDTYDDDLDNLLAQIGDQYADLFLAAKNLSDAILLSDILRVNTEITKAPLSASMIKRYDEHHQDLTLLKALVRQQLPEKYKEIFFDQSKNGYAGYIDGGASQEEFYKFIKPILEKMDGTEELLVKLNREDLLRKQRTFDNGSIPHQIHLGELHAILRRQEDFYPFLKDNREKIEKILTFRIPYYVGPLARGNSRFAWMTRKSEETITPWNFEEVVDKGASAQSFIERMTNFDKNLPNEKVLPKHSLLYEYFTVYNELTKVKYVTEGMRKPAFLSGEQKKAIVDLLFKTNRKVTVKQLKEDYFKKIECFDSVEISGVEDRFNASLGTYHDLLKIIKDKDFLDNEENEDILEDIVLTLTLFEDREMIEERLKTYAHLFDDKVMKQLKRRRYTGWGRLSRKLINGIRDKQSGKTILDFLKSDGFANRNFMQLIHDDSLTFKEDIQKAQVSGQGDSLHEHIANLAGSPAIKKGILQTVKVVDELVKVMGRHKPENIVIEMARENQTTQKGQKNSRERMKRIEEGIKELGSQILKEHPVENTQLQNEKLYLYYLQNGRDMYVDQELDINRLSDYDVDHIVPQSFLKDDSIDNKVLTRSDKARGKSDNVPSEEVVKKMKNYWRQLLNAKLITQRKFDNLTKAERGGLSELDKAGFIKRQLVETRQITKHVAQILDSRMNTKYDENDKLIREVKVITLKSKLVSDFRKDFQFYKVREINNYHHAHDAYLNAVVGTALIKKYPKLESEFVYGDYKVYDVRKMIAKSEQEIGKATAKYFFYSNIMNFFKTEITLANGEIRKRPLIETNGETGEIVWDKGRDFATVRKVLSMPQVNIVKKTEVQTGGFSKESILPKRNSDKLIARKKDWDPKKYGGFDSPTVAYSVLVVAKVEKGKSKKLKSVKELLGITIMERSSFEKNPIDFLEAKGYKEVKKDLIIKLPKYSLFELENGRKRMLASAGELQKGNELALPSKYVNFLYLASHYEKLKGSPEDNEQKQLFVEQHKHYLDEIIEQISEFSKRVILADANLDKVLSAYNKHRDKPIREQAENIIHLFTLTNLGAPAAFKYFDTTIDRKRYTSTKEVLDATLIHQSITGLYETRIDLSQLGGDGGGGGPAPGSSGGGLEHLPPPPEVSQFPLNPERLQALTDLVSRALEAKHIEPYQGPGNNPIFPVKKPNGKWRFIHDLRATNSVTRDLASPSPGPPDLTSPPQGLPHLRTIDLTDAFFQIPLPTIFQPYFAFTLPQPNNYGPGTRYSWRVLPQGFKNSPTLFQQQLSHILTPVRKTFPNSLIIQYMDDILLASPAPGELAALTDKVTNALTKEGLPLSPEKTQATPGPIHFLGQVISQDCITYETLPSINVKSTWSLAELQSMLGELQWVSKGTPVLRSSLHQLYLALRGHRDPRDTIKLTSIQVQALRTIQKALTLNCRSRLVNQLPILALIMLRPTGTTAVLFQTKQKWPLVWLHTPHPATSLRPWGQLLANAVIILDKYSLQHYGQVCKSFHHNISNQALTYYLHTSDQSSVAILLQHSHRFHNLGAQPSGPWRSLLQMPQIFQNIDVLRPPFTISPVVINHAPCLFSDGSASKAAFIIWDRQVIHQQVLSLPSTCSAQAGELFGLLAGLQKSQPWVALNIFLDSKFLIGHLRRMAWGAFPGPSTQCELHTQLLPLLQGKTVYVHHVRSHTLLQDPISRLNEATDALMLAPLLPLAGKRTADGSEFEKRTADGSEFESPKKKAKVE

SEQ ID NO: 1515 - protein, 2007 aa, synthetic construct
MPAAKRVKLDGGDKKYSIGLDIGTNSVGWAVITDEYKVPSKKFKVLGNTDRHSIKKNLIGALLFDSGETAEATRLKRTARRRYTRRKNRICYLQEIFSNEMAKVDDSFFHRLEESFLVEEDKKHERHPIFGNIVDEVAYHEKYPTIYHLRKKLVDSTDKADLRLIYLALAHMIKFRGHFLIEGDLNPDNSDVDKLFIQLVQTYNQLFEENPINASGVDAKAILSARLSKSRRLENLIAQLPGEKKNGLFGNLIALSLGLTPNFKSNFDLAEDAKLQLSKDTYDDDLDNLLAQIGDQYADLFLAAKNLSDAILLSDILRVNTEITKAPLSASMIKRYDEHHQDLTLLKALVRQQLPEKYKEIFFDQSKNGYAGYIDGGASQEEFYKFIKPILEKMDGTEELLVKLNREDLLRKQRTFDNGSIPHQIHLGELHAILRRQEDFYPFLKDNREKIEKILTFRIPYYVGPLARGNSRFAWMTRKSEETITPWNFEEVVDKGASAQSFIERMTNFDKNLPNEKVLPKHSLLYEYFTVYNELTKVKYVTEGMRKPAFLSGEQKKAIVDLLFKTNRKVTVKQLKEDYFKKIECFDSVEISGVEDRFNASLGTYHDLLKIIKDKDFLDNEENEDILEDIVLTLTLFEDREMIEERLKTYAHLFDDKVMKQLKRRRYTGWGRLSRKLINGIRDKQSGKTILDFLKSDGFANRNFMQLIHDDSLTFKEDIQKAQVSGQGDSLHEHIANLAGSPAIKKGILQTVKVVDELVKVMGRHKPENIVIEMARENQTTQKGQKNSRERMKRIEEGIKELGSQILKEHPVENTQLQNEKLYLYYLQNGRDMYVDQELDINRLSDYDVDHIVPQSFLKDDSIDNKVLTRSDKARGKSDNVPSEEVVKKMKNYWRQLLNAKLITQRKFDNLTKAERGGLSELDKAGFIKRQLVETRQITKHVAQILDSRMNTKYDENDKLIREVKVITLKSKLVSDFRKDFQFYKVREINNYHHAHDAYLNAVVGTALIKKYPKLESEFVYGDYKVYDVRKMIAKSEQEIGKATAKYFFYSNIMNFFKTEITLANGEIRKRPLIETNGETGEIVWDKGRDFATVRKVLSMPQVNIVKKTEVQTGGFSKESILPKRNSDKLIARKKDWDPKKYGGFDSPTVAYSVLVVAKVEKGKSKKLKSVKELLGITIMERSSFEKNPIDFLEAKGYKEVKKDLIIKLPKYSLFELENGRKRMLASAGELQKGNELALPSKYVNFLYLASHYEKLKGSPEDNEQKQLFVEQHKHYLDEIIEQISEFSKRVILADANLDKVLSAYNKHRDKPIREQAENIIHLFTLTNLGAPAAFKYFDTTIDRKRYTSTKEVLDATLIHQSITGLYETRIDLSQLGGDGGGSSGGGPAPGGGLEHLPPPPEVSQFPLNPERLQALTDLVSRALEAKHIEPYQGPGNNPIFPVKKPNGKWRFIHDLRATNSVTRDLASPSPGPPDLTSPPQGLPHLRTIDLTDAFFQIPLPTIFQPYFAFTLPQPNNYGPGTRYSWRVLPQGFKNSPTLFQQQLSHILTPVRKTFPNSLIIQYMDDILLASPAPGELAALTDKVTNALTKEGLPLSPEKTQATPGPIHFLGQVISQDCITYETLPSINVKSTWSLAELQSMLGELQWVSKGTPVLRSSLHQLYLALRGHRDPRDTIKLTSIQVQALRTIQKALTLNCRSRLVNQLPILALIMLRPTGTTAVLFQTKQKWPLVWLHTPHPATSLRPWGQLLANAVIILDKYSLQHYGQVCKSFHHNISNQALTYYLHTSDQSSVAILLQHSHRFHNLGAQPSGPWRSLLQMPQIFQNIDVLRPPFTISPVVINHAPCLFSDGSASKAAFIIWDRQVIHQQVLSLPSTCSAQAGELFGLLAGLQKSQPWVALNIFLDSKFLIGHLRRMAWGAFPGPSTQCELHTQLLPLLQGKTVYVHHVRSHTLLQDPISRLNEATDALMLAPLLPLAGKRTADGSEFEKRTADGSEFESPKKKAKVE

SEQ ID NO: 1516 - protein, 2006 aa, synthetic construct
MPAAKRVKLDGGDKKYSIGLDIGTNSVGWAVITDEYKVPSKKFKVLGNTDRHSIKKNLIGALLFDSGETAEATRLKRTARRRYTRRKNRICYLQEIFSNEMAKVDDSFFHRLEESFLVEEDKKHERHPIFGNIVDEVAYHEKYPTIYHLRKKLVDSTDKADLRLIYLALAHMIKFRGHFLIEGDLNPDNSDVDKLFIQLVQTYNQLFEENPINASGVDAKAILSARLSKSRRLENLIAQLPGEKKNGLFGNLIALSLGLTPNFKSNFDLAEDAKLQLSKDTYDDDLDNLLAQIGDQYADLFLAAKNLSDAILLSDILRVNTEITKAPLSASMIKRYDEHHQDLTLLKALVRQQLPEKYKEIFFDQSKNGYAGYIDGGASQEEFYKFIKPILEKMDGTEELLVKLNREDLLRKQRTFDNGSIPHQIHLGELHAILRRQEDFYPFLKDNREKIEKILTFRIPYYVGPLARGNSRFAWMTRKSEETITPWNFEEVVDKGASAQSFIERMTNFDKNLPNEKVLPKHSLLYEYFTVYNELTKVKYVTEGMRKPAFLSGEQKKAIVDLLFKTNRKVTVKQLKEDYFKKIECFDSVEISGVEDRFNASLGTYHDLLKIIKDKDFLDNEENEDILEDIVLTLTLFEDREMIEERLKTYAHLFDDKVMKQLKRRRYTGWGRLSRKLINGIRDKQSGKTILDFLKSDGFANRNFMQLIHDDSLTFKEDIQKAQVSGQGDSLHEHIANLAGSPAIKKGILQTVKVVDELVKVMGRHKPENIVIEMARENQTTQKGQKNSRERMKRIEEGIKELGSQILKEHPVENTQLQNEKLYLYYLQNGRDMYVDQELDINRLSDYDVDHIVPQSFLKDDSIDNKVLTRSDKARGKSDNVPSEEVVKKMKNYWRQLLNAKLITQRKFDNLTKAERGGLSELDKAGFIKRQLVETRQITKHVAQILDSRMNTKYDENDKLIREVKVITLKSKLVSDFRKDFQFYKVREINNYHHAHDAYLNAVVGTALIKKYPKLESEFVYGDYKVYDVRKMIAKSEQEIGKATAKYFFYSNIMNFFKTEITLANGEIRKRPLIETNGETGEIVWDKGRDFATVRKVLSMPQVNIVKKTEVQTGGFSKESILPKRNSDKLIARKKDWDPKKYGGFDSPTVAYSVLVVAKVEKGKSKKLKSVKELLGITIMERSSFEKNPIDFLEAKGYKEVKKDLIIKLPKYSLFELENGRKRMLASAGELQKGNELALPSKYVNFLYLASHYEKLKGSPEDNEQKQLFVEQHKHYLDEIIEQISEFSKRVILADANLDKVLSAYNKHRDKPIREQAENIIHLFTLTNLGAPAAFKYFDTTIDRKRYTSTKEVLDATLIHQSITGLYETRIDLSQLGGDGGGGSEAAAKGGGLEHLPPPPEVSQFPLNPERLQALTDLVSRALEAKHIEPYQGPGNNPIFPVKKPNGKWRFIHDLRATNSVTRDLASPSPGPPDLTSPPQGLPHLRTIDLTDAFFQIPLPTIFQPYFAFTLPQPNNYGPGTRYSWRVLPQGFKNSPTLFQQQLSHILTPVRKTFPNSLIIQYMDDILLASPAPGELAALTDKVTNALTKEGLPLSPEKTQATPGPIHFLGQVISQDCITYETLPSINVKSTWSLAELQSMLGELQWVSKGTPVLRSSLHQLYLALRGHRDPRDTIKLTSIQVQALRTIQKALTLNCRSRLVNQLPILALIMLRPTGTTAVLFQTKQKWPLVWLHTPHPATSLRPWGQLLANAVIILDKYSLQHYGQVCKSFHHNISNQALTYYLHTSDQSSVAILLQHSHRFHNLGAQPSGPWRSLLQMPQIFQNIDVLRPPFTISPVVINHAPCLFSDGSASKAAFIIWDRQVIHQQVLSLPSTCSAQAGELFGLLAGLQKSQPWVALNIFLDSKFLIGHLRRMAWGAFPGPSTQCELHTQLLPLLQGKTVYVHHVRSHTLLQDPISRLNEATDALMLAPLLPLAGKRTADGSEFEKRTADGSEFESPKKKAKVE

SEQ ID NO: 1517 - protein, 2009 aa, synthetic construct
MPAAKRVKLDGGDKKYSIGLDIGTNSVGWAVITDEYKVPSKKFKVLGNTDRHSIKKNLIGALLFDSGETAEATRLKRTARRRYTRRKNRICYLQEIFSNEMAKVDDSFFHRLEESFLVEEDKKHERHPIFGNIVDEVAYHEKYPTIYHLRKKLVDSTDKADLRLIYLALAHMIKFRGHFLIEGDLNPDNSDVDKLFIQLVQTYNQLFEENPINASGVDAKAILSARLSKSRRLENLIAQLPGEKKNGLFGNLIALSLGLTPNFKSNFDLAEDAKLQLSKDTYDDDLDNLLAQIGDQYADLFLAAKNLSDAILLSDILRVNTEITKAPLSASMIKRYDEHHQDLTLLKALVRQQLPEKYKEIFFDQSKNGYAGYIDGGASQEEFYKFIKPILEKMDGTEELLVKLNREDLLRKQRTFDNGSIPHQIHLGELHAILRRQEDFYPFLKDNREKIEKILTFRIPYYVGPLARGNSRFAWMTRKSEETITPWNFEEVVDKGASAQSFIERMTNFDKNLPNEKVLPKHSLLYEYFTVYNELTKVKYVTEGMRKPAFLSGEQKKAIVDLLFKTNRKVTVKQLKEDYFKKIECFDSVEISGVEDRFNASLGTYHDLLKIIKDKDFLDNEENEDILEDIVLTLTLFEDREMIEERLKTYAHLFDDKVMKQLKRRRYTGWGRLSRKLINGIRDKQSGKTILDFLKSDGFANRNFMQLIHDDSLTFKEDIQKAQVSGQGDSLHEHIANLAGSPAIKKGILQTVKVVDELVKVMGRHKPENIVIEMARENQTTQKGQKNSRERMKRIEEGIKELGSQILKEHPVENTQLQNEKLYLYYLQNGRDMYVDQELDINRLSDYDVDHIVPQSFLKDDSIDNKVLTRSDKARGKSDNVPSEEVVKKMKNYWRQLLNAKLITQRKFDNLTKAERGGLSELDKAGFIKRQLVETRQITKHVAQILDSRMNTKYDENDKLIREVKVITLKSKLVSDFRKDFQFYKVREINNYHHAHDAYLNAVVGTALIKKYPKLESEFVYGDYKVYDVRKMIAKSEQEIGKATAKYFFYSNIMNFFKTEITLANGEIRKRPLIETNGETGEIVWDKGRDFATVRKVLSMPQVNIVKKTEVQTGGFSKESILPKRNSDKLIARKKDWDPKKYGGFDSPTVAYSVLVVAKVEKGKSKKLKSVKELLGITIMERSSFEKNPIDFLEAKGYKEVKKDLIIKLPKYSLFELENGRKRMLASAGELQKGNELALPSKYVNFLYLASHYEKLKGSPEDNEQKQLFVEQHKHYLDEIIEQISEFSKRVILADANLDKVLSAYNKHRDKPIREQAENIIHLFTLTNLGAPAAFKYFDTTIDRKRYTSTKEVLDATLIHQSITGLYETRIDLSQLGGDGGPAPEAAAKGSSGGGLEHLPPPPEVSQFPLNPERLQALTDLVSRALEAKHIEPYQGPGNNPIFPVKKPNGKWRFIHDLRATNSVTRDLASPSPGPPDLTSPPQGLPHLRTIDLTDAFFQIPLPTIFQPYFAFTLPQPNNYGPGTRYSWRVLPQGFKNSPTLFQQQLSHILTPVRKTFPNSLIIQYMDDILLASPAPGELAALTDKVTNALTKEGLPLSPEKTQATPGPIHFLGQVISQDCITYETLPSINVKSTWSLAELQSMLGELQWVSKGTPVLRSSLHQLYLALRGHRDPRDTIKLTSIQVQALRTIQKALTLNCRSRLVNQLPILALIMLRPTGTTAVLFQTKQKWPLVWLHTPHPATSLRPWGQLLANAVIILDKYSLQHYGQVCKSFHHNISNQALTYYLHTSDQSSVAILLQHSHRFHNLGAQPSGPWRSLLQMPQIFQNIDVLRPPFTISPVVINHAPCLFSDGSASKAAFIIWDRQVIHQQVLSLPSTCSAQAGELFGLLAGLQKSQPWVALNIFLDSKFLIGHLRRMAWGAFPGPSTQCELHTQLLPLLQGKTVYVHHVRSHTLLQDPISRLNEATDALMLAPLLPLAGKRTADGSEFEKRTADGSEFESPKKKAKVE

SEQ ID NO: 1518 - protein, 2007 aa, synthetic construct
MPAAKRVKLDGGDKKYSIGLDIGTNSVGWAVITDEYKVPSKKFKVLGNTDRHSIKKNLIGALLFDSGETAEATRLKRTARRRYTRRKNRICYLQEIFSNEMAKVDDSFFHRLEESFLVEEDKKHERHPIFGNIVDEVAYHEKYPTIYHLRKKLVDSTDKADLRLIYLALAHMIKFRGHFLIEGDLNPDNSDVDKLFIQLVQTYNQLFEENPINASGVDAKAILSARLSKSRRLENLIAQLPGEKKNGLFGNLIALSLGLTPNFKSNFDLAEDAKLQLSKDTYDDDLDNLLAQIGDQYADLFLAAKNLSDAILLSDILRVNTEITKAPLSASMIKRYDEHHQDLTLLKALVRQQLPEKYKEIFFDQSKNGYAGYIDGGASQEEFYKFIKPILEKMDGTEELLVKLNREDLLRKQRTFDNGSIPHQIHLGELHAILRRQEDFYPFLKDNREKIEKILTFRIPYYVGPLARGNSRFAWMTRKSEETITPWNFEEVVDKGASAQSFIERMTNFDKNLPNEKVLPKHSLLYEYFTVYNELTKVKYVTEGMRKPAFLSGEQKKAIVDLLFKTNRKVTVKQLKEDYFKKIECFDSVEISGVEDRFNASLGTYHDLLKIIKDKDFLDNEENEDILEDIVLTLTLFEDREMIEERLKTYAHLFDDKVMKQLKRRRYTGWGRLSRKLINGIRDKQSGKTILDFLKSDGFANRNFMQLIHDDSLTFKEDIQKAQVSGQGDSLHEHIANLAGSPAIKKGILQTVKVVDELVKVMGRHKPENIVIEMARENQTTQKGQKNSRERMKRIEEGIKELGSQILKEHPVENTQLQNEKLYLYYLQNGRDMYVDQELDINRLSDYDVDHIVPQSFLKDDSIDNKVLTRSDKARGKSDNVPSEEVVKKMKNYWRQLLNAKLITQRKFDNLTKAERGGLSELDKAGFIKRQLVETRQITKHVAQILDSRMNTKYDENDKLIREVKVITLKSKLVSDFRKDFQFYKVREINNYHHAHDAYLNAVVGTALIKKYPKLESEFVYGDYKVYDVRKMIAKSEQEIGKATAKYFFYSNIMNFFKTEITLANGEIRKRPLIETNGETGEIVWDKGRDFATVRKVLSMPQVNIVKKTEVQTGGFSKESILPKRNSDKLIARKKDWDPKKYGGFDSPTVAYSVLVVAKVEKGKSKKLKSVKELLGITIMERSSFEKNPIDFLEAKGYKEVKKDLIIKLPKYSLFELENGRKRMLASAGELQKGNELALPSKYVNFLYLASHYEKLKGSPEDNEQKQLFVEQHKHYLDEIIEQISEFSKRVILADANLDKVLSAYNKHRDKPIREQAENIIHLFTLTNLGAPAAFKYFDTTIDRKRYTSTKEVLDATLIHQSITGLYETRIDLSQLGGDGGGGGGSSGGSGGGLEHLPPPPEVSQFPLNPERLQALTDLVSRALEAKHIEPYQGPGNNPIFPVKKPNGKWRFIHDLRATNSLTRDLASPSPGPPDLTSLPQDLPHLRTIDLTDAFFQIPLPAVFQPYFAFTLPQPNNHGPGTRYSWRVLPQGFKNSPTLFEQQLSHILAPVRKAFPNSLIIQYMDDILLASPALRELTALTDKVTNALTKEGLPMSLEKTQATPGSIHFLGQVISPDCITYETLPSIHVKSIWSLAELQSMLGELQWVSKGTPVLRSSLHQLYLALRGHRDPRDTIELTSTQVQALKTIQKALALNCRSRLVSQLPILALIILRPTGTTAVLFQTKQKWPLVWLHTPHPATSLRPWGQLLANAIITLDKYSLQHYGQICKSFHHNISNQALTYYLHTSDQSSVAILLQHSHRFHNLGAQPSGPWRSLLQVPQIFQNIDVLRPPFIISPVVIDHAPCLFSDGATSKAAFILWDKQVIHQQVLPLPSTCSAQAGELFGLLAGLQKSKPWPALNIFLDSKFLIGHLRRMALGAFLGPSTQCDLHARLFPLLQGKTVYVHHVRSHTLLQDPISRLNEATDALMLAPLLPLAGKRTADGSEFEKRTADGSEFESPKKKAKVE

SEQ ID NO: 1519 - protein, 2007 aa, synthetic construct
MPAAKRVKLDGGDKKYSIGLDIGTNSVGWAVITDEYKVPSKKFKVLGNTDRHSIKKNLIGALLFDSGETAEATRLKRTARRRYTRRKNRICYLQEIFSNEMAKVDDSFFHRLEESFLVEEDKKHERHPIFGNIVDEVAYHEKYPTIYHLRKKLVDSTDKADLRLIYLALAHMIKFRGHFLIEGDLNPDNSDVDKLFIQLVQTYNQLFEENPINASGVDAKAILSARLSKSRRLENLIAQLPGEKKNGLFGNLIALSLGLTPNFKSNFDLAEDAKLQLSKDTYDDDLDNLLAQIGDQYADLFLAAKNLSDAILLSDILRVNTEITKAPLSASMIKRYDEHHQDLTLLKALVRQQLPEKYKEIFFDQSKNGYAGYIDGGASQEEFYKFIKPILEKMDGTEELLVKLNREDLLRKQRTFDNGSIPHQIHLGELHAILRRQEDFYPFLKDNREKIEKILTFRIPYYVGPLARGNSRFAWMTRKSEETITPWNFEEVVDKGASAQSFIERMTNFDKNLPNEKVLPKHSLLYEYFTVYNELTKVKYVTEGMRKPAFLSGEQKKAIVDLLFKTNRKVTVKQLKEDYFKKIECFDSVEISGVEDRFNASLGTYHDLLKIIKDKDFLDNEENEDILEDIVLTLTLFEDREMIEERLKTYAHLFDDKVMKQLKRRRYTGWGRLSRKLINGIRDKQSGKTILDFLKSDGFANRNFMQLIHDDSLTFKEDIQKAQVSGQGDSLHEHIANLAGSPAIKKGILQTVKVVDELVKVMGRHKPENIVIEMARENQTTQKGQKNSRERMKRIEEGIKELGSQILKEHPVENTQLQNEKLYLYYLQNGRDMYVDQELDINRLSDYDVDHIVPQSFLKDDSIDNKVLTRSDKARGKSDNVPSEEVVKKMKNYWRQLLNAKLITQRKFDNLTKAERGGLSELDKAGFIKRQLVETRQITKHVAQILDSRMNTKYDENDKLIREVKVITLKSKLVSDFRKDFQFYKVREINNYHHAHDAYLNAVVGTALIKKYPKLESEFVYGDYKVYDVRKMIAKSEQEIGKATAKYFFYSNIMNFFKTEITLANGEIRKRPLIETNGETGEIVWDKGRDFATVRKVLSMPQVNIVKKTEVQTGGFSKESILPKRNSDKLIARKKDWDPKKYGGFDSPTVAYSVLVVAKVEKGKSKKLKSVKELLGITIMERSSFEKNPIDFLEAKGYKEVKKDLIIKLPKYSLFELENGRKRMLASAGELQKGNELALPSKYVNFLYLASHYEKLKGSPEDNEQKQLFVEQHKHYLDEIIEQISEFSKRVILADANLDKVLSAYNKHRDKPIREQAENIIHLFTLTNLGAPAAFKYFDTTIDRKRYTSTKEVLDATLIHQSITGLYETRIDLSQLGGDGGGGGGSSPAPGGGLEHLPPPPEVSQFPLNPERLQALTDLVSRALEAKHIEPYQGPGNNPIFPVKKPNGKWRFIHDLRATNSLTRDLASPSPGPPDLTSLPQDLPHLRTIDLTDAFFQIPLPAVFQPYFAFTLPQPNNHGPGTRYSWRVLPQGFKNSPTLFQQQLSHILAPVRKAFPNSLIIQYMDDILLASPALRELTALTDKVTNALTKEGLPMSLEKTQATPGSIHFLGQVISPDCITYETLPSIHVKSIWSLAELQSMLGELQWVSKGTPVLRSSLHQLYLALRGHRDPRDTIELTSTQVQALKTIQKALALNCRSRLVSQLPILALIILRPTGTTAVLFQTKQKWPLVWLHTPHPATSLRPWGQLLANAIITLDKYSLQHYGQICKSFHHNISNQALTYYLHTSDQSSVAILLQHSHRFHNLGAQPSGPWRSLLQVPQIFQNIDVLRPPFIISPVVIDHAPCLFSDGATSKAAFILWDKQVIHQQVLPLPSTCSAQAGELFGLLAGLQKSKPWPALNIFLDSKFLIGHLRRMAWGAFLGPSTQCDLHARLFPLLQGKTVYVHHVRSHTLLQDPISRLNEATDALMLAPLLPLAGKRTADGSEFEKRTADGSEFESPKKKAKVE

SEQ ID NO: 1520 - protein, 2009 aa, synthetic construct
MPAAKRVKLDGGDKKYSIGLDIGTNSVGWAVITDEYKVPSKKFKVLGNTDRHSIKKNLIGALLFDSGETAEATRLKRTARRRYTRRKNRICYLQEIFSNEMAKVDDSFFHRLEESFLVEEDKKHERHPIFGNIVDEVAYHEKYPTIYHLRKKLVDSTDKADLRLIYLALAHMIKFRGHFLIEGDLNPDNSDVDKLFIQLVQTYNQLFEENPINASGVDAKAILSARLSKSRRLENLIAQLPGEKKNGLFGNLIALSLGLTPNFKSNFDLAEDAKLQLSKDTYDDDLDNLLAQIGDQYADLFLAAKNLSDAILLSDILRVNTEITKAPLSASMIKRYDEHHQDLTLLKALVRQQLPEKYKEIFFDQSKNGYAGYIDGGASQEEFYKFIKPILEKMDGTEELLVKLNREDLLRKQRTFDNGSIPHQIHLGELHAILRRQEDFYPFLKDNREKIEKILTFRIPYYVGPLARGNSRFAWMTRKSEETITPWNFEEVVDKGASAQSFIERMTNFDKNLPNEKVLPKHSLLYEYFTVYNELTKVKYVTEGMRKPAFLSGEQKKAIVDLLFKTNRKVTVKQLKEDYFKKIECFDSVEISGVEDRFNASLGTYHDLLKIIKDKDFLDNEENEDILEDIVLTLTLFEDREMIEERLKTYAHLFDDKVMKQLKRRRYTGWGRLSRKLINGIRDKQSGKTILDFLKSDGFANRNFMQLIHDDSLTFKEDIQKAQVSGQGDSLHEHIANLAGSPAIKKGILQTVKVVDELVKVMGRHKPENIVIEMARENQTTQKGQKNSRERMKRIEEGIKELGSQILKEHPVENTQLQNEKLYLYYLQNGRDMYVDQELDINRLSDYDVDHIVPQSFLKDDSIDNKVLTRSDKARGKSDNVPSEEVVKKMKNYWRQLLNAKLITQRKFDNLTKAERGGLSELDKAGFIKRQLVETRQITKHVAQILDSRMNTKYDENDKLIREVKVITLKSKLVSDFRKDFQFYKVREINNYHHAHDAYLNAVVGTALIKKYPKLESEFVYGDYKVYDVRKMIAKSEQEIGKATAKYFFYSNIMNFFKTEITLANGEIRKRPLIETNGETGEIVWDKGRDFATVRKVLSMPQVNIVKKTEVQTGGFSKESILPKRNSDKLIARKKDWDPKKYGGFDSPTVAYSVLVVAKVEKGKSKKLKSVKELLGITIMERSSFEKNPIDFLEAKGYKEVKKDLIIKLPKYSLFELENGRKRMLASAGELQKGNELALPSKYVNFLYLASHYEKLKGSPEDNEQKQLFVEQHKHYLDEIIEQISEFSKRVILADANLDKVLSAYNKHRDKPIREQAENIIHLFTLTNLGAPAAFKYFDTTIDRKRYTSTKEVLDATLIHQSITGLYETRIDLSQLGGDGGPAPEAAAKGGGGGGLEHLPPPPEVSQFPLNPERLQALTDLVSRALEAKHIEPYQGPGNNPIFPVKKPNGKWRFIHDLRATNSLTRDLASPSPGPPDLTSLPQDLPHLRTIDLTDAFFQIPLPAVFQPYFAFTLPQPNNHGPGTRYSWRVLPQGFKNSPTLFQQQLSHILAPVRKAFPNSLIIQYMDDILLASPALRELTALTDKVTNALTKEGLPMSLEKTQATPGSIHFLGQVISPDCITYETLPSIHVKSIWSLAELQSMLGELQWVSKGTPVLRSSLHQLYLALRGHRDPRDTIELTSTQVQALKTIQKALALNCRSRLVSQLPILALIILRPTGTTAVLFQTKQKWPLVWLHTPHPATSLRPWGQLLANAIITLDKYSLQHYGQICKSFHHNISNQALTYYLHTSDQSSVAILLQHSHRFHNLGAQPSGPWRSLLQVPQIFQNIDVLRPPFIISPVVIDHAPCLFSDGATSKAAFILWDKQVIHQQVLPLPSTCSAQAGELFGLLAGLQKSKPWPALNIFLDSKFLIGHLRRMAWGAFLGPSTQCDLHARLFPLLQGKTVYVHHVRSHTLLQDPISRLNEATDALMLAPLLPLAGKRTADGSEFEKRTADGSEFESPKKKAKVE

SEQ ID NO: 1521 - protein, 2023 aa, synthetic construct
MPAAKRVKLDGGDKKYSIGLDIGTNSVGWAVITDEYKVPSKKFKVLGNTDRHSIKKNLIGALLFDSGETAEATRLKRTARRRYTRRKNRICYLQEIFSNEMAKVDDSFFHRLEESFLVEEDKKHERHPIFGNIVDEVAYHEKYPTIYHLRKKLVDSTDKADLRLIYLALAHMIKFRGHFLIEGDLNPDNSDVDKLFIQLVQTYNQLFEENPINASGVDAKAILSARLSKSRRLENLIAQLPGEKKNGLFGNLIALSLGLTPNFKSNFDLAEDAKLQLSKDTYDDDLDNLLAQIGDQYADLFLAAKNLSDAILLSDILRVNTEITKAPLSASMIKRYDEHHQDLTLLKALVRQQLPEKYKEIFFDQSKNGYAGYIDGGASQEEFYKFIKPILEKMDGTEELLVKLNREDLLRKQRTFDNGSIPHQIHLGELHAILRRQEDFYPFLKDNREKIEKILTFRIPYYVGPLARGNSRFAWMTRKSEETITPWNFEEVVDKGASAQSFIERMTNFDKNLPNEKVLPKHSLLYEYFTVYNELTKVKYVTEGMRKPAFLSGEQKKAIVDLLFKTNRKVTVKQLKEDYFKKIECFDSVEISGVEDRFNASLGTYHDLLKIIKDKDFLDNEENEDILEDIVLTLTLFEDREMIEERLKTYAHLFDDKVMKQLKRRRYTGWGRLSRKLINGIRDKQSGKTILDFLKSDGFANRNFMQLIHDDSLTFKEDIQKAQVSGQGDSLHEHIANLAGSPAIKKGILQTVKVVDELVKVMGRHKPENIVIEMARENQTTQKGQKNSRERMKRIEEGIKELGSQILKEHPVENTQLQNEKLYLYYLQNGRDMYVDQELDINRLSDYDVDHIVPQSFLKDDSIDNKVLTRSDKARGKSDNVPSEEVVKKMKNYWRQLLNAKLITQRKFDNLTKAERGGLSELDKAGFIKRQLVETRQITKHVAQILDSRMNTKYDENDKLIREVKVITLKSKLVSDFRKDFQFYKVREINNYHHAHDAYLNAVVGTALIKKYPKLESEFVYGDYKVYDVRKMIAKSEQEIGKATAKYFFYSNIMNFFKTEITLANGEIRKRPLIETNGETGEIVWDKGRDFATVRKVLSMPQVNIVKKTEVQTGGFSKESILPKRNSDKLIARKKDWDPKKYGGFDSPTVAYSVLVVAKVEKGKSKKLKSVKELLGITIMERSSFEKNPIDFLEAKGYKEVKKDLIIKLPKYSLFELENGRKRMLASAGELQKGNELALPSKYVNFLYLASHYEKLKGSPEDNEQKQLFVEQHKHYLDEIIEQISEFSKRVILADANLDKVLSAYNKHRDKPIREQAENIIHLFTLTNLGAPAAFKYFDTTIDRKRYTSTKEVLDATLIHQSITGLYETRIDLSQLGGDGGGGGGSGGGGSGGGGSGGGGSGGGGSGGGLEHLPPPPEVSQFPLNPERLQALTDLVSRALEAKHIEPYQGPGNNPIFPVKKPNGKWRFIHDLRATNSLTRDLASPSPGPPDLTSLPQDLPHLRTIDLTDAFFQIPLPAVFQPYFAFTLPQPNNHGPGTRYSWRVLPQGFKNSPTLFQQQLSHILAPVRKAFPNSLIIQYMDDILLASPALRELTALTDKVTNALTKEGLPMSLEKTQATPGSIHFLGQVISPDCITYETLPSIHVKSIWSLAELQSMLGELQWVSKGTPVLRSSLHQLYLALRGHRDPRDTIELTSTQVQALKTIQKALALNCRSRLVSQLPILALIILRPTGTTAVLFQTKQKWPLVWLHTPHPATSLRPWGQLLANAIITLDKYSLQHYGQICKSFHHNISNQALTYYLHTSDQSSVAILLQHSHRFHNLGAQPSGPWRSLLQVPQIFQNIDVLRPPFIISPVVIDHAPCLFSDGATSKAAFILWDKQVIHQQVLPLPSTCSAQAGELFGLLAGLQKSKPWPALNIFLDSKFLIGHLRRMAWGAFLGPSTQCDLHARLFPLLQGKTVYVHHVRSHTLLQDPISRLNEATDALMLAPLLPLAGKRTADGSEFEKRTADGSEFESPKKKAKVE

SEQ ID NO: 1522 - protein, 2006 aa, synthetic construct
MPAAKRVKLDGGDKKYSIGLDIGTNSVGWAVITDEYKVPSKKFKVLGNTDRHSIKKNLIGALLFDSGETAEATRLKRTARRRYTRRKNRICYLQEIFSNEMAKVDDSFFHRLEESFLVEEDKKHERHPIFGNIVDEVAYHEKYPTIYHLRKKLVDSTDKADLRLIYLALAHMIKFRGHFLIEGDLNPDNSDVDKLFIQLVQTYNQLFEENPINASGVDAKAILSARLSKSRRLENLIAQLPGEKKNGLFGNLIALSLGLTPNFKSNFDLAEDAKLQLSKDTYDDDLDNLLAQIGDQYADLFLAAKNLSDAILLSDILRVNTEITKAPLSASMIKRYDEHHQDLTLLKALVRQQLPEKYKEIFFDQSKNGYAGYIDGGASQEEFYKFIKPILEKMDGTEELLVKLNREDLLRKQRTFDNGSIPHQIHLGELHAILRRQEDFYPFLKDNREKIEKILTFRIPYYVGPLARGNSRFAWMTRKSEETITPWNFEEVVDKGASAQSFIERMTNFDKNLPNEKVLPKHSLLYEYFTVYNELTKVKYVTEGMRKPAFLSGEQKKAIVDLLFKTNRKVTVKQLKEDYFKKIECFDSVEISGVEDRFNASLGTYHDLLKIIKDKDFLDNEENEDILEDIVLTLTLFEDREMIEERLKTYAHLFDDKVMKQLKRRRYTGWGRLSRKLINGIRDKQSGKTILDFLKSDGFANRNFMQLIHDDSLTFKEDIQKAQVSGQGDSLHEHIANLAGSPAIKKGILQTVKVVDELVKVMGRHKPENIVIEMARENQTTQKGQKNSRERMKRIEEGIKELGSQILKEHPVENTQLQNEKLYLYYLQNGRDMYVDQELDINRLSDYDVDHIVPQSFLKDDSIDNKVLTRSDKARGKSDNVPSEEVVKKMKNYWRQLLNAKLITQRKFDNLTKAERGGLSELDKAGFIKRQLVETRQITKHVAQILDSRMNTKYDENDKLIREVKVITLKSKLVSDFRKDFQFYKVREINNYHHAHDAYLNAVVGTALIKKYPKLESEFVYGDYKVYDVRKMIAKSEQEIGKATAKYFFYSNIMNFFKTEITLANGEIRKRPLIETNGETGEIVWDKGRDFATVRKVLSMPQVNIVKKTEVQTGGFSKESILPKRNSDKLIARKKDWDPKKYGGFDSPTVAYSVLVVAKVEKGKSKKLKSVKELLGITIMERSSFEKNPIDFLEAKGYKEVKKDLIIKLPKYSLFELENGRKRMLASAGELQKGNELALPSKYVNFLYLASHYEKLKGSPEDNEQKQLFVEQHKHYLDEIIEQISEFSKRVILADANLDKVLSAYNKHRDKPIREQAENIIHLFTLTNLGAPAAFKYFDTTIDRKRYTSTKEVLDATLIHQSITGLYETRIDLSQLGGDGGEAAAKGGSGGGLEHLPPPPEVSQFPLNPERLQALTDLVSRALEAKHIEPYQGPGNNPIFPVKKPNGKWRFIHDLRATNSLTRDLASPSPGPPDLTSLPQDLPHLRTIDLTDAFFQIPLPAVFQPYFAFTLPQPNNHGPGTRYSWRVLPQGFKNSPTLFQQQLSHILAPVRKAFPNSLIIQYMDDILLASPALRELTALTDKVTNALTKEGLPMSLEKTQATPGSIHFLGQVISPDCITYETLPSIHVKSIWSLAELQSMLGELQWVSKGTPVLRSSLHQLYLALRGHRDPRDTIELTSTQVQALKTIQKALALNCRSRLVSQLPILALIILRPTGTTAVLFQTKQKWPLVWLHTPHPATSLRPWGQLLANAIITLDKYSLQHYGQICKSFHHNISNQALTYYLHTSDQSSVAILLQHSHRFHNLGAQPSGPWRSLLQVPQIFQNIDVLRPPFIISPVVIDHAPCLFSDGATSKAAFILWDKQVIHQQVLPLPSTCSAQAGELFGLLAGLQKSKPWPALNIFLDSKFLIGHLRRMAWGAFLGPSTQCDLHARLFPLLQGKTVYVHHVRSHTLLQDPISRLNEATDALMLAPLLPLAGKRTADGSEFEKRTADGSEFESPKKKAKVE

SEQ ID NO: 1523 - protein, 2007 aa, synthetic construct
MPAAKRVKLDGGDKKYSIGLDIGTNSVGWAVITDEYKVPSKKFKVLGNTDRHSIKKNLIGALLFDSGETAEATRLKRTARRRYTRRKNRICYLQEIFSNEMAKVDDSFFHRLEESFLVEEDKKHERHPIFGNIVDEVAYHEKYPTIYHLRKKLVDSTDKADLRLIYLALAHMIKFRGHFLIEGDLNPDNSDVDKLFIQLVQTYNQLFEENPINASGVDAKAILSARLSKSRRLENLIAQLPGEKKNGLFGNLIALSLGLTPNFKSNFDLAEDAKLQLSKDTYDDDLDNLLAQIGDQYADLFLAAKNLSDAILLSDILRVNTEITKAPLSASMIKRYDEHHQDLTLLKALVRQQLPEKYKEIFFDQSKNGYAGYIDGGASQEEFYKFIKPILEKMDGTEELLVKLNREDLLRKQRTFDNGSIPHQIHLGELHAILRRQEDFYPFLKDNREKIEKILTFRIPYYVGPLARGNSRFAWMTRKSEETITPWNFEEVVDKGASAQSFIERMTNFDKNLPNEKVLPKHSLLYEYFTVYNELTKVKYVTEGMRKPAFLSGEQKKAIVDLLFKTNRKVTVKQLKEDYFKKIECFDSVEISGVEDRFNASLGTYHDLLKIIKDKDFLDNEENEDILEDIVLTLTLFEDREMIEERLKTYAHLFDDKVMKQLKRRRYTGWGRLSRKLINGIRDKQSGKTILDFLKSDGFANRNFMQLIHDDSLTFKEDIQKAQVSGQGDSLHEHIANLAGSPAIKKGILQTVKVVDELVKVMGRHKPENIVIEMARENQTTQKGQKNSRERMKRIEEGIKELGSQILKEHPVENTQLQNEKLYLYYLQNGRDMYVDQELDINRLSDYDVDHIVPQSFLKDDSIDNKVLTRSDKARGKSDNVPSEEVVKKMKNYWRQLLNAKLITQRKFDNLTKAERGGLSELDKAGFIKRQLVETRQITKHVAQILDSRMNTKYDENDKLIREVKVITLKSKLVSDFRKDFQFYKVREINNYHHAHDAYLNAVVGTALIKKYPKLESEFVYGDYKVYDVRKMIAKSEQEIGKATAKYFFYSNIMNFFKTEITLANGEIRKRPLIETNGETGEIVWDKGRDFATVRKVLSMPQVNIVKKTEVQTGGFSKESILPKRNSDKLIARKKDWDPKKYGGFDSPTVAYSVLVVAKVEKGKSKKLKSVKELLGITIMERSSFEKNPIDFLEAKGYKEVKKDLIIKLPKYSLFELENGRKRMLASAGELQKGNELALPSKYVNFLYLASHYEKLKGSPEDNEQKQLFVEQHKHYLDEIIEQISEFSKRVILADANLDKVLSAYNKHRDKPIREQAENIIHLFTLTNLGAPAAFKYFDTTIDRKRYTSTKEVLDATLIHQSITGLYETRIDLSQLGGDGGGGGGSSGGSGGGLEHLPPPPEVSQFPLNPERLQALTDLVSRALEAKHIEPYQGPGNNPIFPVKKPNGKWRFIHDLRATNSLTRDLASPSPGPPDLTSLPQDLPHLRTIDLTDAFFQIPLPAVFQPYFAFTLPQPNNHGPGTRYSWRVLPQGFKNSPTLFQQQLSHILAPVRKAFPNSLIIQYMDDILLASPALRELTALTDKVTNALTKEGLPMSLEKTQATPGSIHFLGQVISPDCITYETLPSIHVKSIWSLAELQSMLGELQWVSKGTPVLRSSLHQLYLALRGHRDPRDTIELTSTQVQALKTIQKALALNCRSRLVSQLPILALIILRPTGTTAVLFQTKQKWPLVWLHTPHPATSLRPWGQLLANAIITLDKYSLQHYGQICKSFHHNISNQALTYYLHTSDQSSVAILLQHSHRFHNLGAQPSGPWRSLLQVPQIFQNIDVLRPPFIISPVVIDHAPCLFSDGATSKAAFILWDKQVIHQQVLPLPSTCSAQAGELFGLLAGLQKSKPWPALNIFLDSKFLIGHLRRMAWGAFLGPSTQCDLHARLFPLLQGKTVYVHHVRSHTLLQDPISRLNEATDALMLAPLLPLAGKRTADGSEFEKRTADGSEFESPKKKAKVE

SEQ ID NO: 1524 - protein, 2009 aa, synthetic construct
MPAAKRVKLDGGDKKYSIGLDIGTNSVGWAVITDEYKVPSKKFKVLGNTDRHSIKKNLIGALLFDSGETAEATRLKRTARRRYTRRKNRICYLQEIFSNEMAKVDDSFFHRLEESFLVEEDKKHERHPIFGNIVDEVAYHEKYPTIYHLRKKLVDSTDKADLRLIYLALAHMIKFRGHFLIEGDLNPDNSDVDKLFIQLVQTYNQLFEENPINASGVDAKAILSARLSKSRRLENLIAQLPGEKKNGLFGNLIALSLGLTPNFKSNFDLAEDAKLQLSKDTYDDDLDNLLAQIGDQYADLFLAAKNLSDAILLSDILRVNTEITKAPLSASMIKRYDEHHQDLTLLKALVRQQLPEKYKEIFFDQSKNGYAGYIDGGASQEEFYKFIKPILEKMDGTEELLVKLNREDLLRKQRTFDNGSIPHQIHLGELHAILRRQEDFYPFLKDNREKIEKILTFRIPYYVGPLARGNSRFAWMTRKSEETITPWNFEEVVDKGASAQSFIERMTNFDKNLPNEKVLPKHSLLYEYFTVYNELTKVKYVTEGMRKPAFLSGEQKKAIVDLLFKTNRKVTVKQLKEDYFKKIECFDSVEISGVEDRFNASLGTYHDLLKIIKDKDFLDNEENEDILEDIVLTLTLFEDREMIEERLKTYAHLFDDKVMKQLKRRRYTGWGRLSRKLINGIRDKQSGKTILDFLKSDGFANRNFMQLIHDDSLTFKEDIQKAQVSGQGDSLHEHIANLAGSPAIKKGILQTVKVVDELVKVMGRHKPENIVIEMARENQTTQKGQKNSRERMKRIEEGIKELGSQILKEHPVENTQLQNEKLYLYYLQNGRDMYVDQELDINRLSDYDVDHIVPQSFLKDDSIDNKVLTRSDKARGKSDNVPSEEVVKKMKNYWRQLLNAKLITQRKFDNLTKAERGGLSELDKAGFIKRQLVETRQITKHVAQILDSRMNTKYDENDKLIREVKVITLKSKLVSDFRKDFQFYKVREINNYHHAHDAYLNAVVGTALIKKYPKLESEFVYGDYKVYDVRKMIAKSEQEIGKATAKYFFYSNIMNFFKTEITLANGEIRKRPLIETNGETGEIVWDKGRDFATVRKVLSMPQVNIVKKTEVQTGGFSKESILPKRNSDKLIARKKDWDPKKYGGFDSPTVAYSVLVVAKVEKGKSKKLKSVKELLGITIMERSSFEKNPIDFLEAKGYKEVKKDLIIKLPKYSLFELENGRKRMLASAGELQKGNELALPSKYVNFLYLASHYEKLKGSPEDNEQKQLFVEQHKHYLDEIIEQISEFSKRVILADANLDKVLSAYNKHRDKPIREQAENIIHLFTLTNLGAPAAFKYFDTTIDRKRYTSTKEVLDATLIHQSITGLYETRIDLSQLGGDGGEAAAKGGSGGGGGGLEHLPPPPEVSQFPLNPERLQALTDLVSRALEAKHIEPYQGPGNNPIFPVKKPNGKWRFIHDLRATNSLTRDLASPSPGPPDLTSLPQDLPHLRTIDLTDAFFQIPLPAVFQPYFAFTLPQPNNHGPGTRYSWRVLPQGFKNSPTLFQQQLSHILAPVRKAFPNSLIIQYMDDILLASPALRELTALTDKVTNALTKEGLPMSLEKTQATPGSIHFLGQVISPDCITYETLPSIHVKSIWSLAELQSMLGELQWVSKGTPVLRSSLHQLYLALRGHRDPRDTIELTSTQVQALKTIQKALALNCRSRLVSQLPILALIILRPTGTTAVLFQTKQKWPLVWLHTPHPATSLRPWGQLLANAIITLDKYSLQHYGQICKSFHHNISNQALTYYLHTSDQSSVAILLQHSHRFHNLGAQPSGPWRSLLQVPQIFQNIDVLRPPFIISPVVIDHAPCLFSDGATSKAAFILWDKQVIHQQVLPLPSTCSAQAGELFGLLAGLQKSKPWPALNIFLDSKFLIGHLRRMAWGAFLGPSTQCDLHARLFPLLQGKTVYVHHVRSHTLLQDPISRLNEATDALMLAPLLPLAGKRTADGSEFEKRTADGSEFESPKKKAKVE

SEQ ID NO: 1525 - protein, 2007 aa, synthetic construct
MPAAKRVKLDGGDKKYSIGLDIGTNSVGWAVITDEYKVPSKKFKVLGNTDRHSIKKNLIGALLFDSGETAEATRLKRTARRRYTRRKNRICYLQEIFSNEMAKVDDSFFHRLEESFLVEEDKKHERHPIFGNIVDEVAYHEKYPTIYHLRKKLVDSTDKADLRLIYLALAHMIKFRGHFLIEGDLNPDNSDVDKLFIQLVQTYNQLFEENPINASGVDAKAILSARLSKSRRLENLIAQLPGEKKNGLFGNLIALSLGLTPNFKSNFDLAEDAKLQLSKDTYDDDLDNLLAQIGDQYADLFLAAKNLSDAILLSDILRVNTEITKAPLSASMIKRYDEHHQDLTLLKALVRQQLPEKYKEIFFDQSKNGYAGYIDGGASQEEFYKFIKPILEKMDGTEELLVKLNREDLLRKQRTFDNGSIPHQIHLGELHAILRRQEDFYPFLKDNREKIEKILTFRIPYYVGPLARGNSRFAWMTRKSEETITPWNFEEVVDKGASAQSFIERMTNFDKNLPNEKVLPKHSLLYEYFTVYNELTKVKYVTEGMRKPAFLSGEQKKAIVDLLFKTNRKVTVKQLKEDYFKKIECFDSVEISGVEDRFNASLGTYHDLLKIIKDKDFLDNEENEDILEDIVLTLTLFEDREMIEERLKTYAHLFDDKVMKQLKRRRYTGWGRLSRKLINGIRDKQSGKTILDFLKSDGFANRNFMQLIHDDSLTFKEDIQKAQVSGQGDSLHEHIANLAGSPAIKKGILQTVKVVDELVKVMGRHKPENIVIEMARENQTTQKGQKNSRERMKRIEEGIKELGSQILKEHPVENTQLQNEKLYLYYLQNGRDMYVDQELDINRLSDYDVDHIVPQSFLKDDSIDNKVLTRSDKARGKSDNVPSEEVVKKMKNYWRQLLNAKLITQRKFDNLTKAERGGLSELDKAGFIKRQLVETRQITKHVAQILDSRMNTKYDENDKLIREVKVITLKSKLVSDFRKDFQFYKVREINNYHHAHDAYLNAVVGTALIKKYPKLESEFVYGDYKVYDVRKMIAKSEQEIGKATAKYFFYSNIMNFFKTEITLANGEIRKRPLIETNGETGEIVWDKGRDFATVRKVLSMPQVNIVKKTEVQTGGFSKESILPKRNSDKLIARKKDWDPKKYGGFDSPTVAYSVLVVAKVEKGKSKKLKSVKELLGITIMERSSFEKNPIDFLEAKGYKEVKKDLIIKLPKYSLFELENGRKRMLASAGELQKGNELALPSKYVNFLYLASHYEKLKGSPEDNEQKQLFVEQHKHYLDEIIEQISEFSKRVILADANLDKVLSAYNKHRDKPIREQAENIIHLFTLTNLGAPAAFKYFDTTIDRKRYTSTKEVLDATLIHQSITGLYETRIDLSQLGGDGGGSSPAPGGGGGGLEHLPPPPEVSQFPLNPERLQALTDLVSRALEAKHIEPYQGPGNNPIFPVKKPNGKWRFIHDLRATNSLTRDLASPSPGPPDLTSLPQDLPHLRTIDLTDAFFQIPLPAVFQPYFAFTLPQPNNHGPGTRYSWRVLPQGFKNSPTLFQQQLSHILAPVRKAFPNSLIIQYMDDILLASPALRELTALTDKVTNALTKEGLPMSLEKTQATPGSIHFLGQVISPDCITYETLPSIHVKSIWSLAELQSMLGELQWVSKGTPVLRSSLHQLYLALRGHRDPRDTIELTSTQVQALKTIQKALALNCRSRLVSQLPILALIILRPTGTTAVLFQTKQKWPLVWLHTPHPATSLRPWGQLLANAIITLDKYSLQHYGQICKSFHHNISNQALTYYLHTSDQSSVAILLQHSHRFHNLGAQPSGPWRSLLQVPQIFQNIDVLRPPFIISPVVIDHAPCLFSDGATSKAAFILWDKQVIHQQVLPLPSTCSAQAGELFGLLAGLQKSKPWPALNIFLDSKFLIGHLRRMAWGAFLGPSTQCDLHARLFPLLQGKTVYVHHVRSHTLLQDPISRLNEATDALMLAPLLPLAGKRTADGSEFEKRTADGSEFESPKKKAKVE

SEQ ID NO: 1526 - protein, 2009 aa, synthetic construct
MPAAKRVKLDGGDKKYSIGLDIGTNSVGWAVITDEYKVPSKKFKVLGNTDRHSIKKNLIGALLFDSGETAEATRLKRTARRRYTRRKNRICYLQEIFSNEMAKVDDSFFHRLEESFLVEEDKKHERHPIFGNIVDEVAYHEKYPTIYHLRKKLVDSTDKADLRLIYLALAHMIKFRGHFLIEGDLNPDNSDVDKLFIQLVQTYNQLFEENPINASGVDAKAILSARLSKSRRLENLIAQLPGEKKNGLFGNLIALSLGLTPNFKSNFDLAEDAKLQLSKDTYDDDLDNLLAQIGDQYADLFLAAKNLSDAILLSDILRVNTEITKAPLSASMIKRYDEHHQDLTLLKALVRQQLPEKYKEIFFDQSKNGYAGYIDGGASQEEFYKFIKPILEKMDGTEELLVKLNREDLLRKQRTFDNGSIPHQIHLGELHAILRRQEDFYPFLKDNREKIEKILTFRIPYYVGPLARGNSRFAWMTRKSEETITPWNFEEVVDKGASAQSFIERMTNFDKNLPNEKVLPKHSLLYEYFTVYNELTKVKYVTEGMRKPAFLSGEQKKAIVDLLFKTNRKVTVKQLKEDYFKKIECFDSVEISGVEDRFNASLGTYHDLLKIIKDKDFLDNEENEDILEDIVLTLTLFEDREMIEERLKTYAHLFDDKVMKQLKRRRYTGWGRLSRKLINGIRDKQSGKTILDFLKSDGFANRNFMQLIHDDSLTFKEDIQKAQVSGQGDSLHEHIANLAGSPAIKKGILQTVKVVDELVKVMGRHKPENIVIEMARENQTTQKGQKNSRERMKRIEEGIKELGSQILKEHPVENTQLQNEKLYLYYLQNGRDMYVDQELDINRLSDYDVDHIVPQSFLKDDSIDNKVLTRSDKARGKSDNVPSEEVVKKMKNYWRQLLNAKLITQRKFDNLTKAERGGLSELDKAGFIKRQLVETRQITKHVAQILDSRMNTKYDENDKLIREVKVITLKSKLVSDFRKDFQFYKVREINNYHHAHDAYLNAVVGTALIKKYPKLESEFVYGDYKVYDVRKMIAKSEQEIGKATAKYFFYSNIMNFFKTEITLANGEIRKRPLIETNGETGEIVWDKGRDFATVRKVLSMPQVNIVKKTEVQTGGFSKESILPKRNSDKLIARKKDWDPKKYGGFDSPTVAYSVLVVAKVEKGKSKKLKSVKELLGITIMERSSFEKNPIDFLEAKGYKEVKKDLIIKLPKYSLFELENGRKRMLASAGELQKGNELALPSKYVNFLYLASHYEKLKGSPEDNEQKQLFVEQHKHYLDEIIEQISEFSKRVILADANLDKVLSAYNKHRDKPIREQAENIIHLFTLTNLGAPAAFKYFDTTIDRKRYTSTKEVLDATLIHQSITGLYETRIDLSQLGGDGGEAAAKGGGGSSGGGLEHLPPPPEVSQFPLNPERLQALTDLVSRALEAKHIEPYQGPGNNPIFPVKKPNGKWRFIHDLRATNSLTRDLASPSPGPPDLTSLPQDLPHLRTIDLTDAFFQIPLPAVFQPYFAFTLPQPNNHGPGTRYSWRVLPQGFKNSPTLFQQQLSHILAPVRKAFPNSLIIQYMDDILLASPALRELTALTDKVTNALTKEGLPMSLEKTQATPGSIHFLGQVISPDCITYETLPSIHVKSIWSLAELQSMLGELQWVSKGTPVLRSSLHQLYLALRGHRDPRDTIELTSTQVQALKTIQKALALNCRSRLVSQLPILALIILRPTGTTAVLFQTKQKWPLVWLHTPHPATSLRPWGQLLANAIITLDKYSLQHYGQICKSFHHNISNQALTYYLHTSDQSSVAILLQHSHRFHNLGAQPSGPWRSLLQVPQIFQNIDVLRPPFIISPVVIDHAPCLFSDGATSKAAFILWDKQVIHQQVLPLPSTCSAQAGELFGLLAGLQKSKPWPALNIFLDSKFLIGHLRRMAWGAFLGPSTQCDLHARLFPLLQGKTVYVHHVRSHTLLQDPISRLNEATDALMLAPLLPLAGKRTADGSEFEKRTADGSEFESPKKKAKVE

SEQ ID NO: 1527 - protein, 2007 aa, synthetic construct
MPAAKRVKLDGGDKKYSIGLDIGTNSVGWAVITDEYKVPSKKFKVLGNTDRHSIKKNLIGALLFDSGETAEATRLKRTARRRYTRRKNRICYLQEIFSNEMAKVDDSFFHRLEESFLVEEDKKHERHPIFGNIVDEVAYHEKYPTIYHLRKKLVDSTDKADLRLIYLALAHMIKFRGHFLIEGDLNPDNSDVDKLFIQLVQTYNQLFEENPINASGVDAKAILSARLSKSRRLENLIAQLPGEKKNGLFGNLIALSLGLTPNFKSNFDLAEDAKLQLSKDTYDDDLDNLLAQIGDQYADLFLAAKNLSDAILLSDILRVNTEITKAPLSASMIKRYDEHHQDLTLLKALVRQQLPEKYKEIFFDQSKNGYAGYIDGGASQEEFYKFIKPILEKMDGTEELLVKLNREDLLRKQRTFDNGSIPHQIHLGELHAILRRQEDFYPFLKDNREKIEKILTFRIPYYVGPLARGNSRFAWMTRKSEETITPWNFEEVVDKGASAQSFIERMTNFDKNLPNEKVLPKHSLLYEYFTVYNELTKVKYVTEGMRKPAFLSGEQKKAIVDLLFKTNRKVTVKQLKEDYFKKIECFDSVEISGVEDRFNASLGTYHDLLKIIKDKDFLDNEENEDILEDIVLTLTLFEDREMIEERLKTYAHLFDDKVMKQLKRRRYTGWGRLSRKLINGIRDKQSGKTILDFLKSDGFANRNFMQLIHDDSLTFKEDIQKAQVSGQGDSLHEHIANLAGSPAIKKGILQTVKVVDELVKVMGRHKPENIVIEMARENQTTQKGQKNSRERMKRIEEGIKELGSQILKEHPVENTQLQNEKLYLYYLQNGRDMYVDQELDINRLSDYDVDHIVPQSFLKDDSIDNKVLTRSDKARGKSDNVPSEEVVKKMKNYWRQLLNAKLITQRKFDNLTKAERGGLSELDKAGFIKRQLVETRQITKHVAQILDSRMNTKYDENDKLIREVKVITLKSKLVSDFRKDFQFYKVREINNYHHAHDAYLNAVVGTALIKKYPKLESEFVYGDYKVYDVRKMIAKSEQEIGKATAKYFFYSNIMNFFKTEITLANGEIRKRPLIETNGETGEIVWDKGRDFATVRKVLSMPQVNIVKKTEVQTGGFSKESILPKRNSDKLIARKKDWDPKKYGGFDSPTVAYSVLVVAKVEKGKSKKLKSVKELLGITIMERSSFEKNPIDFLEAKGYKEVKKDLIIKLPKYSLFELENGRKRMLASAGELQKGNELALPSKYVNFLYLASHYEKLKGSPEDNEQKQLFVEQHKHYLDEIIEQISEFSKRVILADANLDKVLSAYNKHRDKPIREQAENIIHLFTLTNLGAPAAFKYFDTTIDRKRYTSTKEVLDATLIHQSITGLYETRIDLSQLGGDGGPAPGGGGSSGGGLEHLPPPPEVSQFPLNPERLQALTDLVSRALEAKHIEPYQGPGNNPIFPVKKPNGKWRFIHDLRATNSLTRDLASPSPGPPDLTSPPQDLPHLRTIDLTDAFFQIPLPAVFQPYFAFTLPQPNNHGPGTRYSWRVLPQGFKNSPTLFQQQLSHILAPVRKAFPNSLIIQYMDDILLASPALRELTALTDKVTNALTKEGLPMSLEKTQATPGSIHFLGQVISPDCITYETLPSIHVKSIWSLAELQSMLGELQWVSKGTPVLRSSLHQLYLALRGHRDPRDTIELTSTQVQALKTIQKALALNCRSRLVSQLPILALIILRPTGTTAVLFQTKQKWPLVWLHTPHPATSLRPWGQLLANAIITLDKYSLQHYGQICKSFHHNISNQALTYYLHTSDQSSVAILLQHSHRFHNLGAQPSGPWRSLLQVPQIFQNIDVLRPPFIISPVVIDHAPCLFSDGATSKAAFILWDKQVIHQQVLPLPSTCSAQAGELFGLLAGLQKSKPWPALNIFLDSKFLIGHLRRMAWGAFLGPSTQCDLHARLFPLLQGKTVYVHHVRSHTLLQDPISRLNEATDALMLAPLLPLAGKRTADGSEFEKRTADGSEFESPKKKAKVE

SEQ ID NO: 1528 - protein, 2028 aa, synthetic construct
MPAAKRVKLDGGDKKYSIGLDIGTNSVGWAVITDEYKVPSKKFKVLGNTDRHSIKKNLIGALLFDSGETAEATRLKRTARRRYTRRKNRICYLQEIFSNEMAKVDDSFFHRLEESFLVEEDKKHERHPIFGNIVDEVAYHEKYPTIYHLRKKLVDSTDKADLRLIYLALAHMIKFRGHFLIEGDLNPDNSDVDKLFIQLVQTYNQLFEENPINASGVDAKAILSARLSKSRRLENLIAQLPGEKKNGLFGNLIALSLGLTPNFKSNFDLAEDAKLQLSKDTYDDDLDNLLAQIGDQYADLFLAAKNLSDAILLSDILRVNTEITKAPLSASMIKRYDEHHQDLTLLKALVRQQLPEKYKEIFFDQSKNGYAGYIDGGASQEEFYKFIKPILEKMDGTEELLVKLNREDLLRKQRTFDNGSIPHQIHLGELHAILRRQEDFYPFLKDNREKIEKILTFRIPYYVGPLARGNSRFAWMTRKSEETITPWNFEEVVDKGASAQSFIERMTNFDKNLPNEKVLPKHSLLYEYFTVYNELTKVKYVTEGMRKPAFLSGEQKKAIVDLLFKTNRKVTVKQLKEDYFKKIECFDSVEISGVEDRFNASLGTYHDLLKIIKDKDFLDNEENEDILEDIVLTLTLFEDREMIEERLKTYAHLFDDKVMKQLKRRRYTGWGRLSRKLINGIRDKQSGKTILDFLKSDGFANRNFMQLIHDDSLTFKEDIQKAQVSGQGDSLHEHIANLAGSPAIKKGILQTVKVVDELVKVMGRHKPENIVIEMARENQTTQKGQKNSRERMKRIEEGIKELGSQILKEHPVENTQLQNEKLYLYYLQNGRDMYVDQELDINRLSDYDVDHIVPQSFLKDDSIDNKVLTRSDKARGKSDNVPSEEVVKKMKNYWRQLLNAKLITQRKFDNLTKAERGGLSELDKAGFIKRQLVETRQITKHVAQILDSRMNTKYDENDKLIREVKVITLKSKLVSDFRKDFQFYKVREINNYHHAHDAYLNAVVGTALIKKYPKLESEFVYGDYKVYDVRKMIAKSEQEIGKATAKYFFYSNIMNFFKTEITLANGEIRKRPLIETNGETGEIVWDKGRDFATVRKVLSMPQVNIVKKTEVQTGGFSKESILPKRNSDKLIARKKDWDPKKYGGFDSPTVAYSVLVVAKVEKGKSKKLKSVKELLGITIMERSSFEKNPIDFLEAKGYKEVKKDLIIKLPKYSLFELENGRKRMLASAGELQKGNELALPSKYVNFLYLASHYEKLKGSPEDNEQKQLFVEQHKHYLDEIIEQISEFSKRVILADANLDKVLSAYNKHRDKPIREQAENIIHLFTLTNLGAPAAFKYFDTTIDRKRYTSTKEVLDATLIHQSITGLYETRIDLSQLGGDGGGGGGSGGGGSGGGGSGGGGSGGGGSGGGGSGGGLEHLPPPPEVSQFPLNPERLQALTDLVSRALEAKHIEPYQGPGNNPIFPVKKPNGKWRFIHDLRATNSLTRDLASPSPGPPDLTSPPQDLPHLRTIDLTDAFFQIPLPAVFQPYFAFTLPQPNNHGPGTRYSWRVLPQGFKNSPTLFQQQLSHILAPVRKAFPNSLIIQYMDDILLASPALRELTALTDKVTNALTKEGLPMSLEKTQATPGSIHFLGQVISPDCITYETLPSIHVKSIWSLAELQSMLGELQWVSKGTPVLRSSLHQLYLALRGHRDPRDTIELTSTQVQALKTIQKALALNCRSRLVSQLPILALIILRPTGTTAVLFQTKQKWPLVWLHTPHPATSLRPWGQLLANAIITLDKYSLQHYGQICKSFHHNISNQALTYYLHTSDQSSVAILLQHSHRFHNLGAQPSGPWRSLLQVPQIFQNIDVLRPPFIISPVVIDHAPCLFSDGATSKAAFILWDKQVIHQQVLPLPSTCSAQAGELFGLLAGLQKSKPWPALNIFLDSKFLIGHLRRMAWGAFLGPSTQCDLHARLFPLLQGKTVYVHHVRSHTLLQDPISRLNEATDALMLAPLLPLAGKRTADGSEFEKRTADGSEFESPKKKAKVE

SEQ ID NO: 1529 - protein, 2007 aa, synthetic construct
MPAAKRVKLDGGDKKYSIGLDIGTNSVGWAVITDEYKVPSKKFKVLGNTDRHSIKKNLIGALLFDSGETAEATRLKRTARRRYTRRKNRICYLQEIFSNEMAKVDDSFFHRLEESFLVEEDKKHERHPIFGNIVDEVAYHEKYPTIYHLRKKLVDSTDKADLRLIYLALAHMIKFRGHFLIEGDLNPDNSDVDKLFIQLVQTYNQLFEENPINASGVDAKAILSARLSKSRRLENLIAQLPGEKKNGLFGNLIALSLGLTPNFKSNFDLAEDAKLQLSKDTYDDDLDNLLAQIGDQYADLFLAAKNLSDAILLSDILRVNTEITKAPLSASMIKRYDEHHQDLTLLKALVRQQLPEKYKEIFFDQSKNGYAGYIDGGASQEEFYKFIKPILEKMDGTEELLVKLNREDLLRKQRTFDNGSIPHQIHLGELHAILRRQEDFYPFLKDNREKIEKILTFRIPYYVGPLARGNSRFAWMTRKSEETITPWNFEEVVDKGASAQSFIERMTNFDKNLPNEKVLPKHSLLYEYFTVYNELTKVKYVTEGMRKPAFLSGEQKKAIVDLLFKTNRKVTVKQLKEDYFKKIECFDSVEISGVEDRFNASLGTYHDLLKIIKDKDFLDNEENEDILEDIVLTLTLFEDREMIEERLKTYAHLFDDKVMKQLKRRRYTGWGRLSRKLINGIRDKQSGKTILDFLKSDGFANRNFMQLIHDDSLTFKEDIQKAQVSGQGDSLHEHIANLAGSPAIKKGILQTVKVVDELVKVMGRHKPENIVIEMARENQTTQKGQKNSRERMKRIEEGIKELGSQILKEHPVENTQLQNEKLYLYYLQNGRDMYVDQELDINRLSDYDVDHIVPQSFLKDDSIDNKVLTRSDKARGKSDNVPSEEVVKKMKNYWRQLLNAKLITQRKFDNLTKAERGGLSELDKAGFIKRQLVETRQITKHVAQILDSRMNTKYDENDKLIREVKVITLKSKLVSDFRKDFQFYKVREINNYHHAHDAYLNAVVGTALIKKYPKLESEFVYGDYKVYDVRKMIAKSEQEIGKATAKYFFYSNIMNFFKTEITLANGEIRKRPLIETNGETGEIVWDKGRDFATVRKVLSMPQVNIVKKTEVQTGGFSKESILPKRNSDKLIARKKDWDPKKYGGFDSPTVAYSVLVVAKVEKGKSKKLKSVKELLGITIMERSSFEKNPIDFLEAKGYKEVKKDLIIKLPKYSLFELENGRKRMLASAGELQKGNELALPSKYVNFLYLASHYEKLKGSPEDNEQKQLFVEQHKHYLDEIIEQISEFSKRVILADANLDKVLSAYNKHRDKPIREQAENIIHLFTLTNLGAPAAFKYFDTTIDRKRYTSTKEVLDATLIHQSITGLYETRIDLSQLGGDGGGGGGGSPAPGGGLEHLPPPPEVSQFPLNPERLQALTDLVSRALEAKHIEPYQGPGNNPIFPVKKPNGKWRFIHDLRATNSLTRDLASPSPGPPDLTSPPQDLPHLRTIDLTDAFFQIPLPAVFQPYFAFTLPQPNNHGPGTRYSWRVLPQGFKNSPTLFQQQLSHILAPVRKAFPNSLIIQYMDDILLASPALRELTALTDKVTNALTKEGLPMSLEKTQATPGSIHFLGQVISPDCITYETLPSIHVKSIWSLAELQSMLGELQWVSKGTPVLRSSLHQLYLALRGHRDPRDTIELTSTQVQALKTIQKALALNCRSRLVSQLPILALIILRPTGTTAVLFQTKQKWPLVWLHTPHPATSLRPWGQLLANAIITLDKYSLQHYGQICKSFHHNISNQALTYYLHTSDQSSVAILLQHSHRFHNLGAQPSGPWRSLLQVPQIFQNIDVLRPPFIISPVVIDHAPCLFSDGATSKAAFILWDKQVIHQQVLPLPSTCSAQAGELFGLLAGLQKSKPWPALNIFLDSKFLIGHLRRMAWGAFLGPSTQCDLHARLFPLLQGKTVYVHHVRSHTLLQDPISRLNEATDALMLAPLLPLAGKRTADGSEFEKRTADGSEFESPKKKAKVE

SEQ ID NO: 1530 - protein, 2004 aa, synthetic construct
MPAAKRVKLDGGDKKYSIGLDIGTNSVGWAVITDEYKVPSKKFKVLGNTDRHSIKKNLIGALLFDSGETAEATRLKRTARRRYTRRKNRICYLQEIFSNEMAKVDDSFFHRLEESFLVEEDKKHERHPIFGNIVDEVAYHEKYPTIYHLRKKLVDSTDKADLRLIYLALAHMIKFRGHFLIEGDLNPDNSDVDKLFIQLVQTYNQLFEENPINASGVDAKAILSARLSKSRRLENLIAQLPGEKKNGLFGNLIALSLGLTPNFKSNFDLAEDAKLQLSKDTYDDDLDNLLAQIGDQYADLFLAAKNLSDAILLSDILRVNTEITKAPLSASMIKRYDEHHQDLTLLKALVRQQLPEKYKEIFFDQSKNGYAGYIDGGASQEEFYKFIKPILEKMDGTEELLVKLNREDLLRKQRTFDNGSIPHQIHLGELHAILRRQEDFYPFLKDNREKIEKILTFRIPYYVGPLARGNSRFAWMTRKSEETITPWNFEEVVDKGASAQSFIERMTNFDKNLPNEKVLPKHSLLYEYFTVYNELTKVKYVTEGMRKPAFLSGEQKKAIVDLLFKTNRKVTVKQLKEDYFKKIECFDSVEISGVEDRFNASLGTYHDLLKIIKDKDFLDNEENEDILEDIVLTLTLFEDREMIEERLKTYAHLFDDKVMKQLKRRRYTGWGRLSRKLINGIRDKQSGKTILDFLKSDGFANRNFMQLIHDDSLTFKEDIQKAQVSGQGDSLHEHIANLAGSPAIKKGILQTVKVVDELVKVMGRHKPENIVIEMARENQTTQKGQKNSRERMKRIEEGIKELGSQILKEHPVENTQLQNEKLYLYYLQNGRDMYVDQELDINRLSDYDVDHIVPQSFLKDDSIDNKVLTRSDKARGKSDNVPSEEVVKKMKNYWRQLLNAKLITQRKFDNLTKAERGGLSELDKAGFIKRQLVETRQITKHVAQILDSRMNTKYDENDKLIREVKVITLKSKLVSDFRKDFQFYKVREINNYHHAHDAYLNAVVGTALIKKYPKLESEFVYGDYKVYDVRKMIAKSEQEIGKATAKYFFYSNIMNFFKTEITLANGEIRKRPLIETNGETGEIVWDKGRDFATVRKVLSMPQVNIVKKTEVQTGGFSKESILPKRNSDKLIARKKDWDPKKYGGFDSPTVAYSVLVVAKVEKGKSKKLKSVKELLGITIMERSSFEKNPIDFLEAKGYKEVKKDLIIKLPKYSLFELENGRKRMLASAGELQKGNELALPSKYVNFLYLASHYEKLKGSPEDNEQKQLFVEQHKHYLDEIIEQISEFSKRVILADANLDKVLSAYNKHRDKPIREQAENIIHLFTLTNLGAPAAFKYFDTTIDRKRYTSTKEVLDATLIHQSITGLYETRIDLSQLGGDGGGGGPAPGGHLPPPPQVDQFPLNLPERLQALNDLVSKALEAGHIEPYSGPGNNPVFPVKKPNGKWRFIHDLRATNAITTTLTSPSPGPPDLTSLPTALPHLQTIDLTDAFFQIPLPKQYQPYFAFTIPQPCNYGPGTRYAWTVLPQGFKNSPTLFQQQLAAVLNPMRKMFPTSTIVQYMDDILLASPTNEELQQLSQLTLQALTTHGLPISQEKTQQTPGQIRFLGQVISPNHITYESTPTIPIKSQWTLTELQVILGEIQWVSKGTPILRKHLQSLYSALHPYRDPRACITLTPQQLHALHAIQQALQHNCRGRLNPALPLLGLISLSTSGTTSVIFQPKQNWPLAWLHTPHPPTSLCPWGHLLACTILTLDKYTLQHYGQLCQSFHHNMSKQALCDFLRNSPHPSVGILIHHMGRFHNLGSQPSGPWKTLLHLPTLLQEPRLLRPIFTLSPVVLDTAPCLFSDGSPQKAAYVLWDQTILQQDITPLPSHETHSAQKGELLALICGLRAAKPWPSLNIFLDSKYLIKYLHSLAIGAFLGTSAHQTLQAALPPLLQGKTIYLHHVRSHTNLPDPISTFNEYTDSLILAPLVPLAGKRTADGSEFEKRTADGSEFESPKKKAKVE

SEQ ID NO: 1531 - protein, 2009 aa, synthetic construct
MPAAKRVKLDGGDKKYSIGLDIGTNSVGWAVITDEYKVPSKKFKVLGNTDRHSIKKNLIGALLFDSGETAEATRLKRTARRRYTRRKNRICYLQEIFSNEMAKVDDSFFHRLEESFLVEEDKKHERHPIFGNIVDEVAYHEKYPTIYHLRKKLVDSTDKADLRLIYLALAHMIKFRGHFLIEGDLNPDNSDVDKLFIQLVQTYNQLFEENPINASGVDAKAILSARLSKSRRLENLIAQLPGEKKNGLFGNLIALSLGLTPNFKSNFDLAEDAKLQLSKDTYDDDLDNLLAQIGDQYADLFLAAKNLSDAILLSDILRVNTEITKAPLSASMIKRYDEHHQDLTLLKALVRQQLPEKYKEIFFDQSKNGYAGYIDGGASQEEFYKFIKPILEKMDGTEELLVKLNREDLLRKQRTFDNGSIPHQIHLGELHAILRRQEDFYPFLKDNREKIEKILTFRIPYYVGPLARGNSRFAWMTRKSEETITPWNFEEVVDKGASAQSFIERMTNFDKNLPNEKVLPKHSLLYEYFTVYNELTKVKYVTEGMRKPAFLSGEQKKAIVDLLFKTNRKVTVKQLKEDYFKKIECFDSVEISGVEDRFNASLGTYHDLLKIIKDKDFLDNEENEDILEDIVLTLTLFEDREMIEERLKTYAHLFDDKVMKQLKRRRYTGWGRLSRKLINGIRDKQSGKTILDFLKSDGFANRNFMQLIHDDSLTFKEDIQKAQVSGQGDSLHEHIANLAGSPAIKKGILQTVKVVDELVKVMGRHKPENIVIEMARENQTTQKGQKNSRERMKRIEEGIKELGSQILKEHPVENTQLQNEKLYLYYLQNGRDMYVDQELDINRLSDYDVDHIVPQSFLKDDSIDNKVLTRSDKARGKSDNVPSEEVVKKMKNYWRQLLNAKLITQRKFDNLTKAERGGLSELDKAGFIKRQLVETRQITKHVAQILDSRMNTKYDENDKLIREVKVITLKSKLVSDFRKDFQFYKVREINNYHHAHDAYLNAVVGTALIKKYPKLESEFVYGDYKVYDVRKMIAKSEQEIGKATAKYFFYSNIMNFFKTEITLANGEIRKRPLIETNGETGEIVWDKGRDFATVRKVLSMPQVNIVKKTEVQTGGFSKESILPKRNSDKLIARKKDWDPKKYGGFDSPTVAYSVLVVAKVEKGKSKKLKSVKELLGITIMERSSFEKNPIDFLEAKGYKEVKKDLIIKLPKYSLFELENGRKRMLASAGELQKGNELALPSKYVNFLYLASHYEKLKGSPEDNEQKQLFVEQHKHYLDEIIEQISEFSKRVILADANLDKVLSAYNKHRDKPIREQAENIIHLFTLTNLGAPAAFKYFDTTIDRKRYTSTKEVLDATLIHQSITGLYETRIDLSQLGGDGGEAAAKGSSGGGGGHLPPPPQVDQFPLNLPERLQALNDLVSKALEAGHIEPYSGPGNNPVFPVKKPNGKWRFIHDLRATNAITTTLTSPSPGPPDLTSLPTALPHLQTIDLTDAFFQIPLPKQYQPYFAFTIPQPCNYGPGTRYAWTVLPQGFKNSPTLFQQQLAAVLNPMRKMFPTSTIVQYMDDILLASPTNEELQQLSQLTLQALTTHGLPISQEKTQQTPGQIRFLGQVISPNHITYESTPTIPIKSQWTLTELQVILGEIQWVSKGTPILRKHLQSLYSALHPYRDPRACITLTPQQLHALHAIQQALQHNCRGRLNPALPLLGLISLSTSGTTSVIFQPKQNWPLAWLHTPHPPTSLCPWGHLLACTILTLDKYTLQHYGQLCQSFHHNMSKQALCDFLRNSPHPSVGILIHHMGRFHNLGSQPSGPWKTLLHLPTLLQEPRLLRPIFTLSPVVLDTAPCLFSDGSPQKAAYVLWDQTILQQDITPLPSHETHSAQKGELLALICGLRAAKPWPSLNIFLDSKYLIKYLHSLAIGAFLGTSAHQTLQAALPPLLQGKTIYLHHVRSHTNLPDPISTFNEYTDSLILAPLVPLAGKRTADGSEFEKRTADGSEFESPKKKAKVE

SEQ ID NO: 1532 - protein, 2009 aa, synthetic construct
MPAAKRVKLDGGDKKYSIGLDIGTNSVGWAVITDEYKVPSKKFKVLGNTDRHSIKKNLIGALLFDSGETAEATRLKRTARRRYTRRKNRICYLQEIFSNEMAKVDDSFFHRLEESFLVEEDKKHERHPIFGNIVDEVAYHEKYPTIYHLRKKLVDSTDKADLRLIYLALAHMIKFRGHFLIEGDLNPDNSDVDKLFIQLVQTYNQLFEENPINASGVDAKAILSARLSKSRRLENLIAQLPGEKKNGLFGNLIALSLGLTPNFKSNFDLAEDAKLQLSKDTYDDDLDNLLAQIGDQYADLFLAAKNLSDAILLSDILRVNTEITKAPLSASMIKRYDEHHQDLTLLKALVRQQLPEKYKEIFFDQSKNGYAGYIDGGASQEEFYKFIKPILEKMDGTEELLVKLNREDLLRKQRTFDNGSIPHQIHLGELHAILRRQEDFYPFLKDNREKIEKILTFRIPYYVGPLARGNSRFAWMTRKSEETITPWNFEEVVDKGASAQSFIERMTNFDKNLPNEKVLPKHSLLYEYFTVYNELTKVKYVTEGMRKPAFLSGEQKKAIVDLLFKTNRKVTVKQLKEDYFKKIECFDSVEISGVEDRFNASLGTYHDLLKIIKDKDFLDNEENEDILEDIVLTLTLFEDREMIEERLKTYAHLFDDKVMKQLKRRRYTGWGRLSRKLINGIRDKQSGKTILDFLKSDGFANRNFMQLIHDDSLTFKEDIQKAQVSGQGDSLHEHIANLAGSPAIKKGILQTVKVVDELVKVMGRHKPENIVIEMARENQTTQKGQKNSRERMKRIEEGIKELGSQILKEHPVENTQLQNEKLYLYYLQNGRDMYVDQELDINRLSDYDVDHIVPQSFLKDDSIDNKVLTRSDKARGKSDNVPSEEVVKKMKNYWRQLLNAKLITQRKFDNLTKAERGGLSELDKAGFIKRQLVETRQITKHVAQILDSRMNTKYDENDKLIREVKVITLKSKLVSDFRKDFQFYKVREINNYHHAHDAYLNAVVGTALIKKYPKLESEFVYGDYKVYDVRKMIAKSEQEIGKATAKYFFYSNIMNFFKTEITLANGEIRKRPLIETNGETGEIVWDKGRDFATVRKVLSMPQVNIVKKTEVQTGGFSKESILPKRNSDKLIARKKDWDPKKYGGFDSPTVAYSVLVVAKVEKGKSKKLKSVKELLGITIMERSSFEKNPIDFLEAKGYKEVKKDLIIKLPKYSLFELENGRKRMLASAGELQKGNELALPSKYVNFLYLASHYEKLKGSPEDNEQKQLFVEQHKHYLDEIIEQISEFSKRVILADANLDKVLSAYNKHRDKPIREQAENIIHLFTLTNLGAPAAFKYFDTTIDRKRYTSTKEVLDATLIHQSITGLYETRIDLSQLGGDGGEAAAKGGSPAPGGHLPPPPQVDQFPLNLPERLQALNDLVSKALEAGHIEPYSGPGNNPVFPVKKPNGKWRFIHDLRATNAITTTLTSPSPGPPDLTSLPTALPHLQTIDLTDAFFQIPLPKQYQPYFAFTIPQPCNYGPGTRYAWTVLPQGFKNSPTLFQQQLAAVLNPMRKMFPTSTIVQYMDDILLASPTNEELQQLSQLTLQALTTHGLPISQEKTQQTPGQIRFLGQVISPNHITYESTPTIPIKSQWTLTELQVILGEIQWVSKGTPILRKHLQSLYSALHPYRDPRACITLTPQQLHALHAIQQALQHNCRGRLNPALPLLGLISLSTSGTTSVIFQPKQNWPLAWLHTPHPPTSLCPWGHLLACTILTLDKYTLQHYGQLCQSFHHNMSKQALCDFLRNSPHPSVGILIHHMGRFHNLGSQPSGPWKTLLHLPTLLQEPRLLRPIFTLSPVVLDTAPCLFSDGSPQKAAYVLWDQTILQQDITPLPSHETHSAQKGELLALICGLRAAKPWPSLNIFLDSKYLIKYLHSLAIGAFLGTSAHQTLQAALPPLLQGKTIYLHHVRSHTNLPDPISTFNEYTDSLILAPLVPLAGKRTADGSEFEKRTADGSEFESPKKKAKVE

SEQ ID NO: 1533 - protein, 2031 aa, synthetic construct
MPAAKRVKLDGGDKKYSIGLDIGTNSVGWAVITDEYKVPSKKFKVLGNTDRHSIKKNLIGALLFDSGETAEATRLKRTARRRYTRRKNRICYLQEIFSNEMAKVDDSFFHRLEESFLVEEDKKHERHPIFGNIVDEVAYHEKYPTIYHLRKKLVDSTDKADLRLIYLALAHMIKFRGHFLIEGDLNPDNSDVDKLFIQLVQTYNQLFEENPINASGVDAKAILSARLSKSRRLENLIAQLPGEKKNGLFGNLIALSLGLTPNFKSNFDLAEDAKLQLSKDTYDDDLDNLLAQIGDQYADLFLAAKNLSDAILLSDILRVNTEITKAPLSASMIKRYDEHHQDLTLLKALVRQQLPEKYKEIFFDQSKNGYAGYIDGGASQEEFYKFIKPILEKMDGTEELLVKLNREDLLRKQRTFDNGSIPHQIHLGELHAILRRQEDFYPFLKDNREKIEKILTFRIPYYVGPLARGNSRFAWMTRKSEETITPWNFEEVVDKGASAQSFIERMTNFDKNLPNEKVLPKHSLLYEYFTVYNELTKVKYVTEGMRKPAFLSGEQKKAIVDLLFKTNRKVTVKQLKEDYFKKIECFDSVEISGVEDRFNASLGTYHDLLKIIKDKDFLDNEENEDILEDIVLTLTLFEDREMIEERLKTYAHLFDDKVMKQLKRRRYTGWGRLSRKLINGIRDKQSGKTILDFLKSDGFANRNFMQLIHDDSLTFKEDIQKAQVSGQGDSLHEHIANLAGSPAIKKGILQTVKVVDELVKVMGRHKPENIVIEMARENQTTQKGQKNSRERMKRIEEGIKELGSQILKEHPVENTQLQNEKLYLYYLQNGRDMYVDQELDINRLSDYDVDHIVPQSFLKDDSIDNKVLTRSDKARGKSDNVPSEEVVKKMKNYWRQLLNAKLITQRKFDNLTKAERGGLSELDKAGFIKRQLVETRQITKHVAQILDSRMNTKYDENDKLIREVKVITLKSKLVSDFRKDFQFYKVREINNYHHAHDAYLNAVVGTALIKKYPKLESEFVYGDYKVYDVRKMIAKSEQEIGKATAKYFFYSNIMNFFKTEITLANGEIRKRPLIETNGETGEIVWDKGRDFATVRKVLSMPQVNIVKKTEVQTGGFSKESILPKRNSDKLIARKKDWDPKKYGGFDSPTVAYSVLVVAKVEKGKSKKLKSVKELLGITIMERSSFEKNPIDFLEAKGYKEVKKDLIIKLPKYSLFELENGRKRMLASAGELQKGNELALPSKYVNFLYLASHYEKLKGSPEDNEQKQLFVEQHKHYLDEIIEQISEFSKRVILADANLDKVLSAYNKHRDKPIREQAENIIHLFTLTNLGAPAAFKYFDTTIDRKRYTSTKEVLDATLIHQSITGLYETRIDLSQLGGDGGSGGSSGGSSGSETPGTSESATPESSGGSSGGSSGGHLPPPPQVDQFPLNLPERLQALNDLVSKALEAGHIEPYSGPGNNPVFPVKKPNGKWRFIHDLRATNAITTTLTSPSPGPPDLTSLPTALPHLQTIDLTDAFFQIPLPKQYQPYFAFTIPQPCNYGPGTRYAWTVLPQGFKNSPTLFQQQLAAVLNPMRKMFPTSTIVQYMDDILLASPTNEELQQLSQLTLQALTTHGLPISQEKTQQTPGQIRFLGQVISPNHITYESTPTIPIKSQWTLTELQVILGEIQWVSKGTPILRKHLQSLYSALHPYRDPRACITLTPQQLHALHAIQQALQHNCRGRLNPALPLLGLISLSTSGTTSVIFQPKQNWPLAWLHTPHPPTSLCPWGHLLACTILTLDKYTLQHYGQLCQSFHHNMSKQALCDFLRNSPHPSVGILIHHMGRFHNLGSQPSGPWKTLLHLPTLLQEPRLLRPIFTLSPVVLDTAPCLFSDGSPQKAAYVLWDQTILQQDITPLPSHETHSAQKGELLALICGLRAAKPWPSLNIFLDSKYLIKYLHSLAIGAFLGTSAHQTLQAALPPLLQGKTIYLHHVRSHTNLPDPISTFNEYTDSLILAPLVPLAGKRTADGSEFEKRTADGSEFESPKKKAKVE

SEQ ID NO: 1534 - protein, 2006 aa, synthetic construct
MPAAKRVKLDGGDKKYSIGLDIGTNSVGWAVITDEYKVPSKKFKVLGNTDRHSIKKNLIGALLFDSGETAEATRLKRTARRRYTRRKNRICYLQEIFSNEMAKVDDSFFHRLEESFLVEEDKKHERHPIFGNIVDEVAYHEKYPTIYHLRKKLVDSTDKADLRLIYLALAHMIKFRGHFLIEGDLNPDNSDVDKLFIQLVQTYNQLFEENPINASGVDAKAILSARLSKSRRLENLIAQLPGEKKNGLFGNLIALSLGLTPNFKSNFDLAEDAKLQLSKDTYDDDLDNLLAQIGDQYADLFLAAKNLSDAILLSDILRVNTEITKAPLSASMIKRYDEHHQDLTLLKALVRQQLPEKYKEIFFDQSKNGYAGYIDGGASQEEFYKFIKPILEKMDGTEELLVKLNREDLLRKQRTFDNGSIPHQIHLGELHAILRRQEDFYPFLKDNREKIEKILTFRIPYYVGPLARGNSRFAWMTRKSEETITPWNFEEVVDKGASAQSFIERMTNFDKNLPNEKVLPKHSLLYEYFTVYNELTKVKYVTEGMRKPAFLSGEQKKAIVDLLFKTNRKVTVKQLKEDYFKKIECFDSVEISGVEDRFNASLGTYHDLLKIIKDKDFLDNEENEDILEDIVLTLTLFEDREMIEERLKTYAHLFDDKVMKQLKRRRYTGWGRLSRKLINGIRDKQSGKTILDFLKSDGFANRNFMQLIHDDSLTFKEDIQKAQVSGQGDSLHEHIANLAGSPAIKKGILQTVKVVDELVKVMGRHKPENIVIEMARENQTTQKGQKNSRERMKRIEEGIKELGSQILKEHPVENTQLQNEKLYLYYLQNGRDMYVDQELDINRLSDYDVDHIVPQSFLKDDSIDNKVLTRSDKARGKSDNVPSEEVVKKMKNYWRQLLNAKLITQRKFDNLTKAERGGLSELDKAGFIKRQLVETRQITKHVAQILDSRMNTKYDENDKLIREVKVITLKSKLVSDFRKDFQFYKVREINNYHHAHDAYLNAVVGTALIKKYPKLESEFVYGDYKVYDVRKMIAKSEQEIGKATAKYFFYSNIMNFFKTEITLANGEIRKRPLIETNGETGEIVWDKGRDFATVRKVLSMPQVNIVKKTEVQTGGFSKESILPKRNSDKLIARKKDWDPKKYGGFDSPTVAYSVLVVAKVEKGKSKKLKSVKELLGITIMERSSFEKNPIDFLEAKGYKEVKKDLIIKLPKYSLFELENGRKRMLASAGELQKGNELALPSKYVNFLYLASHYEKLKGSPEDNEQKQLFVEQHKHYLDEIIEQISEFSKRVILADANLDKVLSAYNKHRDKPIREQAENIIHLFTLTNLGAPAAFKYFDTTIDRKRYTSTKEVLDATLIHQSITGLYETRIDLSQLGGDGGPAPEAAAKGGHLPPPPQVDQFPLNLPERLQALNDLVSKALEAGHIEPYSGPGNNPVFPVKKPNGKWRFIHDLRATNAITTTLTSPSPGPPDLTSLPTALPHLQTIDLTDAFFQIPLPKQYQPYFAFTIPQPCNYGPGTRYAWTVLPQGFKNSPTLFQQQLAAVLNPMRKMFPTSTIVQYMDDILLASPTNEELQQLSQLTLQALTTHGLPISQEKTQQTPGQIRFLGQVISPNHITYESTPTIPIKSQWTLTELQVILGEIQWVSKGTPILRKHLQSLYSALHPYRDPRACITLTPQQLHALHAIQQALQHNCRGRLNPALPLLGLISLSTSGTTSVIFQPKQNWPLAWLHTPHPPTSLCPWGHLLACTILTLDKYTLQHYGQLCQSFHHNMSKQALCDFLRNSPHPSVGILIHHMGRFHNLGSQPSGPWKTLLHLPTLLQEPRLLRPIFTLSPVVLDTAPCLFSDGSPQKAAYVLWDQTILQQDITPLPSHETHSAQKGELLALICGLRAAKPWPSLNIFLDSKYLIKYLHSLAIGAFLGTSAHQTLQAALPPLLQGKTIYLHHVRSHTNLPDPISTFNEYTDSLILAPLVPLAGKRTADGSEFEKRTADGSEFESPKKKAKVE

SEQ ID NO: 1535 - protein, 2007 aa, synthetic construct
MPAAKRVKLDGGDKKYSIGLDIGTNSVGWAVITDEYKVPSKKFKVLGNTDRHSIKKNLIGALLFDSGETAEATRLKRTARRRYTRRKNRICYLQEIFSNEMAKVDDSFFHRLEESFLVEEDKKHERHPIFGNIVDEVAYHEKYPTIYHLRKKLVDSTDKADLRLIYLALAHMIKFRGHFLIEGDLNPDNSDVDKLFIQLVQTYNQLFEENPINASGVDAKAILSARLSKSRRLENLIAQLPGEKKNGLFGNLIALSLGLTPNFKSNFDLAEDAKLQLSKDTYDDDLDNLLAQIGDQYADLFLAAKNLSDAILLSDILRVNTEITKAPLSASMIKRYDEHHQDLTLLKALVRQQLPEKYKEIFFDQSKNGYAGYIDGGASQEEFYKFIKPILEKMDGTEELLVKLNREDLLRKQRTFDNGSIPHQIHLGELHAILRRQEDFYPFLKDNREKIEKILTFRIPYYVGPLARGNSRFAWMTRKSEETITPWNFEEVVDKGASAQSFIERMTNFDKNLPNEKVLPKHSLLYEYFTVYNELTKVKYVTEGMRKPAFLSGEQKKAIVDLLFKTNRKVTVKQLKEDYFKKIECFDSVEISGVEDRFNASLGTYHDLLKIIKDKDFLDNEENEDILEDIVLTLTLFEDREMIEERLKTYAHLFDDKVMKQLKRRRYTGWGRLSRKLINGIRDKQSGKTILDFLKSDGFANRNFMQLIHDDSLTFKEDIQKAQVSGQGDSLHEHIANLAGSPAIKKGILQTVKVVDELVKVMGRHKPENIVIEMARENQTTQKGQKNSRERMKRIEEGIKELGSQILKEHPVENTQLQNEKLYLYYLQNGRDMYVDQELDINRLSDYDVDHIVPQSFLKDDSIDNKVLTRSDKARGKSDNVPSEEVVKKMKNYWRQLLNAKLITQRKFDNLTKAERGGLSELDKAGFIKRQLVETRQITKHVAQILDSRMNTKYDENDKLIREVKVITLKSKLVSDFRKDFQFYKVREINNYHHAHDAYLNAVVGTALIKKYPKLESEFVYGDYKVYDVRKMIAKSEQEIGKATAKYFFYSNIMNFFKTEITLANGEIRKRPLIETNGETGEIVWDKGRDFATVRKVLSMPQVNIVKKTEVQTGGFSKESILPKRNSDKLIARKKDWDPKKYGGFDSPTVAYSVLVVAKVEKGKSKKLKSVKELLGITIMERSSFEKNPIDFLEAKGYKEVKKDLIIKLPKYSLFELENGRKRMLASAGELQKGNELALPSKYVNFLYLASHYEKLKGSPEDNEQKQLFVEQHKHYLDEIIEQISEFSKRVILADANLDKVLSAYNKHRDKPIREQAENIIHLFTLTNLGAPAAFKYFDTTIDRKRYTSTKEVLDATLIHQSITGLYETRIDLSQLGGDGGGSSGGSGGGGGHLPPPPQVDQFPLNLPERLQALNDLVSKALEAGHIEPYSGPGNNPVFPVKKPNGKWRFIHDLRATNAITTTLTSPSPGPPDLTSLPTALPHLQTIDLTDAFFQIPLPKQYQPYFAFTIPQPCNYGPGTRYAWTVLPQGFKNSPTLFQQQLAAVLNPMRKMFPTSTIVQYMDDILLASPTNEELQQLSQLTLQALTTHGLPISQEKTQQTPGQIRFLGQVISPNHITYESTPTIPIKSQWTLTELQVILGEIQWVSKGTPILRKHLQSLYSALHPYRDPRACITLTPQQLHALHAIQQALQHNCRGRLNPALPLLGLISLSTSGTTSVIFQPKQNWPLAWLHTPHPPTSLCPWGHLLACTILTLDKYTLQHYGQLCQSFHHNMSKQALCDFLRNSPHPSVGILIHHMGRFHNLGSQPSGPWKTLLHLPTLLQEPRLLRPIFTLSPVVLDTAPCLFSDGSPQKAAYVLWDQTILQQDITPLPSHETHSAQKGELLALICGLRAAKPWPSLNIFLDSKYLIKYLHSLAIGAFLGTSAHQTLQAALPPLLQGKTIYLHHVRSHTNLPDPISTFNEYTDSLILAPLVPLAGKRTADGSEFEKRTADGSEFESPKKKAKVE

SEQ ID NO: 1536 - protein, 2007 aa, synthetic construct
MPAAKRVKLDGGDKKYSIGLDIGTNSVGWAVITDEYKVPSKKFKVLGNTDRHSIKKNLIGALLFDSGETAEATRLKRTARRRYTRRKNRICYLQEIFSNEMAKVDDSFFHRLEESFLVEEDKKHERHPIFGNIVDEVAYHEKYPTIYHLRKKLVDSTDKADLRLIYLALAHMIKFRGHFLIEGDLNPDNSDVDKLFIQLVQTYNQLFEENPINASGVDAKAILSARLSKSRRLENLIAQLPGEKKNGLFGNLIALSLGLTPNFKSNFDLAEDAKLQLSKDTYDDDLDNLLAQIGDQYADLFLAAKNLSDAILLSDILRVNTEITKAPLSASMIKRYDEHHQDLTLLKALVRQQLPEKYKEIFFDQSKNGYAGYIDGGASQEEFYKFIKPILEKMDGTEELLVKLNREDLLRKQRTFDNGSIPHQIHLGELHAILRRQEDFYPFLKDNREKIEKILTFRIPYYVGPLARGNSRFAWMTRKSEETITPWNFEEVVDKGASAQSFIERMTNFDKNLPNEKVLPKHSLLYEYFTVYNELTKVKYVTEGMRKPAFLSGEQKKAIVDLLFKTNRKVTVKQLKEDYFKKIECFDSVEISGVEDRFNASLGTYHDLLKIIKDKDFLDNEENEDILEDIVLTLTLFEDREMIEERLKTYAHLFDDKVMKQLKRRRYTGWGRLSRKLINGIRDKQSGKTILDFLKSDGFANRNFMQLIHDDSLTFKEDIQKAQVSGQGDSLHEHIANLAGSPAIKKGILQTVKVVDELVKVMGRHKPENIVIEMARENQTTQKGQKNSRERMKRIEEGIKELGSQILKEHPVENTQLQNEKLYLYYLQNGRDMYVDQELDINRLSDYDVDHIVPQSFLKDDSIDNKVLTRSDKARGKSDNVPSEEVVKKMKNYWRQLLNAKLITQRKFDNLTKAERGGLSELDKAGFIKRQLVETRQITKHVAQILDSRMNTKYDENDKLIREVKVITLKSKLVSDFRKDFQFYKVREINNYHHAHDAYLNAVVGTALIKKYPKLESEFVYGDYKVYDVRKMIAKSEQEIGKATAKYFFYSNIMNFFKTEITLANGEIRKRPLIETNGETGEIVWDKGRDFATVRKVLSMPQVNIVKKTEVQTGGFSKESILPKRNSDKLIARKKDWDPKKYGGFDSPTVAYSVLVVAKVEKGKSKKLKSVKELLGITIMERSSFEKNPIDFLEAKGYKEVKKDLIIKLPKYSLFELENGRKRMLASAGELQKGNELALPSKYVNFLYLASHYEKLKGSPEDNEQKQLFVEQHKHYLDEIIEQISEFSKRVILADANLDKVLSAYNKHRDKPIREQAENIIHLFTLTNLGAPAAFKYFDTTIDRKRYTSTKEVLDATLIHQSITGLYETRIDLSQLGGDGGPAPAPAPAPGGHLPPPPQVDQFPLNLPERLQALNDLVSKALEAGHIEPYSGPGNNPVFPVKKPNGKWRFIHDLRATNAITTTLTSPSPGPPDLTSLPTALPHLQTIDLTDAFFQIPLPKQYQPYFAFTIPQPCNYGPGTRYAWTVLPQGFKNSPTLFQQQLAAVLNPMRKMFPTSTIVQYMDDILLASPTNEELQQLSQLTLQALTTHGLPISQEKTQQTPGQIRFLGQVISPNHITYESTPTIPIKSQWTLTELQVILGEIQWVSKGTPILRKHLQSLYSALHPYRDPRACITLTPQQLHALHAIQQALQHNCRGRLNPALPLLGLISLSTSGTTSVIFQPKQNWPLAWLHTPHPPTSLCPWGHLLACTILTLDKYTLQHYGQLCQSFHHNMSKQALCDFLRNSPHPSVGILIHHMGRFHNLGSQPSGPWKTLLHLPTLLQEPRLLRPIFTLSPVVLDTAPCLFSDGSPQKAAYVLWDQTILQQDITPLPSHETHSAQKGELLALICGLRAAKPWPSLNIFLDSKYLIKYLHSLAIGAFLGTSAHQTLQAALPPLLQGKTIYLHHVRSHTNLPDPISTFNEYTDSLILAPLVPLAGKRTADGSEFEKRTADGSEFESPKKKAKVE

SEQ ID NO: 1537 - protein, 2010 aa, synthetic construct
MPAAKRVKLDGGDKKYSIGLDIGTNSVGWAVITDEYKVPSKKFKVLGNTDRHSIKKNLIGALLFDSGETAEATRLKRTARRRYTRRKNRICYLQEIFSNEMAKVDDSFFHRLEESFLVEEDKKHERHPIFGNIVDEVAYHEKYPTIYHLRKKLVDSTDKADLRLIYLALAHMIKFRGHFLIEGDLNPDNSDVDKLFIQLVQTYNQLFEENPINASGVDAKAILSARLSKSRRLENLIAQLPGEKKNGLFGNLIALSLGLTPNFKSNFDLAEDAKLQLSKDTYDDDLDNLLAQIGDQYADLFLAAKNLSDAILLSDILRVNTEITKAPLSASMIKRYDEHHQDLTLLKALVRQQLPEKYKEIFFDQSKNGYAGYIDGGASQEEFYKFIKPILEKMDGTEELLVKLNREDLLRKQRTFDNGSIPHQIHLGELHAILRRQEDFYPFLKDNREKIEKILTFRIPYYVGPLARGNSRFAWMTRKSEETITPWNFEEVVDKGASAQSFIERMTNFDKNLPNEKVLPKHSLLYEYFTVYNELTKVKYVTEGMRKPAFLSGEQKKAIVDLLFKTNRKVTVKQLKEDYFKKIECFDSVEISGVEDRFNASLGTYHDLLKIIKDKDFLDNEENEDILEDIVLTLTLFEDREMIEERLKTYAHLFDDKVMKQLKRRRYTGWGRLSRKLINGIRDKQSGKTILDFLKSDGFANRNFMQLIHDDSLTFKEDIQKAQVSGQGDSLHEHIANLAGSPAIKKGILQTVKVVDELVKVMGRHKPENIVIEMARENQTTQKGQKNSRERMKRIEEGIKELGSQILKEHPVENTQLQNEKLYLYYLQNGRDMYVDQELDINRLSDYDVDHIVPQSFLKDDSIDNKVLTRSDKARGKSDNVPSEEVVKKMKNYWRQLLNAKLITQRKFDNLTKAERGGLSELDKAGFIKRQLVETRQITKHVAQILDSRMNTKYDENDKLIREVKVITLKSKLVSDFRKDFQFYKVREINNYHHAHDAYLNAVVGTALIKKYPKLESEFVYGDYKVYDVRKMIAKSEQEIGKATAKYFFYSNIMNFFKTEITLANGEIRKRPLIETNGETGEIVWDKGRDFATVRKVLSMPQVNIVKKTEVQTGGFSKESILPKRNSDKLIARKKDWDPKKYGGFDSPTVAYSVLVVAKVEKGKSKKLKSVKELLGITIMERSSFEKNPIDFLEAKGYKEVKKDLIIKLPKYSLFELENGRKRMLASAGELQKGNELALPSKYVNFLYLASHYEKLKGSPEDNEQKQLFVEQHKHYLDEIIEQISEFSKRVILADANLDKVLSAYNKHRDKPIREQAENIIHLFTLTNLGAPAAFKYFDTTIDRKRYTSTKEVLDATLIHQSITGLYETRIDLSQLGGDGGEAAAKEAAAKEAAAKGGPLGTSDSPVTHADPIDWKSEEPVWVDQWPLTQEKLSAAQQLVQEQLRLGHIEPSTSAWNSPIFVIKKKSGKWRLLQDLRKVNETMMHMGALQPGLPTPSAIPDKSYIIVIDLKDCFYTIPLAPQDCKRFAFSLPSVNFKEPMQRYQWRVLPQGMTNSPTLCQKFVATAIAPVRQRFPQLYLVHYMDDILLAHTDEHLLYQAFSILKQHLSLNGLVIADEKIQTHFPYNYLGFSLYPRVYNTQLVKLQTDHLKTLNDFQKLLGDINWIRPYLKLPTYTLQPLFDILKGDSDPASPRTLSLEGRTALQSIEEAIRQQQITYCDYQRSWGLYILPTPRAPTGVLYQDKPLRWIYLSATPTKHLLPYYELVAKIIAKGRHEAIQYFGMEPPFICVPYALEQQDWLFQFSDNWSIAFANYPGQITHHYPSDKLLQFASSHAFIFPKIVRRQPIPEATLIFTDGSSNGTAALIINHQTYYAQTSFSSAQVVELFAVHQALLTVPTSFNLFTDSSYVVGALQMIETVPIIGTTSPEVLNLFTLIQQVLHCRQHPCFFGHIRAHSTLPGALVQGNHTADVLTKQVFFQSAGKRTADGSEFEKRTADGSEFESPKKKAKVE

SEQ ID NO: 1538 - protein, 2001 aa, synthetic construct
MPAAKRVKLDGGDKKYSIGLDIGTNSVGWAVITDEYKVPSKKFKVLGNTDRHSIKKNLIGALLFDSGETAEATRLKRTARRRYTRRKNRICYLQEIFSNEMAKVDDSFFHRLEESFLVEEDKKHERHPIFGNIVDEVAYHEKYPTIYHLRKKLVDSTDKADLRLIYLALAHMIKFRGHFLIEGDLNPDNSDVDKLFIQLVQTYNQLFEENPINASGVDAKAILSARLSKSRRLENLIAQLPGEKKNGLFGNLIALSLGLTPNFKSNFDLAEDAKLQLSKDTYDDDLDNLLAQIGDQYADLFLAAKNLSDAILLSDILRVNTEITKAPLSASMIKRYDEHHQDLTLLKALVRQQLPEKYKEIFFDQSKNGYAGYIDGGASQEEFYKFIKPILEKMDGTEELLVKLNREDLLRKQRTFDNGSIPHQIHLGELHAILRRQEDFYPFLKDNREKIEKILTFRIPYYVGPLARGNSRFAWMTRKSEETITPWNFEEVVDKGASAQSFIERMTNFDKNLPNEKVLPKHSLLYEYFTVYNELTKVKYVTEGMRKPAFLSGEQKKAIVDLLFKTNRKVTVKQLKEDYFKKIECFDSVEISGVEDRFNASLGTYHDLLKIIKDKDFLDNEENEDILEDIVLTLTLFEDREMIEERLKTYAHLFDDKVMKQLKRRRYTGWGRLSRKLINGIRDKQSGKTILDFLKSDGFANRNFMQLIHDDSLTFKEDIQKAQVSGQGDSLHEHIANLAGSPAIKKGILQTVKVVDELVKVMGRHKPENIVIEMARENQTTQKGQKNSRERMKRIEEGIKELGSQILKEHPVENTQLQNEKLYLYYLQNGRDMYVDQELDINRLSDYDVDHIVPQSFLKDDSIDNKVLTRSDKARGKSDNVPSEEVVKKMKNYWRQLLNAKLITQRKFDNLTKAERGGLSELDKAGFIKRQLVETRQITKHVAQILDSRMNTKYDENDKLIREVKVITLKSKLVSDFRKDFQFYKVREINNYHHAHDAYLNAVVGTALIKKYPKLESEFVYGDYKVYDVRKMIAKSEQEIGKATAKYFFYSNIMNFFKTEITLANGEIRKRPLIETNGETGEIVWDKGRDFATVRKVLSMPQVNIVKKTEVQTGGFSKESILPKRNSDKLIARKKDWDPKKYGGFDSPTVAYSVLVVAKVEKGKSKKLKSVKELLGITIMERSSFEKNPIDFLEAKGYKEVKKDLIIKLPKYSLFELENGRKRMLASAGELQKGNELALPSKYVNFLYLASHYEKLKGSPEDNEQKQLFVEQHKHYLDEIIEQISEFSKRVILADANLDKVLSAYNKHRDKPIREQAENIIHLFTLTNLGAPAAFKYFDTTIDRKRYTSTKEVLDATLIHQSITGLYETRIDLSQLGGDGGGSSGGGGGPLGTSDSPVTHADPIDWKSEEPVWVDQWPLTQEKLSAAQQLVQEQLRLGHIEPSTSAWNSPIFVIKKKSGKWRLLQDLRKVNETMMHMGALQPGLPTPSAIPDKSYIIVIDLKDCFYTIPLAPQDCKRFAFSLPSVNFKEPMQRYQWRVLPQGMTNSPTLCQKFVATAIAPVRQRFPQLYLVHYMDDILLAHTDEHLLYQAFSILKQHLSLNGLVIADEKIQTHFPYNYLGFSLYPRVYNTQLVKLQTDHLKTLNDFQKLLGDINWIRPYLKLPTYTLQPLFDILKGDSDPASPRTLSLEGRTALQSIEEAIRQQQITYCDYQRSWGLYILPTPRAPTGVLYQDKPLRWIYLSATPTKHLLPYYELVAKIIAKGRHEAIQYFGMEPPFICVPYALEQQDWLFQFSDNWSIAFANYPGQITHHYPSDKLLQFASSHAFIFPKIVRRQPIPEATLIFTDGSSNGTAALIINHQTYYAQTSFSSAQVVELFAVHQALLTVPTSFNLFTDSSYVVGALQMIETVPIIGTTSPEVLNLFTLIQQVLHCRQHPCFFGHIRAHSTLPGALVQGNHTADVLTKQVFFQSAGKRTADGSEFEKRTADGSEFESPKKKAKVE

SEQ ID NO: 1539 - protein, 2106 aa, synthetic construct
MPAAKRVKLDGGDKKYSIGLDIGTNSVGWAVITDEYKVPSKKFKVLGNTDRHSIKKNLIGALLFDSGETAEATRLKRTARRRYTRRKNRICYLQEIFSNEMAKVDDSFFHRLEESFLVEEDKKHERHPIFGNIVDEVAYHEKYPTIYHLRKKLVDSTDKADLRLIYLALAHMIKFRGHFLIEGDLNPDNSDVDKLFIQLVQTYNQLFEENPINASGVDAKAILSARLSKSRRLENLIAQLPGEKKNGLFGNLIALSLGLTPNFKSNFDLAEDAKLQLSKDTYDDDLDNLLAQIGDQYADLFLAAKNLSDAILLSDILRVNTEITKAPLSASMIKRYDEHHQDLTLLKALVRQQLPEKYKEIFFDQSKNGYAGYIDGGASQEEFYKFIKPILEKMDGTEELLVKLNREDLLRKQRTFDNGSIPHQIHLGELHAILRRQEDFYPFLKDNREKIEKILTFRIPYYVGPLARGNSRFAWMTRKSEETITPWNFEEVVDKGASAQSFIERMTNFDKNLPNEKVLPKHSLLYEYFTVYNELTKVKYVTEGMRKPAFLSGEQKKAIVDLLFKTNRKVTVKQLKEDYFKKIECFDSVEISGVEDRFNASLGTYHDLLKIIKDKDFLDNEENEDILEDIVLTLTLFEDREMIEERLKTYAHLFDDKVMKQLKRRRYTGWGRLSRKLINGIRDKQSGKTILDFLKSDGFANRNFMQLIHDDSLTFKEDIQKAQVSGQGDSLHEHIANLAGSPAIKKGILQTVKVVDELVKVMGRHKPENIVIEMARENQTTQKGQKNSRERMKRIEEGIKELGSQILKEHPVENTQLQNEKLYLYYLQNGRDMYVDQELDINRLSDYDVDHIVPQSFLKDDSIDNKVLTRSDKARGKSDNVPSEEVVKKMKNYWRQLLNAKLITQRKFDNLTKAERGGLSELDKAGFIKRQLVETRQITKHVAQILDSRMNTKYDENDKLIREVKVITLKSKLVSDFRKDFQFYKVREINNYHHAHDAYLNAVVGTALIKKYPKLESEFVYGDYKVYDVRKMIAKSEQEIGKATAKYFFYSNIMNFFKTEITLANGEIRKRPLIETNGETGEIVWDKGRDFATVRKVLSMPQVNIVKKTEVQTGGFSKESILPKRNSDKLIARKKDWDPKKYGGFDSPTVAYSVLVVAKVEKGKSKKLKSVKELLGITIMERSSFEKNPIDFLEAKGYKEVKKDLIIKLPKYSLFELENGRKRMLASAGELQKGNELALPSKYVNFLYLASHYEKLKGSPEDNEQKQLFVEQHKHYLDEIIEQISEFSKRVILADANLDKVLSAYNKHRDKPIREQAENIIHLFTLTNLGAPAAFKYFDTTIDRKRYTSTKEVLDATLIHQSITGLYETRIDLSQLGGDGGEAAAKGGGGSEAAAKGGTVSLQDEHRLFDIPVTTSLPDVWLQDFPQAWAETGGLGRAKCQAPIIIDLKPTAVPVSIKQYPMSLEAHMGIRQHIIKFLELGVLRPCRSPWNTPLLPVKKPGTQDYRPVQDLREINKRTVDIHPTVPNPYNLLSTLKPDYSWYTVLDLKDAFFCLPLAPQSQELFAFEWKDPERGISGQLTWTRLPQGFKNSPTLFNEALHRDLTDFRTQHPEVTLLQYVDDLLLAAPTKKACTQGTRHLLQELGEKGYRASAKKAQICQTKVTYLGYILSEGKRWLTPGRIETVARIPPPRNPREVREFLGTAGFCRLWIPGFAELAAPLYALTKPSTPFTWQTEHQLAFEALKKALLSAPALGLPDTSKPFTLFLDERQGIAKGVLTQKLGPWKRPVAYLSKKLDPVAAGWPPCLRIMAATAMLVKDSAKLTLGQPLTVITPHTLEAIVRQPPDRWITNARLTHYQALLLDTDRVQFGPPVTLNPATLLPVPENQPSPHDCRQVLAETHGTREDLKDQELPDADHTWYTDGSSYLDSGTRRAGAAVVDGHNTIWAQSLPPGTSAQKAELIALTKALELSKGKKANIYTDSRYAFATAHTHGSIYERRGWLTSEGKEIKNKAEIIALLKALFLPQEVAIIHCPGHQKGQDPVAVGNRQADRVARQAAMAEVLTLATEPDNTSHITAGKRTADGSEFEKRTADGSEFESPKKKAKVE

SEQ ID NO: 1540 - protein, 2102 aa, synthetic construct
MPAAKRVKLDGGDKKYSIGLDIGTNSVGWAVITDEYKVPSKKFKVLGNTDRHSIKKNLIGALLFDSGETAEATRLKRTARRRYTRRKNRICYLQEIFSNEMAKVDDSFFHRLEESFLVEEDKKHERHPIFGNIVDEVAYHEKYPTIYHLRKKLVDSTDKADLRLIYLALAHMIKFRGHFLIEGDLNPDNSDVDKLFIQLVQTYNQLFEENPINASGVDAKAILSARLSKSRRLENLIAQLPGEKKNGLFGNLIALSLGLTPNFKSNFDLAEDAKLQLSKDTYDDDLDNLLAQIGDQYADLFLAAKNLSDAILLSDILRVNTEITKAPLSASMIKRYDEHHQDLTLLKALVRQQLPEKYKEIFFDQSKNGYAGYIDGGASQEEFYKFIKPILEKMDGTEELLVKLNREDLLRKQRTFDNGSIPHQIHLGELHAILRRQEDFYPFLKDNREKIEKILTFRIPYYVGPLARGNSRFAWMTRKSEETITPWNFEEVVDKGASAQSFIERMTNFDKNLPNEKVLPKHSLLYEYFTVYNELTKVKYVTEGMRKPAFLSGEQKKAIVDLLFKTNRKVTVKQLKEDYFKKIECFDSVEISGVEDRFNASLGTYHDLLKIIKDKDFLDNEENEDILEDIVLTLTLFEDREMIEERLKTYAHLFDDKVMKQLKRRRYTGWGRLSRKLINGIRDKQSGKTILDFLKSDGFANRNFMQLIHDDSLTFKEDIQKAQVSGQGDSLHEHIANLAGSPAIKKGILQTVKVVDELVKVMGRHKPENIVIEMARENQTTQKGQKNSRERMKRIEEGIKELGSQILKEHPVENTQLQNEKLYLYYLQNGRDMYVDQELDINRLSDYDVDHIVPQSFLKDDSIDNKVLTRSDKARGKSDNVPSEEVVKKMKNYWRQLLNAKLITQRKFDNLTKAERGGLSELDKAGFIKRQLVETRQITKHVAQILDSRMNTKYDENDKLIREVKVITLKSKLVSDFRKDFQFYKVREINNYHHAHDAYLNAVVGTALIKKYPKLESEFVYGDYKVYDVRKMIAKSEQEIGKATAKYFFYSNIMNFFKTEITLANGEIRKRPLIETNGETGEIVWDKGRDFATVRKVLSMPQVNIVKKTEVQTGGFSKESILPKRNSDKLIARKKDWDPKKYGGFDSPTVAYSVLVVAKVEKGKSKKLKSVKELLGITIMERSSFEKNPIDFLEAKGYKEVKKDLIIKLPKYSLFELENGRKRMLASAGELQKGNELALPSKYVNFLYLASHYEKLKGSPEDNEQKQLFVEQHKHYLDEIIEQISEFSKRVILADANLDKVLSAYNKHRDKPIREQAENIIHLFTLTNLGAPAAFKYFDTTIDRKRYTSTKEVLDATLIHQSITGLYETRIDLSQLGGDGGGGGGSSEAAAKGGTVSLQDEHRLFDIPVTTSLPDVWLQDFPQAWAETGGLGRAKCQAPIIIDLKPTAVPVSIKQYPMSLEAHMGIRQHIIKFLELGVLRPCRSPWNTPLLPVKKPGTQDYRPVQDLREINKRTVDIHPTVPNPYNLLSTLKPDYSWYTVLDLKDAFFCLPLAPQSQELFAFEWKDPERGISGQLTWTRLPQGFKNSPTLFNEALHRDLTDFRTQHPEVTLLQYVDDLLLAAPTKKACTQGTRHLLQELGEKGYRASAKKAQICQTKVTYLGYILSEGKRWLTPGRIETVARIPPPRNPREVREFLGTAGFCRLWIPGFAELAAPLYALTKPSTPFTWQTEHQLAFEALKKALLSAPALGLPDTSKPFTLFLDERQGIAKGVLTQKLGPWKRPVAYLSKKLDPVAAGWPPCLRIMAATAMLVKDSAKLTLGQPLTVITPHTLEAIVRQPPDRWITNARLTHYQALLLDTDRVQFGPPVTLNPATLLPVPENQPSPHDCRQVLAETHGTREDLKDQELPDADHTWYTDGSSYLDSGTRRAGAAVVDGHNTIWAQSLPPGTSAQKAELIALTKALELSKGKKANIYTDSRYAFATAHTHGSIYERRGWLTSEGKEIKNKAEIIALLKALFLPQEVAIIHCPGHQKGQDPVAVGNRQADRVARQAAMAEVLTLATEPDNTSHITAGKRTADGSEFEKRTADGSEFESPKKKAKVE

SEQ ID NO: 1541 - protein, 2094 aa, synthetic construct
MPAAKRVKLDGGDKKYSIGLDIGTNSVGWAVITDEYKVPSKKFKVLGNTDRHSIKKNLIGALLFDSGETAEATRLKRTARRRYTRRKNRICYLQEIFSNEMAKVDDSFFHRLEESFLVEEDKKHERHPIFGNIVDEVAYHEKYPTIYHLRKKLVDSTDKADLRLIYLALAHMIKFRGHFLIEGDLNPDNSDVDKLFIQLVQTYNQLFEENPINASGVDAKAILSARLSKSRRLENLIAQLPGEKKNGLFGNLIALSLGLTPNFKSNFDLAEDAKLQLSKDTYDDDLDNLLAQIGDQYADLFLAAKNLSDAILLSDILRVNTEITKAPLSASMIKRYDEHHQDLTLLKALVRQQLPEKYKEIFFDQSKNGYAGYIDGGASQEEFYKFIKPILEKMDGTEELLVKLNREDLLRKQRTFDNGSIPHQIHLGELHAILRRQEDFYPFLKDNREKIEKILTFRIPYYVGPLARGNSRFAWMTRKSEETITPWNFEEVVDKGASAQSFIERMTNFDKNLPNEKVLPKHSLLYEYFTVYNELTKVKYVTEGMRKPAFLSGEQKKAIVDLLFKTNRKVTVKQLKEDYFKKIECFDSVEISGVEDRFNASLGTYHDLLKIIKDKDFLDNEENEDILEDIVLTLTLFEDREMIEERLKTYAHLFDDKVMKQLKRRRYTGWGRLSRKLINGIRDKQSGKTILDFLKSDGFANRNFMQLIHDDSLTFKEDIQKAQVSGQGDSLHEHIANLAGSPAIKKGILQTVKVVDELVKVMGRHKPENIVIEMARENQTTQKGQKNSRERMKRIEEGIKELGSQILKEHPVENTQLQNEKLYLYYLQNGRDMYVDQELDINRLSDYDVDHIVPQSFLKDDSIDNKVLTRSDKARGKSDNVPSEEVVKKMKNYWRQLLNAKLITQRKFDNLTKAERGGLSELDKAGFIKRQLVETRQITKHVAQILDSRMNTKYDENDKLIREVKVITLKSKLVSDFRKDFQFYKVREINNYHHAHDAYLNAVVGTALIKKYPKLESEFVYGDYKVYDVRKMIAKSEQEIGKATAKYFFYSNIMNFFKTEITLANGEIRKRPLIETNGETGEIVWDKGRDFATVRKVLSMPQVNIVKKTEVQTGGFSKESILPKRNSDKLIARKKDWDPKKYGGFDSPTVAYSVLVVAKVEKGKSKKLKSVKELLGITIMERSSFEKNPIDFLEAKGYKEVKKDLIIKLPKYSLFELENGRKRMLASAGELQKGNELALPSKYVNFLYLASHYEKLKGSPEDNEQKQLFVEQHKHYLDEIIEQISEFSKRVILADANLDKVLSAYNKHRDKPIREQAENIIHLFTLTNLGAPAAFKYFDTTIDRKRYTSTKEVLDATLIHQSITGLYETRIDLSQLGGDGGGGSGGTVSLQDEHRLFDIPVTTSLPDVWLQDFPQAWAETGGLGRAKCQAPIIIDLKPTAVPVSIKQYPMSLEAHMGIRQHIIKFLELGVLRPCRSPWNTPLLPVKKPGTQDYRPVQDLREINKRTVDIHPTVPNPYNLLSTLKPDYSWYTVLDLKDAFFCLPLAPQSQELFAFEWKDPERGISGQLTWTRLPQGFKNSPTLFNEALHRDLTDFRTQHPEVTLLQYVDDLLLAAPTKKACTQGTRHLLQELGEKGYRASAKKAQICQTKVTYLGYILSEGKRWLTPGRIETVARIPPPRNPREVREFLGTAGFCRLWIPGFAELAAPLYALTKPSTPFTWQTEHQLAFEALKKALLSAPALGLPDTSKPFTLFLDERQGIAKGVLTQKLGPWKRPVAYLSKKLDPVAAGWPPCLRIMAATAMLVKDSAKLTLGQPLTVITPHTLEAIVRQPPDRWITNARLTHYQALLLDTDRVQFGPPVTLNPATLLPVPENQPSPHDCRQVLAETHGTREDLKDQELPDADHTWYTDGSSYLDSGTRRAGAAVVDGHNTIWAQSLPPGTSAQKAELIALTKALELSKGKKANIYTDSRYAFATAHTHGSIYERRGWLTSEGKEIKNKAEIIALLKALFLPQEVAIIHCPGHQKGQDPVAVGNRQADRVARQAAMAEVLTLATEPDNTSHITAGKRTADGSEFEKRTADGSEFESPKKKAKVE

SEQ ID NO: 1542 - protein, 2137 aa, synthetic construct
MPAAKRVKLDGGDKKYSIGLDIGTNSVGWAVITDEYKVPSKKFKVLGNTDRHSIKKNLIGALLFDSGETAEATRLKRTARRRYTRRKNRICYLQEIFSNEMAKVDDSFFHRLEESFLVEEDKKHERHPIFGNIVDEVAYHEKYPTIYHLRKKLVDSTDKADLRLIYLALAHMIKFRGHFLIEGDLNPDNSDVDKLFIQLVQTYNQLFEENPINASGVDAKAILSARLSKSRRLENLIAQLPGEKKNGLFGNLIALSLGLTPNFKSNFDLAEDAKLQLSKDTYDDDLDNLLAQIGDQYADLFLAAKNLSDAILLSDILRVNTEITKAPLSASMIKRYDEHHQDLTLLKALVRQQLPEKYKEIFFDQSKNGYAGYIDGGASQEEFYKFIKPILEKMDGTEELLVKLNREDLLRKQRTFDNGSIPHQIHLGELHAILRRQEDFYPFLKDNREKIEKILTFRIPYYVGPLARGNSRFAWMTRKSEETITPWNFEEVVDKGASAQSFIERMTNFDKNLPNEKVLPKHSLLYEYFTVYNELTKVKYVTEGMRKPAFLSGEQKKAIVDLLFKTNRKVTVKQLKEDYFKKIECFDSVEISGVEDRFNASLGTYHDLLKIIKDKDFLDNEENEDILEDIVLTLTLFEDREMIEERLKTYAHLFDDKVMKQLKRRRYTGWGRLSRKLINGIRDKQSGKTILDFLKSDGFANRNFMQLIHDDSLTFKEDIQKAQVSGQGDSLHEHIANLAGSPAIKKGILQTVKVVDELVKVMGRHKPENIVIEMARENQTTQKGQKNSRERMKRIEEGIKELGSQILKEHPVENTQLQNEKLYLYYLQNGRDMYVDQELDINRLSDYDVDHIVPQSFLKDDSIDNKVLTRSDKARGKSDNVPSEEVVKKMKNYWRQLLNAKLITQRKFDNLTKAERGGLSELDKAGFIKRQLVETRQITKHVAQILDSRMNTKYDENDKLIREVKVITLKSKLVSDFRKDFQFYKVREINNYHHAHDAYLNAVVGTALIKKYPKLESEFVYGDYKVYDVRKMIAKSEQEIGKATAKYFFYSNIMNFFKTEITLANGEIRKRPLIETNGETGEIVWDKGRDFATVRKVLSMPQVNIVKKTEVQTGGFSKESILPKRNSDKLIARKKDWDPKKYGGFDSPTVAYSVLVVAKVEKGKSKKLKSVKELLGITIMERSSFEKNPIDFLEAKGYKEVKKDLIIKLPKYSLFELENGRKRMLASAGELQKGNELALPSKYVNFLYLASHYEKLKGSPEDNEQKQLFVEQHKHYLDEIIEQISEFSKRVILADANLDKVLSAYNKHRDKPIREQAENIIHLFTLTNLGAPAAFKYFDTTIDRKRYTSTKEVLDATLIHQSITGLYETRIDLSQLGGDGGAEAAAKEAAAKEAAAKEAAAKALEAEAAAKEAAAKEAAAKEAAAKAGGTVSLQDEHRLFDIPVTTSLPDVWLQDFPQAWAETGGLGRAKCQAPIIIDLKPTAVPVSIKQYPMSLEAHMGIRQHIIKFLELGVLRPCRSPWNTPLLPVKKPGTQDYRPVQDLREINKRTVDIHPTVPNPYNLLSTLKPDYSWYTVLDLKDAFFCLPLAPQSQELFAFEWKDPERGISGQLTWTRLPQGFKNSPTLFNEALHRDLTDFRTQHPEVTLLQYVDDLLLAAPTKKACTQGTRHLLQELGEKGYRASAKKAQICQTKVTYLGYILSEGKRWLTPGRIETVARIPPPRNPREVREFLGTAGFCRLWIPGFAELAAPLYALTKPSTPFTWQTEHQLAFEALKKALLSAPALGLPDTSKPFTLFLDERQGIAKGVLTQKLGPWKRPVAYLSKKLDPVAAGWPPCLRIMAATAMLVKDSAKLTLGQPLTVITPHTLEAIVRQPPDRWITNARLTHYQALLLDTDRVQFGPPVTLNPATLLPVPENQPSPHDCRQVLAETHGTREDLKDQELPDADHTWYTDGSSYLDSGTRRAGAAVVDGHNTIWAQSLPPGTSAQKAELIALTKALELSKGKKANIYTDSRYAFATAHTHGSIYERRGWLTSEGKEIKNKAEIIALLKALFLPQEVAIIHCPGHQKGQDPVAVGNRQADRVARQAAMAEVLTLATEPDNTSHITAGKRTADGSEFEKRTADGSEFESPKKKAKVE

SEQ ID NO: 1543 - protein, 2116 aa, synthetic construct
MPAAKRVKLDGGDKKYSIGLDIGTNSVGWAVITDEYKVPSKKFKVLGNTDRHSIKKNLIGALLFDSGETAEATRLKRTARRRYTRRKNRICYLQEIFSNEMAKVDDSFFHRLEESFLVEEDKKHERHPIFGNIVDEVAYHEKYPTIYHLRKKLVDSTDKADLRLIYLALAHMIKFRGHFLIEGDLNPDNSDVDKLFIQLVQTYNQLFEENPINASGVDAKAILSARLSKSRRLENLIAQLPGEKKNGLFGNLIALSLGLTPNFKSNFDLAEDAKLQLSKDTYDDDLDNLLAQIGDQYADLFLAAKNLSDAILLSDILRVNTEITKAPLSASMIKRYDEHHQDLTLLKALVRQQLPEKYKEIFFDQSKNGYAGYIDGGASQEEFYKFIKPILEKMDGTEELLVKLNREDLLRKQRTFDNGSIPHQIHLGELHAILRRQEDFYPFLKDNREKIEKILTFRIPYYVGPLARGNSRFAWMTRKSEETITPWNFEEVVDKGASAQSFIERMTNFDKNLPNEKVLPKHSLLYEYFTVYNELTKVKYVTEGMRKPAFLSGEQKKAIVDLLFKTNRKVTVKQLKEDYFKKIECFDSVEISGVEDRFNASLGTYHDLLKIIKDKDFLDNEENEDILEDIVLTLTLFEDREMIEERLKTYAHLFDDKVMKQLKRRRYTGWGRLSRKLINGIRDKQSGKTILDFLKSDGFANRNFMQLIHDDSLTFKEDIQKAQVSGQGDSLHEHIANLAGSPAIKKGILQTVKVVDELVKVMGRHKPENIVIEMARENQTTQKGQKNSRERMKRIEEGIKELGSQILKEHPVENTQLQNEKLYLYYLQNGRDMYVDQELDINRLSDYDVDHIVPQSFLKDDSIDNKVLTRSDKARGKSDNVPSEEVVKKMKNYWRQLLNAKLITQRKFDNLTKAERGGLSELDKAGFIKRQLVETRQITKHVAQILDSRMNTKYDENDKLIREVKVITLKSKLVSDFRKDFQFYKVREINNYHHAHDAYLNAVVGTALIKKYPKLESEFVYGDYKVYDVRKMIAKSEQEIGKATAKYFFYSNIMNFFKTEITLANGEIRKRPLIETNGETGEIVWDKGRDFATVRKVLSMPQVNIVKKTEVQTGGFSKESILPKRNSDKLIARKKDWDPKKYGGFDSPTVAYSVLVVAKVEKGKSKKLKSVKELLGITIMERSSFEKNPIDFLEAKGYKEVKKDLIIKLPKYSLFELENGRKRMLASAGELQKGNELALPSKYVNFLYLASHYEKLKGSPEDNEQKQLFVEQHKHYLDEIIEQISEFSKRVILADANLDKVLSAYNKHRDKPIREQAENIIHLFTLTNLGAPAAFKYFDTTIDRKRYTSTKEVLDATLIHQSITGLYETRIDLSQLGGDGGGGGGSGGGGSGGGGSGGGGSGGGGSGGTVSLQDEHRLFDIPVTTSLPDVWLQDFPQAWAETGGLGRAKCQAPIIIDLKPTAVPVSIKQYPMSLEAHMGIRQHIIKFLELGVLRPCRSPWNTPLLPVKKPGTQDYRPVQDLREINKRTVDIHPTVPNPYNLLSTLKPDYSWYTVLDLKDAFFCLPLAPQSQELFAFEWKDPERGISGQLTWTRLPQGFKNSPTLFNEALHRDLTDFRTQHPEVTLLQYVDDLLLAAPTKKACTQGTRHLLQELGEKGYRASAKKAQICQTKVTYLGYILSEGKRWLTPGRIETVARIPPPRNPREVREFLGTAGFCRLWIPGFAELAAPLYALTKPSTPFTWQTEHQLAFEALKKALLSAPALGLPDTSKPFTLFLDERQGIAKGVLTQKLGPWKRPVAYLSKKLDPVAAGWPPCLRIMAATAMLVKDSAKLTLGQPLTVITPHTLEAIVRQPPDRWITNARLTHYQALLLDTDRVQFGPPVTLNPATLLPVPENQPSPHDCRQVLAETHGTREDLKDQELPDADHTWYTDGSSYLDSGTRRAGAAVVDGHNTIWAQSLPPGTSAQKAELIALTKALELSKGKKANIYTDSRYAFATAHTHGSIYERRGWLTSEGKEIKNKAEIIALLKALFLPQEVAIIHCPGHQKGQDPVAVGNRQADRVARQAAMAEVLTLATEPDNTSHITAGKRTADGSEFEKRTADGSEFESPKKKAKVE

SEQ ID NO: 1544 - protein, 2099 aa, synthetic construct
MPAAKRVKLDGGDKKYSIGLDIGTNSVGWAVITDEYKVPSKKFKVLGNTDRHSIKKNLIGALLFDSGETAEATRLKRTARRRYTRRKNRICYLQEIFSNEMAKVDDSFFHRLEESFLVEEDKKHERHPIFGNIVDEVAYHEKYPTIYHLRKKLVDSTDKADLRLIYLALAHMIKFRGHFLIEGDLNPDNSDVDKLFIQLVQTYNQLFEENPINASGVDAKAILSARLSKSRRLENLIAQLPGEKKNGLFGNLIALSLGLTPNFKSNFDLAEDAKLQLSKDTYDDDLDNLLAQIGDQYADLFLAAKNLSDAILLSDILRVNTEITKAPLSASMIKRYDEHHQDLTLLKALVRQQLPEKYKEIFFDQSKNGYAGYIDGGASQEEFYKFIKPILEKMDGTEELLVKLNREDLLRKQRTFDNGSIPHQIHLGELHAILRRQEDFYPFLKDNREKIEKILTFRIPYYVGPLARGNSRFAWMTRKSEETITPWNFEEVVDKGASAQSFIERMTNFDKNLPNEKVLPKHSLLYEYFTVYNELTKVKYVTEGMRKPAFLSGEQKKAIVDLLFKTNRKVTVKQLKEDYFKKIECFDSVEISGVEDRFNASLGTYHDLLKIIKDKDFLDNEENEDILEDIVLTLTLFEDREMIEERLKTYAHLFDDKVMKQLKRRRYTGWGRLSRKLINGIRDKQSGKTILDFLKSDGFANRNFMQLIHDDSLTFKEDIQKAQVSGQGDSLHEHIANLAGSPAIKKGILQTVKVVDELVKVMGRHKPENIVIEMARENQTTQKGQKNSRERMKRIEEGIKELGSQILKEHPVENTQLQNEKLYLYYLQNGRDMYVDQELDINRLSDYDVDHIVPQSFLKDDSIDNKVLTRSDKARGKSDNVPSEEVVKKMKNYWRQLLNAKLITQRKFDNLTKAERGGLSELDKAGFIKRQLVETRQITKHVAQILDSRMNTKYDENDKLIREVKVITLKSKLVSDFRKDFQFYKVREINNYHHAHDAYLNAVVGTALIKKYPKLESEFVYGDYKVYDVRKMIAKSEQEIGKATAKYFFYSNIMNFFKTEITLANGEIRKRPLIETNGETGEIVWDKGRDFATVRKVLSMPQVNIVKKTEVQTGGFSKESILPKRNSDKLIARKKDWDPKKYGGFDSPTVAYSVLVVAKVEKGKSKKLKSVKELLGITIMERSSFEKNPIDFLEAKGYKEVKKDLIIKLPKYSLFELENGRKRMLASAGELQKGNELALPSKYVNFLYLASHYEKLKGSPEDNEQKQLFVEQHKHYLDEIIEQISEFSKRVILADANLDKVLSAYNKHRDKPIREQAENIIHLFTLTNLGAPAAFKYFDTTIDRKRYTSTKEVLDATLIHQSITGLYETRIDLSQLGGDGGEAAAKPAPGGTVSLQDEHRLFDIPVTTSLPDVWLQDFPQAWAETGGLGRAKCQAPIIIDLKPTAVPVSIKQYPMSLEAHMGIRQHIIKFLELGVLRPCRSPWNTPLLPVKKPGTQDYRPVQDLREINKRTVDIHPTVPNPYNLLSTLKPDYSWYTVLDLKDAFFCLPLAPQSQELFAFEWKDPERGISGQLTWTRLPQGFKNSPTLFNEALHRDLTDFRTQHPEVTLLQYVDDLLLAAPTKKACTQGTRHLLQELGEKGYRASAKKAQICQTKVTYLGYILSEGKRWLTPGRIETVARIPPPRNPREVREFLGTAGFCRLWIPGFAELAAPLYALTKPSTPFTWQTEHQLAFEALKKALLSAPALGLPDTSKPFTLFLDERQGIAKGVLTQKLGPWKRPVAYLSKKLDPVAAGWPPCLRIMAATAMLVKDSAKLTLGQPLTVITPHTLEAIVRQPPDRWITNARLTHYQALLLDTDRVQFGPPVTLNPATLLPVPENQPSPHDCRQVLAETHGTREDLKDQELPDADHTWYTDGSSYLDSGTRRAGAAVVDGHNTIWAQSLPPGTSAQKAELIALTKALELSKGKKANIYTDSRYAFATAHTHGSIYERRGWLTSEGKEIKNKAEIIALLKALFLPQEVAIIHCPGHQKGQDPVAVGNRQADRVARQAAMAEVLTLATEPDNTSHITAGKRTADGSEFEKRTADGSEFESPKKKAKVE

SEQ ID NO: 1545 - protein, 2094 aa, synthetic construct
MPAAKRVKLDGGDKKYSIGLDIGTNSVGWAVITDEYKVPSKKFKVLGNTDRHSIKKNLIGALLFDSGETAEATRLKRTARRRYTRRKNRICYLQEIFSNEMAKVDDSFFHRLEESFLVEEDKKHERHPIFGNIVDEVAYHEKYPTIYHLRKKLVDSTDKADLRLIYLALAHMIKFRGHFLIEGDLNPDNSDVDKLFIQLVQTYNQLFEENPINASGVDAKAILSARLSKSRRLENLIAQLPGEKKNGLFGNLIALSLGLTPNFKSNFDLAEDAKLQLSKDTYDDDLDNLLAQIGDQYADLFLAAKNLSDAILLSDILRVNTEITKAPLSASMIKRYDEHHQDLTLLKALVRQQLPEKYKEIFFDQSKNGYAGYIDGGASQEEFYKFIKPILEKMDGTEELLVKLNREDLLRKQRTFDNGSIPHQIHLGELHAILRRQEDFYPFLKDNREKIEKILTFRIPYYVGPLARGNSRFAWMTRKSEETITPWNFEEVVDKGASAQSFIERMTNFDKNLPNEKVLPKHSLLYEYFTVYNELTKVKYVTEGMRKPAFLSGEQKKAIVDLLFKTNRKVTVKQLKEDYFKKIECFDSVEISGVEDRFNASLGTYHDLLKIIKDKDFLDNEENEDILEDIVLTLTLFEDREMIEERLKTYAHLFDDKVMKQLKRRRYTGWGRLSRKLINGIRDKQSGKTILDFLKSDGFANRNFMQLIHDDSLTFKEDIQKAQVSGQGDSLHEHIANLAGSPAIKKGILQTVKVVDELVKVMGRHKPENIVIEMARENQTTQKGQKNSRERMKRIEEGIKELGSQILKEHPVENTQLQNEKLYLYYLQNGRDMYVDQELDINRLSDYDVDHIVPQSFLKDDSIDNKVLTRSDKARGKSDNVPSEEVVKKMKNYWRQLLNAKLITQRKFDNLTKAERGGLSELDKAGFIKRQLVETRQITKHVAQILDSRMNTKYDENDKLIREVKVITLKSKLVSDFRKDFQFYKVREINNYHHAHDAYLNAVVGTALIKKYPKLESEFVYGDYKVYDVRKMIAKSEQEIGKATAKYFFYSNIMNFFKTEITLANGEIRKRPLIETNGETGEIVWDKGRDFATVRKVLSMPQVNIVKKTEVQTGGFSKESILPKRNSDKLIARKKDWDPKKYGGFDSPTVAYSVLVVAKVEKGKSKKLKSVKELLGITIMERSSFEKNPIDFLEAKGYKEVKKDLIIKLPKYSLFELENGRKRMLASAGELQKGNELALPSKYVNFLYLASHYEKLKGSPEDNEQKQLFVEQHKHYLDEIIEQISEFSKRVILADANLDKVLSAYNKHRDKPIREQAENIIHLFTLTNLGAPAAFKYFDTTIDRKRYTSTKEVLDATLIHQSITGLYETRIDLSQLGGDGGGSSGGTVSLQDEHRLFDIPVTTSLPDVWLQDFPQAWAETGGLGRAKCQAPIIIDLKPTAVPVSIKQYPMSLEAHMGIRQHIIKFLELGVLRPCRSPWNTPLLPVKKPGTQDYRPVQDLREINKRTVDIHPTVPNPYNLLSTLKPDYSWYTVLDLKDAFFCLPLAPQSQELFAFEWKDPERGISGQLTWTRLPQGFKNSPTLFNEALHRDLTDFRTQHPEVTLLQYVDDLLLAAPTKKACTQGTRHLLQELGEKGYRASAKKAQICQTKVTYLGYILSEGKRWLTPGRIETVARIPPPRNPREVREFLGTAGFCRLWIPGFAELAAPLYALTKPSTPFTWQTEHQLAFEALKKALLSAPALGLPDTSKPFTLFLDERQGIAKGVLTQKLGPWKRPVAYLSKKLDPVAAGWPPCLRIMAATAMLVKDSAKLTLGQPLTVITPHTLEAIVRQPPDRWITNARLTHYQALLLDTDRVQFGPPVTLNPATLLPVPENQPSPHDCRQVLAETHGTREDLKDQELPDADHTWYTDGSSYLDSGTRRAGAAVVDGHNTIWAQSLPPGTSAQKAELIALTKALELSKGKKANIYTDSRYAFATAHTHGSIYERRGWLTSEGKEIKNKAEIIALLKALFLPQEVAIIHCPGHQKGQDPVAVGNRQADRVARQAAMAEVLTLATEPDNTSHITAGKRTADGSEFEKRTADGSEFESPKKKAKVE

SEQ ID NO: 1546 - protein, 2116 aa, synthetic construct
MPAAKRVKLDGGDKKYSIGLDIGTNSVGWAVITDEYKVPSKKFKVLGNTDRHSIKKNLIGALLFDSGETAEATRLKRTARRRYTRRKNRICYLQEIFSNEMAKVDDSFFHRLEESFLVEEDKKHERHPIFGNIVDEVAYHEKYPTIYHLRKKLVDSTDKADLRLIYLALAHMIKFRGHFLIEGDLNPDNSDVDKLFIQLVQTYNQLFEENPINASGVDAKAILSARLSKSRRLENLIAQLPGEKKNGLFGNLIALSLGLTPNFKSNFDLAEDAKLQLSKDTYDDDLDNLLAQIGDQYADLFLAAKNLSDAILLSDILRVNTEITKAPLSASMIKRYDEHHQDLTLLKALVRQQLPEKYKEIFFDQSKNGYAGYIDGGASQEEFYKFIKPILEKMDGTEELLVKLNREDLLRKQRTFDNGSIPHQIHLGELHAILRRQEDFYPFLKDNREKIEKILTFRIPYYVGPLARGNSRFAWMTRKSEETITPWNFEEVVDKGASAQSFIERMTNFDKNLPNEKVLPKHSLLYEYFTVYNELTKVKYVTEGMRKPAFLSGEQKKAIVDLLFKTNRKVTVKQLKEDYFKKIECFDSVEISGVEDRFNASLGTYHDLLKIIKDKDFLDNEENEDILEDIVLTLTLFEDREMIEERLKTYAHLFDDKVMKQLKRRRYTGWGRLSRKLINGIRDKQSGKTILDFLKSDGFANRNFMQLIHDDSLTFKEDIQKAQVSGQGDSLHEHIANLAGSPAIKKGILQTVKVVDELVKVMGRHKPENIVIEMARENQTTQKGQKNSRERMKRIEEGIKELGSQILKEHPVENTQLQNEKLYLYYLQNGRDMYVDQELDINRLSDYDVDHIVPQSFLKDDSIDNKVLTRSDKARGKSDNVPSEEVVKKMKNYWRQLLNAKLITQRKFDNLTKAERGGLSELDKAGFIKRQLVETRQITKHVAQILDSRMNTKYDENDKLIREVKVITLKSKLVSDFRKDFQFYKVREINNYHHAHDAYLNAVVGTALIKKYPKLESEFVYGDYKVYDVRKMIAKSEQEIGKATAKYFFYSNIMNFFKTEITLANGEIRKRPLIETNGETGEIVWDKGRDFATVRKVLSMPQVNIVKKTEVQTGGFSKESILPKRNSDKLIARKKDWDPKKYGGFDSPTVAYSVLVVAKVEKGKSKKLKSVKELLGITIMERSSFEKNPIDFLEAKGYKEVKKDLIIKLPKYSLFELENGRKRMLASAGELQKGNELALPSKYVNFLYLASHYEKLKGSPEDNEQKQLFVEQHKHYLDEIIEQISEFSKRVILADANLDKVLSAYNKHRDKPIREQAENIIHLFTLTNLGAPAAFKYFDTTIDRKRYTSTKEVLDATLIHQSITGLYETRIDLSQLGGDGGEAAAKEAAAKEAAAKEAAAKEAAAKGGTVSLQDEHRLFDIPVTTSLPDVWLQDFPQAWAETGGLGRAKCQAPIIIDLKPTAVPVSIKQYPMSLEAHMGIRQHIIKFLELGVLRPCRSPWNTPLLPVKKPGTQDYRPVQDLREINKRTVDIHPTVPNPYNLLSTLKPDYSWYTVLDLKDAFFCLPLAPQSQELFAFEWKDPERGISGQLTWTRLPQGFKNSPTLFNEALHRDLTDFRTQHPEVTLLQYVDDLLLAAPTKKACTQGTRHLLQELGEKGYRASAKKAQICQTKVTYLGYILSEGKRWLTPGRIETVARIPPPRNPREVREFLGTAGFCRLWIPGFAELAAPLYALTKPSTPFTWQTEHQLAFEALKKALLSAPALGLPDTSKPFTLFLDERQGIAKGVLTQKLGPWKRPVAYLSKKLDPVAAGWPPCLRIMAATAMLVKDSAKLTLGQPLTVITPHTLEAIVRQPPDRWITNARLTHYQALLLDTDRVQFGPPVTLNPATLLPVPENQPSPHDCRQVLAETHGTREDLKDQELPDADHTWYTDGSSYLDSGTRRAGAAVVDGHNTIWAQSLPPGTSAQKAELIALTKALELSKGKKANIYTDSRYAFATAHTHGSIYERRGWLTSEGKEIKNKAEIIALLKALFLPQEVAIIHCPGHQKGQDPVAVGNRQADRVARQAAMAEVLTLATEPDNTSHITAGKRTADGSEFEKRTADGSEFESPKKKAKVE

SEQ ID NO: 1547 - protein, 2099 aa, synthetic construct
MPAAKRVKLDGGDKKYSIGLDIGTNSVGWAVITDEYKVPSKKFKVLGNTDRHSIKKNLIGALLFDSGETAEATRLKRTARRRYTRRKNRICYLQEIFSNEMAKVDDSFFHRLEESFLVEEDKKHERHPIFGNIVDEVAYHEKYPTIYHLRKKLVDSTDKADLRLIYLALAHMIKFRGHFLIEGDLNPDNSDVDKLFIQLVQTYNQLFEENPINASGVDAKAILSARLSKSRRLENLIAQLPGEKKNGLFGNLIALSLGLTPNFKSNFDLAEDAKLQLSKDTYDDDLDNLLAQIGDQYADLFLAAKNLSDAILLSDILRVNTEITKAPLSASMIKRYDEHHQDLTLLKALVRQQLPEKYKEIFFDQSKNGYAGYIDGGASQEEFYKFIKPILEKMDGTEELLVKLNREDLLRKQRTFDNGSIPHQIHLGELHAILRRQEDFYPFLKDNREKIEKILTFRIPYYVGPLARGNSRFAWMTRKSEETITPWNFEEVVDKGASAQSFIERMTNFDKNLPNEKVLPKHSLLYEYFTVYNELTKVKYVTEGMRKPAFLSGEQKKAIVDLLFKTNRKVTVKQLKEDYFKKIECFDSVEISGVEDRFNASLGTYHDLLKIIKDKDFLDNEENEDILEDIVLTLTLFEDREMIEERLKTYAHLFDDKVMKQLKRRRYTGWGRLSRKLINGIRDKQSGKTILDFLKSDGFANRNFMQLIHDDSLTFKEDIQKAQVSGQGDSLHEHIANLAGSPAIKKGILQTVKVVDELVKVMGRHKPENIVIEMARENQTTQKGQKNSRERMKRIEEGIKELGSQILKEHPVENTQLQNEKLYLYYLQNGRDMYVDQELDINRLSDYDVDHIVPQSFLKDDSIDNKVLTRSDKARGKSDNVPSEEVVKKMKNYWRQLLNAKLITQRKFDNLTKAERGGLSELDKAGFIKRQLVETRQITKHVAQILDSRMNTKYDENDKLIREVKVITLKSKLVSDFRKDFQFYKVREINNYHHAHDAYLNAVVGTALIKKYPKLESEFVYGDYKVYDVRKMIAKSEQEIGKATAKYFFYSNIMNFFKTEITLANGEIRKRPLIETNGETGEIVWDKGRDFATVRKVLSMPQVNIVKKTEVQTGGFSKESILPKRNSDKLIARKKDWDPKKYGGFDSPTVAYSVLVVAKVEKGKSKKLKSVKELLGITIMERSSFEKNPIDFLEAKGYKEVKKDLIIKLPKYSLFELENGRKRMLASAGELQKGNELALPSKYVNFLYLASHYEKLKGSPEDNEQKQLFVEQHKHYLDEIIEQISEFSKRVILADANLDKVLSAYNKHRDKPIREQAENIIHLFTLTNLGAPAAFKYFDTTIDRKRYTSTKEVLDATLIHQSITGLYETRIDLSQLGGDGGEAAAKGGGGGTVSLQDEHRLFDIPVTTSLPDVWLQDFPQAWAETGGLGRAKCQAPIIIDLKPTAVPVSIKQYPMSLEAHMGIRQHIIKFLELGVLRPCRSPWNTPLLPVKKPGTQDYRPVQDLREINKRTVDIHPTVPNPYNLLSTLKPDYSWYTVLDLKDAFFCLPLAPQSQELFAFEWKDPERGISGQLTWTRLPQGFKNSPTLFNEALHRDLTDFRTQHPEVTLLQYVDDLLLAAPTKKACTQGTRHLLQELGEKGYRASAKKAQICQTKVTYLGYILSEGKRWLTPGRIETVARIPPPRNPREVREFLGTAGFCRLWIPGFAELAAPLYALTKPSTPFTWQTEHQLAFEALKKALLSAPALGLPDTSKPFTLFLDERQGIAKGVLTQKLGPWKRPVAYLSKKLDPVAAGWPPCLRIMAATAMLVKDSAKLTLGQPLTVITPHTLEAIVRQPPDRWITNARLTHYQALLLDTDRVQFGPPVTLNPATLLPVPENQPSPHDCRQVLAETHGTREDLKDQELPDADHTWYTDGSSYLDSGTRRAGAAVVDGHNTIWAQSLPPGTSAQKAELIALTKALELSKGKKANIYTDSRYAFATAHTHGSIYERRGWLTSEGKEIKNKAEIIALLKALFLPQEVAIIHCPGHQKGQDPVAVGNRQADRVARQAAMAEVLTLATEPDNTSHITAGKRTADGSEFEKRTADGSEFESPKKKAKVE

SEQ ID NO: 1548 - protein, 2097 aa, synthetic construct
MPAAKRVKLDGGDKKYSIGLDIGTNSVGWAVITDEYKVPSKKFKVLGNTDRHSIKKNLIGALLFDSGETAEATRLKRTARRRYTRRKNRICYLQEIFSNEMAKVDDSFFHRLEESFLVEEDKKHERHPIFGNIVDEVAYHEKYPTIYHLRKKLVDSTDKADLRLIYLALAHMIKFRGHFLIEGDLNPDNSDVDKLFIQLVQTYNQLFEENPINASGVDAKAILSARLSKSRRLENLIAQLPGEKKNGLFGNLIALSLGLTPNFKSNFDLAEDAKLQLSKDTYDDDLDNLLAQIGDQYADLFLAAKNLSDAILLSDILRVNTEITKAPLSASMIKRYDEHHQDLTLLKALVRQQLPEKYKEIFFDQSKNGYAGYIDGGASQEEFYKFIKPILEKMDGTEELLVKLNREDLLRKQRTFDNGSIPHQIHLGELHAILRRQEDFYPFLKDNREKIEKILTFRIPYYVGPLARGNSRFAWMTRKSEETITPWNFEEVVDKGASAQSFIERMTNFDKNLPNEKVLPKHSLLYEYFTVYNELTKVKYVTEGMRKPAFLSGEQKKAIVDLLFKTNRKVTVKQLKEDYFKKIECFDSVEISGVEDRFNASLGTYHDLLKIIKDKDFLDNEENEDILEDIVLTLTLFEDREMIEERLKTYAHLFDDKVMKQLKRRRYTGWGRLSRKLINGIRDKQSGKTILDFLKSDGFANRNFMQLIHDDSLTFKEDIQKAQVSGQGDSLHEHIANLAGSPAIKKGILQTVKVVDELVKVMGRHKPENIVIEMARENQTTQKGQKNSRERMKRIEEGIKELGSQILKEHPVENTQLQNEKLYLYYLQNGRDMYVDQELDINRLSDYDVDHIVPQSFLKDDSIDNKVLTRSDKARGKSDNVPSEEVVKKMKNYWRQLLNAKLITQRKFDNLTKAERGGLSELDKAGFIKRQLVETRQITKHVAQILDSRMNTKYDENDKLIREVKVITLKSKLVSDFRKDFQFYKVREINNYHHAHDAYLNAVVGTALIKKYPKLESEFVYGDYKVYDVRKMIAKSEQEIGKATAKYFFYSNIMNFFKTEITLANGEIRKRPLIETNGETGEIVWDKGRDFATVRKVLSMPQVNIVKKTEVQTGGFSKESILPKRNSDKLIARKKDWDPKKYGGFDSPTVAYSVLVVAKVEKGKSKKLKSVKELLGITIMERSSFEKNPIDFLEAKGYKEVKKDLIIKLPKYSLFELENGRKRMLASAGELQKGNELALPSKYVNFLYLASHYEKLKGSPEDNEQKQLFVEQHKHYLDEIIEQISEFSKRVILADANLDKVLSAYNKHRDKPIREQAENIIHLFTLTNLGAPAAFKYFDTTIDRKRYTSTKEVLDATLIHQSITGLYETRIDLSQLGGDGGGSSGGGGGTVSLQDEHRLFDIPVTTSLPDVWLQDFPQAWAETGGLGRAKCQAPIIIDLKPTAVPVSIKQYPMSLEAHMGIRQHIIKFLELGVLRPCRSPWNTPLLPVKKPGTQDYRPVQDLREINKRTVDIHPTVPNPYNLLSTLKPDYSWYTVLDLKDAFFCLPLAPQSQELFAFEWKDPERGISGQLTWTRLPQGFKNSPTLFNEALHRDLTDFRTQHPEVTLLQYVDDLLLAAPTKKACTQGTRHLLQELGEKGYRASAKKAQICQTKVTYLGYILSEGKRWLTPGRIETVARIPPPRNPREVREFLGTAGFCRLWIPGFAELAAPLYALTKPSTPFTWQTEHQLAFEALKKALLSAPALGLPDTSKPFTLFLDERQGIAKGVLTQKLGPWKRPVAYLSKKLDPVAAGWPPCLRIMAATAMLVKDSAKLTLGQPLTVITPHTLEAIVRQPPDRWITNARLTHYQALLLDTDRVQFGPPVTLNPATLLPVPENQPSPHDCRQVLAETHGTREDLKDQELPDADHTWYTDGSSYLDSGTRRAGAAVVDGHNTIWAQSLPPGTSAQKAELIALTKALELSKGKKANIYTDSRYAFATAHTHGSIYERRGWLTSEGKEIKNKAEIIALLKALFLPQEVAIIHCPGHQKGQDPVAVGNRQADRVARQAAMAEVLTLATEPDNTSHITAGKRTADGSEFEKRTADGSEFESPKKKAKVE

SEQ ID NO: 1549 - protein, 2102 aa, synthetic construct
MPAAKRVKLDGGDKKYSIGLDIGTNSVGWAVITDEYKVPSKKFKVLGNTDRHSIKKNLIGALLFDSGETAEATRLKRTARRRYTRRKNRICYLQEIFSNEMAKVDDSFFHRLEESFLVEEDKKHERHPIFGNIVDEVAYHEKYPTIYHLRKKLVDSTDKADLRLIYLALAHMIKFRGHFLIEGDLNPDNSDVDKLFIQLVQTYNQLFEENPINASGVDAKAILSARLSKSRRLENLIAQLPGEKKNGLFGNLIALSLGLTPNFKSNFDLAEDAKLQLSKDTYDDDLDNLLAQIGDQYADLFLAAKNLSDAILLSDILRVNTEITKAPLSASMIKRYDEHHQDLTLLKALVRQQLPEKYKEIFFDQSKNGYAGYIDGGASQEEFYKFIKPILEKMDGTEELLVKLNREDLLRKQRTFDNGSIPHQIHLGELHAILRRQEDFYPFLKDNREKIEKILTFRIPYYVGPLARGNSRFAWMTRKSEETITPWNFEEVVDKGASAQSFIERMTNFDKNLPNEKVLPKHSLLYEYFTVYNELTKVKYVTEGMRKPAFLSGEQKKAIVDLLFKTNRKVTVKQLKEDYFKKIECFDSVEISGVEDRFNASLGTYHDLLKIIKDKDFLDNEENEDILEDIVLTLTLFEDREMIEERLKTYAHLFDDKVMKQLKRRRYTGWGRLSRKLINGIRDKQSGKTILDFLKSDGFANRNFMQLIHDDSLTFKEDIQKAQVSGQGDSLHEHIANLAGSPAIKKGILQTVKVVDELVKVMGRHKPENIVIEMARENQTTQKGQKNSRERMKRIEEGIKELGSQILKEHPVENTQLQNEKLYLYYLQNGRDMYVDQELDINRLSDYDVDHIVPQSFLKDDSIDNKVLTRSDKARGKSDNVPSEEVVKKMKNYWRQLLNAKLITQRKFDNLTKAERGGLSELDKAGFIKRQLVETRQITKHVAQILDSRMNTKYDENDKLIREVKVITLKSKLVSDFRKDFQFYKVREINNYHHAHDAYLNAVVGTALIKKYPKLESEFVYGDYKVYDVRKMIAKSEQEIGKATAKYFFYSNIMNFFKTEITLANGEIRKRPLIETNGETGEIVWDKGRDFATVRKVLSMPQVNIVKKTEVQTGGFSKESILPKRNSDKLIARKKDWDPKKYGGFDSPTVAYSVLVVAKVEKGKSKKLKSVKELLGITIMERSSFEKNPIDFLEAKGYKEVKKDLIIKLPKYSLFELENGRKRMLASAGELQKGNELALPSKYVNFLYLASHYEKLKGSPEDNEQKQLFVEQHKHYLDEIIEQISEFSKRVILADANLDKVLSAYNKHRDKPIREQAENIIHLFTLTNLGAPAAFKYFDTTIDRKRYTSTKEVLDATLIHQSITGLYETRIDLSQLGGDGGGGSGSSEAAAKGGTVSLQDEHRLFDIPVTTSLPDVWLQDFPQAWAETGGLGRAKCQAPIIIDLKPTAVPVSIKQYPMSLEAHMGIRQHIIKFLELGVLRPCRSPWNTPLLPVKKPGTQDYRPVQDLREINKRTVDIHPTVPNPYNLLSTLKPDYSWYTVLDLKDAFFCLPLAPQSQELFAFEWKDPERGISGQLTWTRLPQGFKNSPTLFNEALHRDLTDFRTQHPEVTLLQYVDDLLLAAPTKKACTQGTRHLLQELGEKGYRASAKKAQICQTKVTYLGYILSEGKRWLTPGRIETVARIPPPRNPREVREFLGTAGFCRLWIPGFAELAAPLYALTKPSTPFTWQTEHQLAFEALKKALLSAPALGLPDTSKPFTLFLDERQGIAKGVLTQKLGPWKRPVAYLSKKLDPVAAGWPPCLRIMAATAMLVKDSAKLTLGQPLTVITPHTLEAIVRQPPDRWITNARLTHYQALLLDTDRVQFGPPVTLNPATLLPVPENQPSPHDCRQVLAETHGTREDLKDQELPDADHTWYTDGSSYLDSGTRRAGAAVVDGHNTIWAQSLPPGTSAQKAELIALTKALELSKGKKANIYTDSRYAFATAHTHGSIYERRGWLTSEGKEIKNKAEIIALLKALFLPQEVAIIHCPGHQKGQDPVAVGNRQADRVARQAAMAEVLTLATEPDNTSHITAGKRTADGSEFEKRTADGSEFESPKKKAKVE

SEQ ID NO: 1550 - protein, 2100 aa, synthetic construct
MPAAKRVKLDGGDKKYSIGLDIGTNSVGWAVITDEYKVPSKKFKVLGNTDRHSIKKNLIGALLFDSGETAEATRLKRTARRRYTRRKNRICYLQEIFSNEMAKVDDSFFHRLEESFLVEEDKKHERHPIFGNIVDEVAYHEKYPTIYHLRKKLVDSTDKADLRLIYLALAHMIKFRGHFLIEGDLNPDNSDVDKLFIQLVQTYNQLFEENPINASGVDAKAILSARLSKSRRLENLIAQLPGEKKNGLFGNLIALSLGLTPNFKSNFDLAEDAKLQLSKDTYDDDLDNLLAQIGDQYADLFLAAKNLSDAILLSDILRVNTEITKAPLSASMIKRYDEHHQDLTLLKALVRQQLPEKYKEIFFDQSKNGYAGYIDGGASQEEFYKFIKPILEKMDGTEELLVKLNREDLLRKQRTFDNGSIPHQIHLGELHAILRRQEDFYPFLKDNREKIEKILTFRIPYYVGPLARGNSRFAWMTRKSEETITPWNFEEVVDKGASAQSFIERMTNFDKNLPNEKVLPKHSLLYEYFTVYNELTKVKYVTEGMRKPAFLSGEQKKAIVDLLFKTNRKVTVKQLKEDYFKKIECFDSVEISGVEDRFNASLGTYHDLLKIIKDKDFLDNEENEDILEDIVLTLTLFEDREMIEERLKTYAHLFDDKVMKQLKRRRYTGWGRLSRKLINGIRDKQSGKTILDFLKSDGFANRNFMQLIHDDSLTFKEDIQKAQVSGQGDSLHEHIANLAGSPAIKKGILQTVKVVDELVKVMGRHKPENIVIEMARENQTTQKGQKNSRERMKRIEEGIKELGSQILKEHPVENTQLQNEKLYLYYLQNGRDMYVDQELDINRLSDYDVDHIVPQSFLKDDSIDNKVLTRSDKARGKSDNVPSEEVVKKMKNYWRQLLNAKLITQRKFDNLTKAERGGLSELDKAGFIKRQLVETRQITKHVAQILDSRMNTKYDENDKLIREVKVITLKSKLVSDFRKDFQFYKVREINNYHHAHDAYLNAVVGTALIKKYPKLESEFVYGDYKVYDVRKMIAKSEQEIGKATAKYFFYSNIMNFFKTEITLANGEIRKRPLIETNGETGEIVWDKGRDFATVRKVLSMPQVNIVKKTEVQTGGFSKESILPKRNSDKLIARKKDWDPKKYGGFDSPTVAYSVLVVAKVEKGKSKKLKSVKELLGITIMERSSFEKNPIDFLEAKGYKEVKKDLIIKLPKYSLFELENGRKRMLASAGELQKGNELALPSKYVNFLYLASHYEKLKGSPEDNEQKQLFVEQHKHYLDEIIEQISEFSKRVILADANLDKVLSAYNKHRDKPIREQAENIIHLFTLTNLGAPAAFKYFDTTIDRKRYTSTKEVLDATLIHQSITGLYETRIDLSQLGGDGGGGSGSSGGGGGTVSLQDEHRLFDIPVTTSLPDVWLQDFPQAWAETGGLGRAKCQAPIIIDLKPTAVPVSIKQYPMSLEAHMGIRQHIIKFLELGVLRPCRSPWNTPLLPVKKPGTQDYRPVQDLREINKRTVDIHPTVPNPYNLLSTLKPDYSWYTVLDLKDAFFCLPLAPQSQELFAFEWKDPERGISGQLTWTRLPQGFKNSPTLFNEALHRDLTDFRTQHPEVTLLQYVDDLLLAAPTKKACTQGTRHLLQELGEKGYRASAKKAQICQTKVTYLGYILSEGKRWLTPGRIETVARIPPPRNPREVREFLGTAGFCRLWIPGFAELAAPLYALTKPSTPFTWQTEHQLAFEALKKALLSAPALGLPDTSKPFTLFLDERQGIAKGVLTQKLGPWKRPVAYLSKKLDPVAAGWPPCLRIMAATAMLVKDSAKLTLGQPLTVITPHTLEAIVRQPPDRWITNARLTHYQALLLDTDRVQFGPPVTLNPATLLPVPENQPSPHDCRQVLAETHGTREDLKDQELPDADHTWYTDGSSYLDSGTRRAGAAVVDGHNTIWAQSLPPGTSAQKAELIALTKALELSKGKKANIYTDSRYAFATAHTHGSIYERRGWLTSEGKEIKNKAEIIALLKALFLPQEVAIIHCPGHQKGQDPVAVGNRQADRVARQAAMAEVLTLATEPDNTSHITAGKRTADGSEFEKRTADGSEFESPKKKAKVE

SEQ ID NO: 1551 - protein, 2100 aa, synthetic construct
MPAAKRVKLDGGDKKYSIGLDIGTNSVGWAVITDEYKVPSKKFKVLGNTDRHSIKKNLIGALLFDSGETAEATRLKRTARRRYTRRKNRICYLQEIFSNEMAKVDDSFFHRLEESFLVEEDKKHERHPIFGNIVDEVAYHEKYPTIYHLRKKLVDSTDKADLRLIYLALAHMIKFRGHFLIEGDLNPDNSDVDKLFIQLVQTYNQLFEENPINASGVDAKAILSARLSKSRRLENLIAQLPGEKKNGLFGNLIALSLGLTPNFKSNFDLAEDAKLQLSKDTYDDDLDNLLAQIGDQYADLFLAAKNLSDAILLSDILRVNTEITKAPLSASMIKRYDEHHQDLTLLKALVRQQLPEKYKEIFFDQSKNGYAGYIDGGASQEEFYKFIKPILEKMDGTEELLVKLNREDLLRKQRTFDNGSIPHQIHLGELHAILRRQEDFYPFLKDNREKIEKILTFRIPYYVGPLARGNSRFAWMTRKSEETITPWNFEEVVDKGASAQSFIERMTNFDKNLPNEKVLPKHSLLYEYFTVYNELTKVKYVTEGMRKPAFLSGEQKKAIVDLLFKTNRKVTVKQLKEDYFKKIECFDSVEISGVEDRFNASLGTYHDLLKIIKDKDFLDNEENEDILEDIVLTLTLFEDREMIEERLKTYAHLFDDKVMKQLKRRRYTGWGRLSRKLINGIRDKQSGKTILDFLKSDGFANRNFMQLIHDDSLTFKEDIQKAQVSGQGDSLHEHIANLAGSPAIKKGILQTVKVVDELVKVMGRHKPENIVIEMARENQTTQKGQKNSRERMKRIEEGIKELGSQILKEHPVENTQLQNEKLYLYYLQNGRDMYVDQELDINRLSDYDVDHIVPQSFLKDDSIDNKVLTRSDKARGKSDNVPSEEVVKKMKNYWRQLLNAKLITQRKFDNLTKAERGGLSELDKAGFIKRQLVETRQITKHVAQILDSRMNTKYDENDKLIREVKVITLKSKLVSDFRKDFQFYKVREINNYHHAHDAYLNAVVGTALIKKYPKLESEFVYGDYKVYDVRKMIAKSEQEIGKATAKYFFYSNIMNFFKTEITLANGEIRKRPLIETNGETGEIVWDKGRDFATVRKVLSMPQVNIVKKTEVQTGGFSKESILPKRNSDKLIARKKDWDPKKYGGFDSPTVAYSVLVVAKVEKGKSKKLKSVKELLGITIMERSSFEKNPIDFLEAKGYKEVKKDLIIKLPKYSLFELENGRKRMLASAGELQKGNELALPSKYVNFLYLASHYEKLKGSPEDNEQKQLFVEQHKHYLDEIIEQISEFSKRVILADANLDKVLSAYNKHRDKPIREQAENIIHLFTLTNLGAPAAFKYFDTTIDRKRYTSTKEVLDATLIHQSITGLYETRIDLSQLGGDGGGGSGSSPAPGGTVSLQDEHRLFDIPVTTSLPDVWLQDFPQAWAETGGLGRAKCQAPIIIDLKPTAVPVSIKQYPMSLEAHMGIRQHIIKFLELGVLRPCRSPWNTPLLPVKKPGTQDYRPVQDLREINKRTVDIHPTVPNPYNLLSTLKPDYSWYTVLDLKDAFFCLPLAPQSQELFAFEWKDPERGISGQLTWTRLPQGFKNSPTLFNEALHRDLTDFRTQHPEVTLLQYVDDLLLAAPTKKACTQGTRHLLQELGEKGYRASAKKAQICQTKVTYLGYILSEGKRWLTPGRIETVARIPPPRNPREVREFLGTAGFCRLWIPGFAELAAPLYALTKPSTPFTWQTEHQLAFEALKKALLSAPALGLPDTSKPFTLFLDERQGIAKGVLTQKLGPWKRPVAYLSKKLDPVAAGWPPCLRIMAATAMLVKDSAKLTLGQPLTVITPHTLEAIVRQPPDRWITNARLTHYQALLLDTDRVQFGPPVTLNPATLLPVPENQPSPHDCRQVLAETHGTREDLKDQELPDADHTWYTDGSSYLDSGTRRAGAAVVDGHNTIWAQSLPPGTSAQKAELIALTKALELSKGKKANIYTDSRYAFATAHTHGSIYERRGWLTSEGKEIKNKAEIIALLKALFLPQEVAIIHCPGHQKGQDPVAVGNRQADRVARQAAMAEVLTLATEPDNTSHITAGKRTADGSEFEKRTADGSEFESPKKKAKVE

SEQ ID NO: 1552 - protein, 2111 aa, synthetic construct
MPAAKRVKLDGGDKKYSIGLDIGTNSVGWAVITDEYKVPSKKFKVLGNTDRHSIKKNLIGALLFDSGETAEATRLKRTARRRYTRRKNRICYLQEIFSNEMAKVDDSFFHRLEESFLVEEDKKHERHPIFGNIVDEVAYHEKYPTIYHLRKKLVDSTDKADLRLIYLALAHMIKFRGHFLIEGDLNPDNSDVDKLFIQLVQTYNQLFEENPINASGVDAKAILSARLSKSRRLENLIAQLPGEKKNGLFGNLIALSLGLTPNFKSNFDLAEDAKLQLSKDTYDDDLDNLLAQIGDQYADLFLAAKNLSDAILLSDILRVNTEITKAPLSASMIKRYDEHHQDLTLLKALVRQQLPEKYKEIFFDQSKNGYAGYIDGGASQEEFYKFIKPILEKMDGTEELLVKLNREDLLRKQRTFDNGSIPHQIHLGELHAILRRQEDFYPFLKDNREKIEKILTFRIPYYVGPLARGNSRFAWMTRKSEETITPWNFEEVVDKGASAQSFIERMTNFDKNLPNEKVLPKHSLLYEYFTVYNELTKVKYVTEGMRKPAFLSGEQKKAIVDLLFKTNRKVTVKQLKEDYFKKIECFDSVEISGVEDRFNASLGTYHDLLKIIKDKDFLDNEENEDILEDIVLTLTLFEDREMIEERLKTYAHLFDDKVMKQLKRRRYTGWGRLSRKLINGIRDKQSGKTILDFLKSDGFANRNFMQLIHDDSLTFKEDIQKAQVSGQGDSLHEHIANLAGSPAIKKGILQTVKVVDELVKVMGRHKPENIVIEMARENQTTQKGQKNSRERMKRIEEGIKELGSQILKEHPVENTQLQNEKLYLYYLQNGRDMYVDQELDINRLSDYDVDHIVPQSFLKDDSIDNKVLTRSDKARGKSDNVPSEEVVKKMKNYWRQLLNAKLITQRKFDNLTKAERGGLSELDKAGFIKRQLVETRQITKHVAQILDSRMNTKYDENDKLIREVKVITLKSKLVSDFRKDFQFYKVREINNYHHAHDAYLNAVVGTALIKKYPKLESEFVYGDYKVYDVRKMIAKSEQEIGKATAKYFFYSNIMNFFKTEITLANGEIRKRPLIETNGETGEIVWDKGRDFATVRKVLSMPQVNIVKKTEVQTGGFSKESILPKRNSDKLIARKKDWDPKKYGGFDSPTVAYSVLVVAKVEKGKSKKLKSVKELLGITIMERSSFEKNPIDFLEAKGYKEVKKDLIIKLPKYSLFELENGRKRMLASAGELQKGNELALPSKYVNFLYLASHYEKLKGSPEDNEQKQLFVEQHKHYLDEIIEQISEFSKRVILADANLDKVLSAYNKHRDKPIREQAENIIHLFTLTNLGAPAAFKYFDTTIDRKRYTSTKEVLDATLIHQSITGLYETRIDLSQLGGDGGGGGGSGGGGSGGGGSGGGGSGGTVSLQDEHRLFDIPVTTSLPDVWLQDFPQAWAETGGLGRAKCQAPIIIDLKPTAVPVSIKQYPMSLEAHMGIRQHIIKFLELGVLRPCRSPWNTPLLPVKKPGTQDYRPVQDLREINKRTVDIHPTVPNPYNLLSTLKPDYSWYTVLDLKDAFFCLPLAPQSQELFAFEWKDPERGISGQLTWTRLPQGFKNSPTLFNEALHRDLTDFRTQHPEVTLLQYVDDLLLAAPTKKACTQGTRHLLQELGEKGYRASAKKAQICQTKVTYLGYILSEGKRWLTPGRIETVARIPPPRNPREVREFLGTAGFCRLWIPGFAELAAPLYALTKPSTPFTWQTEHQLAFEALKKALLSAPALGLPDTSKPFTLFLDERQGIAKGVLTQKLGPWKRPVAYLSKKLDPVAAGWPPCLRIMAATAMLVKDSAKLTLGQPLTVITPHTLEAIVRQPPDRWITNARLTHYQALLLDTDRVQFGPPVTLNPATLLPVPENQPSPHDCRQVLAETHGTREDLKDQELPDADHTWYTDGSSYLDSGTRRAGAAVVDGHNTIWAQSLPPGTSAQKAELIALTKALELSKGKKANIYTDSRYAFATAHTHGSIYERRGWLTSEGKEIKNKAEIIALLKALFLPQEVAIIHCPGHQKGQDPVAVGNRQADRVARQAAMAEVLTLATEPDNTSHITAGKRTADGSEFEKRTADGSEFESPKKKAKVE

SEQ ID NO: 1553 - protein, 2106 aa, synthetic construct
MPAAKRVKLDGGDKKYSIGLDIGTNSVGWAVITDEYKVPSKKFKVLGNTDRHSIKKNLIGALLFDSGETAEATRLKRTARRRYTRRKNRICYLQEIFSNEMAKVDDSFFHRLEESFLVEEDKKHERHPIFGNIVDEVAYHEKYPTIYHLRKKLVDSTDKADLRLIYLALAHMIKFRGHFLIEGDLNPDNSDVDKLFIQLVQTYNQLFEENPINASGVDAKAILSARLSKSRRLENLIAQLPGEKKNGLFGNLIALSLGLTPNFKSNFDLAEDAKLQLSKDTYDDDLDNLLAQIGDQYADLFLAAKNLSDAILLSDILRVNTEITKAPLSASMIKRYDEHHQDLTLLKALVRQQLPEKYKEIFFDQSKNGYAGYIDGGASQEEFYKFIKPILEKMDGTEELLVKLNREDLLRKQRTFDNGSIPHQIHLGELHAILRRQEDFYPFLKDNREKIEKILTFRIPYYVGPLARGNSRFAWMTRKSEETITPWNFEEVVDKGASAQSFIERMTNFDKNLPNEKVLPKHSLLYEYFTVYNELTKVKYVTEGMRKPAFLSGEQKKAIVDLLFKTNRKVTVKQLKEDYFKKIECFDSVEISGVEDRFNASLGTYHDLLKIIKDKDFLDNEENEDILEDIVLTLTLFEDREMIEERLKTYAHLFDDKVMKQLKRRRYTGWGRLSRKLINGIRDKQSGKTILDFLKSDGFANRNFMQLIHDDSLTFKEDIQKAQVSGQGDSLHEHIANLAGSPAIKKGILQTVKVVDELVKVMGRHKPENIVIEMARENQTTQKGQKNSRERMKRIEEGIKELGSQILKEHPVENTQLQNEKLYLYYLQNGRDMYVDQELDINRLSDYDVDHIVPQSFLKDDSIDNKVLTRSDKARGKSDNVPSEEVVKKMKNYWRQLLNAKLITQRKFDNLTKAERGGLSELDKAGFIKRQLVETRQITKHVAQILDSRMNTKYDENDKLIREVKVITLKSKLVSDFRKDFQFYKVREINNYHHAHDAYLNAVVGTALIKKYPKLESEFVYGDYKVYDVRKMIAKSEQEIGKATAKYFFYSNIMNFFKTEITLANGEIRKRPLIETNGETGEIVWDKGRDFATVRKVLSMPQVNIVKKTEVQTGGFSKESILPKRNSDKLIARKKDWDPKKYGGFDSPTVAYSVLVVAKVEKGKSKKLKSVKELLGITIMERSSFEKNPIDFLEAKGYKEVKKDLIIKLPKYSLFELENGRKRMLASAGELQKGNELALPSKYVNFLYLASHYEKLKGSPEDNEQKQLFVEQHKHYLDEIIEQISEFSKRVILADANLDKVLSAYNKHRDKPIREQAENIIHLFTLTNLGAPAAFKYFDTTIDRKRYTSTKEVLDATLIHQSITGLYETRIDLSQLGGDGGGSSGSSGSSGSSGSSGGTVSLQDEHRLFDIPVTTSLPDVWLQDFPQAWAETGGLGRAKCQAPIIIDLKPTAVPVSIKQYPMSLEAHMGIRQHIIKFLELGVLRPCRSPWNTPLLPVKKPGTQDYRPVQDLREINKRTVDIHPTVPNPYNLLSTLKPDYSWYTVLDLKDAFFCLPLAPQSQELFAFEWKDPERGISGQLTWTRLPQGFKNSPTLFNEALHRDLTDFRTQHPEVTLLQYVDDLLLAAPTKKACTQGTRHLLQELGEKGYRASAKKAQICQTKVTYLGYILSEGKRWLTPGRIETVARIPPPRNPREVREFLGTAGFCRLWIPGFAELAAPLYALTKPSTPFTWQTEHQLAFEALKKALLSAPALGLPDTSKPFTLFLDERQGIAKGVLTQKLGPWKRPVAYLSKKLDPVAAGWPPCLRIMAATAMLVKDSAKLTLGQPLTVITPHTLEAIVRQPPDRWITNARLTHYQALLLDTDRVQFGPPVTLNPATLLPVPENQPSPHDCRQVLAETHGTREDLKDQELPDADHTWYTDGSSYLDSGTRRAGAAVVDGHNTIWAQSLPPGTSAQKAELIALTKALELSKGKKANIYTDSRYAFATAHTHGSIYERRGWLTSEGKEIKNKAEIIALLKALFLPQEVAIIHCPGHQKGQDPVAVGNRQADRVARQAAMAEVLTLATEPDNTSHITAGKRTADGSEFEKRTADGSEFESPKKKAKVE

SEQ ID NO: 1554 - protein, 2097 aa, synthetic construct
MPAAKRVKLDGGDKKYSIGLDIGTNSVGWAVITDEYKVPSKKFKVLGNTDRHSIKKNLIGALLFDSGETAEATRLKRTARRRYTRRKNRICYLQEIFSNEMAKVDDSFFHRLEESFLVEEDKKHERHPIFGNIVDEVAYHEKYPTIYHLRKKLVDSTDKADLRLIYLALAHMIKFRGHFLIEGDLNPDNSDVDKLFIQLVQTYNQLFEENPINASGVDAKAILSARLSKSRRLENLIAQLPGEKKNGLFGNLIALSLGLTPNFKSNFDLAEDAKLQLSKDTYDDDLDNLLAQIGDQYADLFLAAKNLSDAILLSDILRVNTEITKAPLSASMIKRYDEHHQDLTLLKALVRQQLPEKYKEIFFDQSKNGYAGYIDGGASQEEFYKFIKPILEKMDGTEELLVKLNREDLLRKQRTFDNGSIPHQIHLGELHAILRRQEDFYPFLKDNREKIEKILTFRIPYYVGPLARGNSRFAWMTRKSEETITPWNFEEVVDKGASAQSFIERMTNFDKNLPNEKVLPKHSLLYEYFTVYNELTKVKYVTEGMRKPAFLSGEQKKAIVDLLFKTNRKVTVKQLKEDYFKKIECFDSVEISGVEDRFNASLGTYHDLLKIIKDKDFLDNEENEDILEDIVLTLTLFEDREMIEERLKTYAHLFDDKVMKQLKRRRYTGWGRLSRKLINGIRDKQSGKTILDFLKSDGFANRNFMQLIHDDSLTFKEDIQKAQVSGQGDSLHEHIANLAGSPAIKKGILQTVKVVDELVKVMGRHKPENIVIEMARENQTTQKGQKNSRERMKRIEEGIKELGSQILKEHPVENTQLQNEKLYLYYLQNGRDMYVDQELDINRLSDYDVDHIVPQSFLKDDSIDNKVLTRSDKARGKSDNVPSEEVVKKMKNYWRQLLNAKLITQRKFDNLTKAERGGLSELDKAGFIKRQLVETRQITKHVAQILDSRMNTKYDENDKLIREVKVITLKSKLVSDFRKDFQFYKVREINNYHHAHDAYLNAVVGTALIKKYPKLESEFVYGDYKVYDVRKMIAKSEQEIGKATAKYFFYSNIMNFFKTEITLANGEIRKRPLIETNGETGEIVWDKGRDFATVRKVLSMPQVNIVKKTEVQTGGFSKESILPKRNSDKLIARKKDWDPKKYGGFDSPTVAYSVLVVAKVEKGKSKKLKSVKELLGITIMERSSFEKNPIDFLEAKGYKEVKKDLIIKLPKYSLFELENGRKRMLASAGELQKGNELALPSKYVNFLYLASHYEKLKGSPEDNEQKQLFVEQHKHYLDEIIEQISEFSKRVILADANLDKVLSAYNKHRDKPIREQAENIIHLFTLTNLGAPAAFKYFDTTIDRKRYTSTKEVLDATLIHQSITGLYETRIDLSQLGGDGGPAPGGSGGTVSLQDEHRLFDIPVTTSLPDVWLQDFPQAWAETGGLGRAKCQAPIIIDLKPTAVPVSIKQYPMSLEAHMGIRQHIIKFLELGVLRPCRSPWNTPLLPVKKPGTQDYRPVQDLREINKRTVDIHPTVPNPYNLLSTLKPDYSWYTVLDLKDAFFCLPLAPQSQELFAFEWKDPERGISGQLTWTRLPQGFKNSPTLFNEALHRDLTDFRTQHPEVTLLQYVDDLLLAAPTKKACTQGTRHLLQELGEKGYRASAKKAQICQTKVTYLGYILSEGKRWLTPGRIETVARIPPPRNPREVREFLGTAGFCRLWIPGFAELAAPLYALTKPSTPFTWQTEHQLAFEALKKALLSAPALGLPDTSKPFTLFLDERQGIAKGVLTQKLGPWKRPVAYLSKKLDPVAAGWPPCLRIMAATAMLVKDSAKLTLGQPLTVITPHTLEAIVRQPPDRWITNARLTHYQALLLDTDRVQFGPPVTLNPATLLPVPENQPSPHDCRQVLAETHGTREDLKDQELPDADHTWYTDGSSYLDSGTRRAGAAVVDGHNTIWAQSLPPGTSAQKAELIALTKALELSKGKKANIYTDSRYAFATAHTHGSIYERRGWLTSEGKEIKNKAEIIALLKALFLPQEVAIIHCPGHQKGQDPVAVGNRQADRVARQAAMAEVLTLATEPDNTSHITAGKRTADGSEFEKRTADGSEFESPKKKAKVE

SEQ ID NO: 1555 - protein, 2102 aa, synthetic construct
MPAAKRVKLDGGDKKYSIGLDIGTNSVGWAVITDEYKVPSKKFKVLGNTDRHSIKKNLIGALLFDSGETAEATRLKRTARRRYTRRKNRICYLQEIFSNEMAKVDDSFFHRLEESFLVEEDKKHERHPIFGNIVDEVAYHEKYPTIYHLRKKLVDSTDKADLRLIYLALAHMIKFRGHFLIEGDLNPDNSDVDKLFIQLVQTYNQLFEENPINASGVDAKAILSARLSKSRRLENLIAQLPGEKKNGLFGNLIALSLGLTPNFKSNFDLAEDAKLQLSKDTYDDDLDNLLAQIGDQYADLFLAAKNLSDAILLSDILRVNTEITKAPLSASMIKRYDEHHQDLTLLKALVRQQLPEKYKEIFFDQSKNGYAGYIDGGASQEEFYKFIKPILEKMDGTEELLVKLNREDLLRKQRTFDNGSIPHQIHLGELHAILRRQEDFYPFLKDNREKIEKILTFRIPYYVGPLARGNSRFAWMTRKSEETITPWNFEEVVDKGASAQSFIERMTNFDKNLPNEKVLPKHSLLYEYFTVYNELTKVKYVTEGMRKPAFLSGEQKKAIVDLLFKTNRKVTVKQLKEDYFKKIECFDSVEISGVEDRFNASLGTYHDLLKIIKDKDFLDNEENEDILEDIVLTLTLFEDREMIEERLKTYAHLFDDKVMKQLKRRRYTGWGRLSRKLINGIRDKQSGKTILDFLKSDGFANRNFMQLIHDDSLTFKEDIQKAQVSGQGDSLHEHIANLAGSPAIKKGILQTVKVVDELVKVMGRHKPENIVIEMARENQTTQKGQKNSRERMKRIEEGIKELGSQILKEHPVENTQLQNEKLYLYYLQNGRDMYVDQELDINRLSDYDVDHIVPQSFLKDDSIDNKVLTRSDKARGKSDNVPSEEVVKKMKNYWRQLLNAKLITQRKFDNLTKAERGGLSELDKAGFIKRQLVETRQITKHVAQILDSRMNTKYDENDKLIREVKVITLKSKLVSDFRKDFQFYKVREINNYHHAHDAYLNAVVGTALIKKYPKLESEFVYGDYKVYDVRKMIAKSEQEIGKATAKYFFYSNIMNFFKTEITLANGEIRKRPLIETNGETGEIVWDKGRDFATVRKVLSMPQVNIVKKTEVQTGGFSKESILPKRNSDKLIARKKDWDPKKYGGFDSPTVAYSVLVVAKVEKGKSKKLKSVKELLGITIMERSSFEKNPIDFLEAKGYKEVKKDLIIKLPKYSLFELENGRKRMLASAGELQKGNELALPSKYVNFLYLASHYEKLKGSPEDNEQKQLFVEQHKHYLDEIIEQISEFSKRVILADANLDKVLSAYNKHRDKPIREQAENIIHLFTLTNLGAPAAFKYFDTTIDRKRYTSTKEVLDATLIHQSITGLYETRIDLSQLGGDGGPAPGGSEAAAKGGTVSLQDEHRLFDIPVTTSLPDVWLQDFPQAWAETGGLGRAKCQAPIIIDLKPTAVPVSIKQYPMSLEAHMGIRQHIIKFLELGVLRPCRSPWNTPLLPVKKPGTQDYRPVQDLREINKRTVDIHPTVPNPYNLLSTLKPDYSWYTVLDLKDAFFCLPLAPQSQELFAFEWKDPERGISGQLTWTRLPQGFKNSPTLFNEALHRDLTDFRTQHPEVTLLQYVDDLLLAAPTKKACTQGTRHLLQELGEKGYRASAKKAQICQTKVTYLGYILSEGKRWLTPGRIETVARIPPPRNPREVREFLGTAGFCRLWIPGFAELAAPLYALTKPSTPFTWQTEHQLAFEALKKALLSAPALGLPDTSKPFTLFLDERQGIAKGVLTQKLGPWKRPVAYLSKKLDPVAAGWPPCLRIMAATAMLVKDSAKLTLGQPLTVITPHTLEAIVRQPPDRWITNARLTHYQALLLDTDRVQFGPPVTLNPATLLPVPENQPSPHDCRQVLAETHGTREDLKDQELPDADHTWYTDGSSYLDSGTRRAGAAVVDGHNTIWAQSLPPGTSAQKAELIALTKALELSKGKKANIYTDSRYAFATAHTHGSIYERRGWLTSEGKEIKNKAEIIALLKALFLPQEVAIIHCPGHQKGQDPVAVGNRQADRVARQAAMAEVLTLATEPDNTSHITAGKRTADGSEFEKRTADGSEFESPKKKAKVE

SEQ ID NO: 1556 - protein, 2097 aa, synthetic construct
MPAAKRVKLDGGDKKYSIGLDIGTNSVGWAVITDEYKVPSKKFKVLGNTDRHSIKKNLIGALLFDSGETAEATRLKRTARRRYTRRKNRICYLQEIFSNEMAKVDDSFFHRLEESFLVEEDKKHERHPIFGNIVDEVAYHEKYPTIYHLRKKLVDSTDKADLRLIYLALAHMIKFRGHFLIEGDLNPDNSDVDKLFIQLVQTYNQLFEENPINASGVDAKAILSARLSKSRRLENLIAQLPGEKKNGLFGNLIALSLGLTPNFKSNFDLAEDAKLQLSKDTYDDDLDNLLAQIGDQYADLFLAAKNLSDAILLSDILRVNTEITKAPLSASMIKRYDEHHQDLTLLKALVRQQLPEKYKEIFFDQSKNGYAGYIDGGASQEEFYKFIKPILEKMDGTEELLVKLNREDLLRKQRTFDNGSIPHQIHLGELHAILRRQEDFYPFLKDNREKIEKILTFRIPYYVGPLARGNSRFAWMTRKSEETITPWNFEEVVDKGASAQSFIERMTNFDKNLPNEKVLPKHSLLYEYFTVYNELTKVKYVTEGMRKPAFLSGEQKKAIVDLLFKTNRKVTVKQLKEDYFKKIECFDSVEISGVEDRFNASLGTYHDLLKIIKDKDFLDNEENEDILEDIVLTLTLFEDREMIEERLKTYAHLFDDKVMKQLKRRRYTGWGRLSRKLINGIRDKQSGKTILDFLKSDGFANRNFMQLIHDDSLTFKEDIQKAQVSGQGDSLHEHIANLAGSPAIKKGILQTVKVVDELVKVMGRHKPENIVIEMARENQTTQKGQKNSRERMKRIEEGIKELGSQILKEHPVENTQLQNEKLYLYYLQNGRDMYVDQELDINRLSDYDVDHIVPQSFLKDDSIDNKVLTRSDKARGKSDNVPSEEVVKKMKNYWRQLLNAKLITQRKFDNLTKAERGGLSELDKAGFIKRQLVETRQITKHVAQILDSRMNTKYDENDKLIREVKVITLKSKLVSDFRKDFQFYKVREINNYHHAHDAYLNAVVGTALIKKYPKLESEFVYGDYKVYDVRKMIAKSEQEIGKATAKYFFYSNIMNFFKTEITLANGEIRKRPLIETNGETGEIVWDKGRDFATVRKVLSMPQVNIVKKTEVQTGGFSKESILPKRNSDKLIARKKDWDPKKYGGFDSPTVAYSVLVVAKVEKGKSKKLKSVKELLGITIMERSSFEKNPIDFLEAKGYKEVKKDLIIKLPKYSLFELENGRKRMLASAGELQKGNELALPSKYVNFLYLASHYEKLKGSPEDNEQKQLFVEQHKHYLDEIIEQISEFSKRVILADANLDKVLSAYNKHRDKPIREQAENIIHLFTLTNLGAPAAFKYFDTTIDRKRYTSTKEVLDATLIHQSITGLYETRIDLSQLGGDGGGGSGGSGGTVSLQDEHRLFDIPVTTSLPDVWLQDFPQAWAETGGLGRAKCQAPIIIDLKPTAVPVSIKQYPMSLEAHMGIRQHIIKFLELGVLRPCRSPWNTPLLPVKKPGTQDYRPVQDLREINKRTVDIHPTVPNPYNLLSTLKPDYSWYTVLDLKDAFFCLPLAPQSQELFAFEWKDPERGISGQLTWTRLPQGFKNSPTLFNEALHRDLTDFRTQHPEVTLLQYVDDLLLAAPTKKACTQGTRHLLQELGEKGYRASAKKAQICQTKVTYLGYILSEGKRWLTPGRIETVARIPPPRNPREVREFLGTAGFCRLWIPGFAELAAPLYALTKPSTPFTWQTEHQLAFEALKKALLSAPALGLPDTSKPFTLFLDERQGIAKGVLTQKLGPWKRPVAYLSKKLDPVAAGWPPCLRIMAATAMLVKDSAKLTLGQPLTVITPHTLEAIVRQPPDRWITNARLTHYQALLLDTDRVQFGPPVTLNPATLLPVPENQPSPHDCRQVLAETHGTREDLKDQELPDADHTWYTDGSSYLDSGTRRAGAAVVDGHNTIWAQSLPPGTSAQKAELIALTKALELSKGKKANIYTDSRYAFATAHTHGSIYERRGWLTSEGKEIKNKAEIIALLKALFLPQEVAIIHCPGHQKGQDPVAVGNRQADRVARQAAMAEVLTLATEPDNTSHITAGKRTADGSEFEKRTADGSEFESPKKKAKVE

SEQ ID NO: 1557 - protein, 2099 aa, synthetic construct
MPAAKRVKLDGGDKKYSIGLDIGTNSVGWAVITDEYKVPSKKFKVLGNTDRHSIKKNLIGALLFDSGETAEATRLKRTARRRYTRRKNRICYLQEIFSNEMAKVDDSFFHRLEESFLVEEDKKHERHPIFGNIVDEVAYHEKYPTIYHLRKKLVDSTDKADLRLIYLALAHMIKFRGHFLIEGDLNPDNSDVDKLFIQLVQTYNQLFEENPINASGVDAKAILSARLSKSRRLENLIAQLPGEKKNGLFGNLIALSLGLTPNFKSNFDLAEDAKLQLSKDTYDDDLDNLLAQIGDQYADLFLAAKNLSDAILLSDILRVNTEITKAPLSASMIKRYDEHHQDLTLLKALVRQQLPEKYKEIFFDQSKNGYAGYIDGGASQEEFYKFIKPILEKMDGTEELLVKLNREDLLRKQRTFDNGSIPHQIHLGELHAILRRQEDFYPFLKDNREKIEKILTFRIPYYVGPLARGNSRFAWMTRKSEETITPWNFEEVVDKGASAQSFIERMTNFDKNLPNEKVLPKHSLLYEYFTVYNELTKVKYVTEGMRKPAFLSGEQKKAIVDLLFKTNRKVTVKQLKEDYFKKIECFDSVEISGVEDRFNASLGTYHDLLKIIKDKDFLDNEENEDILEDIVLTLTLFEDREMIEERLKTYAHLFDDKVMKQLKRRRYTGWGRLSRKLINGIRDKQSGKTILDFLKSDGFANRNFMQLIHDDSLTFKEDIQKAQVSGQGDSLHEHIANLAGSPAIKKGILQTVKVVDELVKVMGRHKPENIVIEMARENQTTQKGQKNSRERMKRIEEGIKELGSQILKEHPVENTQLQNEKLYLYYLQNGRDMYVDQELDINRLSDYDVDHIVPQSFLKDDSIDNKVLTRSDKARGKSDNVPSEEVVKKMKNYWRQLLNAKLITQRKFDNLTKAERGGLSELDKAGFIKRQLVETRQITKHVAQILDSRMNTKYDENDKLIREVKVITLKSKLVSDFRKDFQFYKVREINNYHHAHDAYLNAVVGTALIKKYPKLESEFVYGDYKVYDVRKMIAKSEQEIGKATAKYFFYSNIMNFFKTEITLANGEIRKRPLIETNGETGEIVWDKGRDFATVRKVLSMPQVNIVKKTEVQTGGFSKESILPKRNSDKLIARKKDWDPKKYGGFDSPTVAYSVLVVAKVEKGKSKKLKSVKELLGITIMERSSFEKNPIDFLEAKGYKEVKKDLIIKLPKYSLFELENGRKRMLASAGELQKGNELALPSKYVNFLYLASHYEKLKGSPEDNEQKQLFVEQHKHYLDEIIEQISEFSKRVILADANLDKVLSAYNKHRDKPIREQAENIIHLFTLTNLGAPAAFKYFDTTIDRKRYTSTKEVLDATLIHQSITGLYETRIDLSQLGGDGGEAAAKGGSGGTVSLQDEHRLFDIPVTTSLPDVWLQDFPQAWAETGGLGRAKCQAPIIIDLKPTAVPVSIKQYPMSLEAHMGIRQHIIKFLELGVLRPCRSPWNTPLLPVKKPGTQDYRPVQDLREINKRTVDIHPTVPNPYNLLSTLKPDYSWYTVLDLKDAFFCLPLAPQSQELFAFEWKDPERGISGQLTWTRLPQGFKNSPTLFNEALHRDLTDFRTQHPEVTLLQYVDDLLLAAPTKKACTQGTRHLLQELGEKGYRASAKKAQICQTKVTYLGYILSEGKRWLTPGRIETVARIPPPRNPREVREFLGTAGFCRLWIPGFAELAAPLYALTKPSTPFTWQTEHQLAFEALKKALLSAPALGLPDTSKPFTLFLDERQGIAKGVLTQKLGPWKRPVAYLSKKLDPVAAGWPPCLRIMAATAMLVKDSAKLTLGQPLTVITPHTLEAIVRQPPDRWITNARLTHYQALLLDTDRVQFGPPVTLNPATLLPVPENQPSPHDCRQVLAETHGTREDLKDQELPDADHTWYTDGSSYLDSGTRRAGAAVVDGHNTIWAQSLPPGTSAQKAELIALTKALELSKGKKANIYTDSRYAFATAHTHGSIYERRGWLTSEGKEIKNKAEIIALLKALFLPQEVAIIHCPGHQKGQDPVAVGNRQADRVARQAAMAEVLTLATEPDNTSHITAGKRTADGSEFEKRTADGSEFESPKKKAKVE

SEQ ID NO: 1558 - protein, 2097 aa, synthetic construct
MPAAKRVKLDGGDKKYSIGLDIGTNSVGWAVITDEYKVPSKKFKVLGNTDRHSIKKNLIGALLFDSGETAEATRLKRTARRRYTRRKNRICYLQEIFSNEMAKVDDSFFHRLEESFLVEEDKKHERHPIFGNIVDEVAYHEKYPTIYHLRKKLVDSTDKADLRLIYLALAHMIKFRGHFLIEGDLNPDNSDVDKLFIQLVQTYNQLFEENPINASGVDAKAILSARLSKSRRLENLIAQLPGEKKNGLFGNLIALSLGLTPNFKSNFDLAEDAKLQLSKDTYDDDLDNLLAQIGDQYADLFLAAKNLSDAILLSDILRVNTEITKAPLSASMIKRYDEHHQDLTLLKALVRQQLPEKYKEIFFDQSKNGYAGYIDGGASQEEFYKFIKPILEKMDGTEELLVKLNREDLLRKQRTFDNGSIPHQIHLGELHAILRRQEDFYPFLKDNREKIEKILTFRIPYYVGPLARGNSRFAWMTRKSEETITPWNFEEVVDKGASAQSFIERMTNFDKNLPNEKVLPKHSLLYEYFTVYNELTKVKYVTEGMRKPAFLSGEQKKAIVDLLFKTNRKVTVKQLKEDYFKKIECFDSVEISGVEDRFNASLGTYHDLLKIIKDKDFLDNEENEDILEDIVLTLTLFEDREMIEERLKTYAHLFDDKVMKQLKRRRYTGWGRLSRKLINGIRDKQSGKTILDFLKSDGFANRNFMQLIHDDSLTFKEDIQKAQVSGQGDSLHEHIANLAGSPAIKKGILQTVKVVDELVKVMGRHKPENIVIEMARENQTTQKGQKNSRERMKRIEEGIKELGSQILKEHPVENTQLQNEKLYLYYLQNGRDMYVDQELDINRLSDYDVDHIVPQSFLKDDSIDNKVLTRSDKARGKSDNVPSEEVVKKMKNYWRQLLNAKLITQRKFDNLTKAERGGLSELDKAGFIKRQLVETRQITKHVAQILDSRMNTKYDENDKLIREVKVITLKSKLVSDFRKDFQFYKVREINNYHHAHDAYLNAVVGTALIKKYPKLESEFVYGDYKVYDVRKMIAKSEQEIGKATAKYFFYSNIMNFFKTEITLANGEIRKRPLIETNGETGEIVWDKGRDFATVRKVLSMPQVNIVKKTEVQTGGFSKESILPKRNSDKLIARKKDWDPKKYGGFDSPTVAYSVLVVAKVEKGKSKKLKSVKELLGITIMERSSFEKNPIDFLEAKGYKEVKKDLIIKLPKYSLFELENGRKRMLASAGELQKGNELALPSKYVNFLYLASHYEKLKGSPEDNEQKQLFVEQHKHYLDEIIEQISEFSKRVILADANLDKVLSAYNKHRDKPIREQAENIIHLFTLTNLGAPAAFKYFDTTIDRKRYTSTKEVLDATLIHQSITGLYETRIDLSQLGGDGGPAPGSSGGTVSLQDEHRLFDIPVTTSLPDVWLQDFPQAWAETGGLGRAKCQAPIIIDLKPTAVPVSIKQYPMSLEAHMGIRQHIIKFLELGVLRPCRSPWNTPLLPVKKPGTQDYRPVQDLREINKRTVDIHPTVPNPYNLLSTLKPDYSWYTVLDLKDAFFCLPLAPQSQELFAFEWKDPERGISGQLTWTRLPQGFKNSPTLFNEALHRDLTDFRTQHPEVTLLQYVDDLLLAAPTKKACTQGTRHLLQELGEKGYRASAKKAQICQTKVTYLGYILSEGKRWLTPGRIETVARIPPPRNPREVREFLGTAGFCRLWIPGFAELAAPLYALTKPSTPFTWQTEHQLAFEALKKALLSAPALGLPDTSKPFTLFLDERQGIAKGVLTQKLGPWKRPVAYLSKKLDPVAAGWPPCLRIMAATAMLVKDSAKLTLGQPLTVITPHTLEAIVRQPPDRWITNARLTHYQALLLDTDRVQFGPPVTLNPATLLPVPENQPSPHDCRQVLAETHGTREDLKDQELPDADHTWYTDGSSYLDSGTRRAGAAVVDGHNTIWAQSLPPGTSAQKAELIALTKALELSKGKKANIYTDSRYAFATAHTHGSIYERRGWLTSEGKEIKNKAEIIALLKALFLPQEVAIIHCPGHQKGQDPVAVGNRQADRVARQAAMAEVLTLATEPDNTSHITAGKRTADGSEFEKRTADGSEFESPKKKAKVE

SEQ ID NO: 1559 - protein, 2096 aa, synthetic construct
MPAAKRVKLDGGDKKYSIGLDIGTNSVGWAVITDEYKVPSKKFKVLGNTDRHSIKKNLIGALLFDSGETAEATRLKRTARRRYTRRKNRICYLQEIFSNEMAKVDDSFFHRLEESFLVEEDKKHERHPIFGNIVDEVAYHEKYPTIYHLRKKLVDSTDKADLRLIYLALAHMIKFRGHFLIEGDLNPDNSDVDKLFIQLVQTYNQLFEENPINASGVDAKAILSARLSKSRRLENLIAQLPGEKKNGLFGNLIALSLGLTPNFKSNFDLAEDAKLQLSKDTYDDDLDNLLAQIGDQYADLFLAAKNLSDAILLSDILRVNTEITKAPLSASMIKRYDEHHQDLTLLKALVRQQLPEKYKEIFFDQSKNGYAGYIDGGASQEEFYKFIKPILEKMDGTEELLVKLNREDLLRKQRTFDNGSIPHQIHLGELHAILRRQEDFYPFLKDNREKIEKILTFRIPYYVGPLARGNSRFAWMTRKSEETITPWNFEEVVDKGASAQSFIERMTNFDKNLPNEKVLPKHSLLYEYFTVYNELTKVKYVTEGMRKPAFLSGEQKKAIVDLLFKTNRKVTVKQLKEDYFKKIECFDSVEISGVEDRFNASLGTYHDLLKIIKDKDFLDNEENEDILEDIVLTLTLFEDREMIEERLKTYAHLFDDKVMKQLKRRRYTGWGRLSRKLINGIRDKQSGKTILDFLKSDGFANRNFMQLIHDDSLTFKEDIQKAQVSGQGDSLHEHIANLAGSPAIKKGILQTVKVVDELVKVMGRHKPENIVIEMARENQTTQKGQKNSRERMKRIEEGIKELGSQILKEHPVENTQLQNEKLYLYYLQNGRDMYVDQELDINRLSDYDVDHIVPQSFLKDDSIDNKVLTRSDKARGKSDNVPSEEVVKKMKNYWRQLLNAKLITQRKFDNLTKAERGGLSELDKAGFIKRQLVETRQITKHVAQILDSRMNTKYDENDKLIREVKVITLKSKLVSDFRKDFQFYKVREINNYHHAHDAYLNAVVGTALIKKYPKLESEFVYGDYKVYDVRKMIAKSEQEIGKATAKYFFYSNIMNFFKTEITLANGEIRKRPLIETNGETGEIVWDKGRDFATVRKVLSMPQVNIVKKTEVQTGGFSKESILPKRNSDKLIARKKDWDPKKYGGFDSPTVAYSVLVVAKVEKGKSKKLKSVKELLGITIMERSSFEKNPIDFLEAKGYKEVKKDLIIKLPKYSLFELENGRKRMLASAGELQKGNELALPSKYVNFLYLASHYEKLKGSPEDNEQKQLFVEQHKHYLDEIIEQISEFSKRVILADANLDKVLSAYNKHRDKPIREQAENIIHLFTLTNLGAPAAFKYFDTTIDRKRYTSTKEVLDATLIHQSITGLYETRIDLSQLGGDGGGGGGSGGTVSLQDEHRLFDIPVTTSLPDVWLQDFPQAWAETGGLGRAKCQAPIIIDLKPTAVPVSIKQYPMSLEAHMGIRQHIIKFLELGVLRPCRSPWNTPLLPVKKPGTQDYRPVQDLREINKRTVDIHPTVPNPYNLLSTLKPDYSWYTVLDLKDAFFCLPLAPQSQELFAFEWKDPERGISGQLTWTRLPQGFKNSPTLFNEALHRDLTDFRTQHPEVTLLQYVDDLLLAAPTKKACTQGTRHLLQELGEKGYRASAKKAQICQTKVTYLGYILSEGKRWLTPGRIETVARIPPPRNPREVREFLGTAGFCRLWIPGFAELAAPLYALTKPSTPFTWQTEHQLAFEALKKALLSAPALGLPDTSKPFTLFLDERQGIAKGVLTQKLGPWKRPVAYLSKKLDPVAAGWPPCLRIMAATAMLVKDSAKLTLGQPLTVITPHTLEAIVRQPPDRWITNARLTHYQALLLDTDRVQFGPPVTLNPATLLPVPENQPSPHDCRQVLAETHGTREDLKDQELPDADHTWYTDGSSYLDSGTRRAGAAVVDGHNTIWAQSLPPGTSAQKAELIALTKALELSKGKKANIYTDSRYAFATAHTHGSIYERRGWLTSEGKEIKNKAEIIALLKALFLPQEVAIIHCPGHQKGQDPVAVGNRQADRVARQAAMAEVLTLATEPDNTSHITAGKRTADGSEFEKRTADGSEFESPKKKAKVE

SEQ ID NO: 1560 - protein, 2098 aa, synthetic construct
MPAAKRVKLDGGDKKYSIGLDIGTNSVGWAVITDEYKVPSKKFKVLGNTDRHSIKKNLIGALLFDSGETAEATRLKRTARRRYTRRKNRICYLQEIFSNEMAKVDDSFFHRLEESFLVEEDKKHERHPIFGNIVDEVAYHEKYPTIYHLRKKLVDSTDKADLRLIYLALAHMIKFRGHFLIEGDLNPDNSDVDKLFIQLVQTYNQLFEENPINASGVDAKAILSARLSKSRRLENLIAQLPGEKKNGLFGNLIALSLGLTPNFKSNFDLAEDAKLQLSKDTYDDDLDNLLAQIGDQYADLFLAAKNLSDAILLSDILRVNTEITKAPLSASMIKRYDEHHQDLTLLKALVRQQLPEKYKEIFFDQSKNGYAGYIDGGASQEEFYKFIKPILEKMDGTEELLVKLNREDLLRKQRTFDNGSIPHQIHLGELHAILRRQEDFYPFLKDNREKIEKILTFRIPYYVGPLARGNSRFAWMTRKSEETITPWNFEEVVDKGASAQSFIERMTNFDKNLPNEKVLPKHSLLYEYFTVYNELTKVKYVTEGMRKPAFLSGEQKKAIVDLLFKTNRKVTVKQLKEDYFKKIECFDSVEISGVEDRFNASLGTYHDLLKIIKDKDFLDNEENEDILEDIVLTLTLFEDREMIEERLKTYAHLFDDKVMKQLKRRRYTGWGRLSRKLINGIRDKQSGKTILDFLKSDGFANRNFMQLIHDDSLTFKEDIQKAQVSGQGDSLHEHIANLAGSPAIKKGILQTVKVVDELVKVMGRHKPENIVIEMARENQTTQKGQKNSRERMKRIEEGIKELGSQILKEHPVENTQLQNEKLYLYYLQNGRDMYVDQELDINRLSDYDVDHIVPQSFLKDDSIDNKVLTRSDKARGKSDNVPSEEVVKKMKNYWRQLLNAKLITQRKFDNLTKAERGGLSELDKAGFIKRQLVETRQITKHVAQILDSRMNTKYDENDKLIREVKVITLKSKLVSDFRKDFQFYKVREINNYHHAHDAYLNAVVGTALIKKYPKLESEFVYGDYKVYDVRKMIAKSEQEIGKATAKYFFYSNIMNFFKTEITLANGEIRKRPLIETNGETGEIVWDKGRDFATVRKVLSMPQVNIVKKTEVQTGGFSKESILPKRNSDKLIARKKDWDPKKYGGFDSPTVAYSVLVVAKVEKGKSKKLKSVKELLGITIMERSSFEKNPIDFLEAKGYKEVKKDLIIKLPKYSLFELENGRKRMLASAGELQKGNELALPSKYVNFLYLASHYEKLKGSPEDNEQKQLFVEQHKHYLDEIIEQISEFSKRVILADANLDKVLSAYNKHRDKPIREQAENIIHLFTLTNLGAPAAFKYFDTTIDRKRYTSTKEVLDATLIHQSITGLYETRIDLSQLGGDGGGGGGGGGGGTVSLQDEHRLFDIPVTTSLPDVWLQDFPQAWAETGGLGRAKCQAPIIIDLKPTAVPVSIKQYPMSLEAHMGIRQHIIKFLELGVLRPCRSPWNTPLLPVKKPGTQDYRPVQDLREINKRTVDIHPTVPNPYNLLSTLKPDYSWYTVLDLKDAFFCLPLAPQSQELFAFEWKDPERGISGQLTWTRLPQGFKNSPTLFNEALHRDLTDFRTQHPEVTLLQYVDDLLLAAPTKKACTQGTRHLLQELGEKGYRASAKKAQICQTKVTYLGYILSEGKRWLTPGRIETVARIPPPRNPREVREFLGTAGFCRLWIPGFAELAAPLYALTKPSTPFTWQTEHQLAFEALKKALLSAPALGLPDTSKPFTLFLDERQGIAKGVLTQKLGPWKRPVAYLSKKLDPVAAGWPPCLRIMAATAMLVKDSAKLTLGQPLTVITPHTLEAIVRQPPDRWITNARLTHYQALLLDTDRVQFGPPVTLNPATLLPVPENQPSPHDCRQVLAETHGTREDLKDQELPDADHTWYTDGSSYLDSGTRRAGAAVVDGHNTIWAQSLPPGTSAQKAELIALTKALELSKGKKANIYTDSRYAFATAHTHGSIYERRGWLTSEGKEIKNKAEIIALLKALFLPQEVAIIHCPGHQKGQDPVAVGNRQADRVARQAAMAEVLTLATEPDNTSHITAGKRTADGSEFEKRTADGSEFESPKKKAKVE

SEQ ID NO: 1561 - protein, 2106 aa, synthetic construct
MPAAKRVKLDGGDKKYSIGLDIGTNSVGWAVITDEYKVPSKKFKVLGNTDRHSIKKNLIGALLFDSGETAEATRLKRTARRRYTRRKNRICYLQEIFSNEMAKVDDSFFHRLEESFLVEEDKKHERHPIFGNIVDEVAYHEKYPTIYHLRKKLVDSTDKADLRLIYLALAHMIKFRGHFLIEGDLNPDNSDVDKLFIQLVQTYNQLFEENPINASGVDAKAILSARLSKSRRLENLIAQLPGEKKNGLFGNLIALSLGLTPNFKSNFDLAEDAKLQLSKDTYDDDLDNLLAQIGDQYADLFLAAKNLSDAILLSDILRVNTEITKAPLSASMIKRYDEHHQDLTLLKALVRQQLPEKYKEIFFDQSKNGYAGYIDGGASQEEFYKFIKPILEKMDGTEELLVKLNREDLLRKQRTFDNGSIPHQIHLGELHAILRRQEDFYPFLKDNREKIEKILTFRIPYYVGPLARGNSRFAWMTRKSEETITPWNFEEVVDKGASAQSFIERMTNFDKNLPNEKVLPKHSLLYEYFTVYNELTKVKYVTEGMRKPAFLSGEQKKAIVDLLFKTNRKVTVKQLKEDYFKKIECFDSVEISGVEDRFNASLGTYHDLLKIIKDKDFLDNEENEDILEDIVLTLTLFEDREMIEERLKTYAHLFDDKVMKQLKRRRYTGWGRLSRKLINGIRDKQSGKTILDFLKSDGFANRNFMQLIHDDSLTFKEDIQKAQVSGQGDSLHEHIANLAGSPAIKKGILQTVKVVDELVKVMGRHKPENIVIEMARENQTTQKGQKNSRERMKRIEEGIKELGSQILKEHPVENTQLQNEKLYLYYLQNGRDMYVDQELDINRLSDYDVDHIVPQSFLKDDSIDNKVLTRSDKARGKSDNVPSEEVVKKMKNYWRQLLNAKLITQRKFDNLTKAERGGLSELDKAGFIKRQLVETRQITKHVAQILDSRMNTKYDENDKLIREVKVITLKSKLVSDFRKDFQFYKVREINNYHHAHDAYLNAVVGTALIKKYPKLESEFVYGDYKVYDVRKMIAKSEQEIGKATAKYFFYSNIMNFFKTEITLANGEIRKRPLIETNGETGEIVWDKGRDFATVRKVLSMPQVNIVKKTEVQTGGFSKESILPKRNSDKLIARKKDWDPKKYGGFDSPTVAYSVLVVAKVEKGKSKKLKSVKELLGITIMERSSFEKNPIDFLEAKGYKEVKKDLIIKLPKYSLFELENGRKRMLASAGELQKGNELALPSKYVNFLYLASHYEKLKGSPEDNEQKQLFVEQHKHYLDEIIEQISEFSKRVILADANLDKVLSAYNKHRDKPIREQAENIIHLFTLTNLGAPAAFKYFDTTIDRKRYTSTKEVLDATLIHQSITGLYETRIDLSQLGGDGGGGGGSEAAAKGGGGSGGTVSLQDEHRLFDIPVTTSLPDVWLQDFPQAWAETGGLGRAKCQAPIIIDLKPTAVPVSIKQYPMSLEAHMGIRQHIIKFLELGVLRPCRSPWNTPLLPVKKPGTQDYRPVQDLREINKRTVDIHPTVPNPYNLLSTLKPDYSWYTVLDLKDAFFCLPLAPQSQELFAFEWKDPERGISGQLTWTRLPQGFKNSPTLFNEALHRDLTDFRTQHPEVTLLQYVDDLLLAAPTKKACTQGTRHLLQELGEKGYRASAKKAQICQTKVTYLGYILSEGKRWLTPGRIETVARIPPPRNPREVREFLGTAGFCRLWIPGFAELAAPLYALTKPSTPFTWQTEHQLAFEALKKALLSAPALGLPDTSKPFTLFLDERQGIAKGVLTQKLGPWKRPVAYLSKKLDPVAAGWPPCLRIMAATAMLVKDSAKLTLGQPLTVITPHTLEAIVRQPPDRWITNARLTHYQALLLDTDRVQFGPPVTLNPATLLPVPENQPSPHDCRQVLAETHGTREDLKDQELPDADHTWYTDGSSYLDSGTRRAGAAVVDGHNTIWAQSLPPGTSAQKAELIALTKALELSKGKKANIYTDSRYAFATAHTHGSIYERRGWLTSEGKEIKNKAEIIALLKALFLPQEVAIIHCPGHQKGQDPVAVGNRQADRVARQAAMAEVLTLATEPDNTSHITAGKRTADGSEFEKRTADGSEFESPKKKAKVE

SEQ ID NO: 1562 - protein, 2111 aa, synthetic construct
MPAAKRVKLDGGDKKYSIGLDIGTNSVGWAVITDEYKVPSKKFKVLGNTDRHSIKKNLIGALLFDSGETAEATRLKRTARRRYTRRKNRICYLQEIFSNEMAKVDDSFFHRLEESFLVEEDKKHERHPIFGNIVDEVAYHEKYPTIYHLRKKLVDSTDKADLRLIYLALAHMIKFRGHFLIEGDLNPDNSDVDKLFIQLVQTYNQLFEENPINASGVDAKAILSARLSKSRRLENLIAQLPGEKKNGLFGNLIALSLGLTPNFKSNFDLAEDAKLQLSKDTYDDDLDNLLAQIGDQYADLFLAAKNLSDAILLSDILRVNTEITKAPLSASMIKRYDEHHQDLTLLKALVRQQLPEKYKEIFFDQSKNGYAGYIDGGASQEEFYKFIKPILEKMDGTEELLVKLNREDLLRKQRTFDNGSIPHQIHLGELHAILRRQEDFYPFLKDNREKIEKILTFRIPYYVGPLARGNSRFAWMTRKSEETITPWNFEEVVDKGASAQSFIERMTNFDKNLPNEKVLPKHSLLYEYFTVYNELTKVKYVTEGMRKPAFLSGEQKKAIVDLLFKTNRKVTVKQLKEDYFKKIECFDSVEISGVEDRFNASLGTYHDLLKIIKDKDFLDNEENEDILEDIVLTLTLFEDREMIEERLKTYAHLFDDKVMKQLKRRRYTGWGRLSRKLINGIRDKQSGKTILDFLKSDGFANRNFMQLIHDDSLTFKEDIQKAQVSGQGDSLHEHIANLAGSPAIKKGILQTVKVVDELVKVMGRHKPENIVIEMARENQTTQKGQKNSRERMKRIEEGIKELGSQILKEHPVENTQLQNEKLYLYYLQNGRDMYVDQELDINRLSDYDVDHIVPQSFLKDDSIDNKVLTRSDKARGKSDNVPSEEVVKKMKNYWRQLLNAKLITQRKFDNLTKAERGGLSELDKAGFIKRQLVETRQITKHVAQILDSRMNTKYDENDKLIREVKVITLKSKLVSDFRKDFQFYKVREINNYHHAHDAYLNAVVGTALIKKYPKLESEFVYGDYKVYDVRKMIAKSEQEIGKATAKYFFYSNIMNFFKTEITLANGEIRKRPLIETNGETGEIVWDKGRDFATVRKVLSMPQVNIVKKTEVQTGGFSKESILPKRNSDKLIARKKDWDPKKYGGFDSPTVAYSVLVVAKVEKGKSKKLKSVKELLGITIMERSSFEKNPIDFLEAKGYKEVKKDLIIKLPKYSLFELENGRKRMLASAGELQKGNELALPSKYVNFLYLASHYEKLKGSPEDNEQKQLFVEQHKHYLDEIIEQISEFSKRVILADANLDKVLSAYNKHRDKPIREQAENIIHLFTLTNLGAPAAFKYFDTTIDRKRYTSTKEVLDATLIHQSITGLYETRIDLSQLGGDGGEAAAKEAAAKEAAAKEAAAKGGTVSLQDEHRLFDIPVTTSLPDVWLQDFPQAWAETGGLGRAKCQAPIIIDLKPTAVPVSIKQYPMSLEAHMGIRQHIIKFLELGVLRPCRSPWNTPLLPVKKPGTQDYRPVQDLREINKRTVDIHPTVPNPYNLLSTLKPDYSWYTVLDLKDAFFCLPLAPQSQELFAFEWKDPERGISGQLTWTRLPQGFKNSPTLFNEALHRDLTDFRTQHPEVTLLQYVDDLLLAAPTKKACTQGTRHLLQELGEKGYRASAKKAQICQTKVTYLGYILSEGKRWLTPGRIETVARIPPPRNPREVREFLGTAGFCRLWIPGFAELAAPLYALTKPSTPFTWQTEHQLAFEALKKALLSAPALGLPDTSKPFTLFLDERQGIAKGVLTQKLGPWKRPVAYLSKKLDPVAAGWPPCLRIMAATAMLVKDSAKLTLGQPLTVITPHTLEAIVRQPPDRWITNARLTHYQALLLDTDRVQFGPPVTLNPATLLPVPENQPSPHDCRQVLAETHGTREDLKDQELPDADHTWYTDGSSYLDSGTRRAGAAVVDGHNTIWAQSLPPGTSAQKAELIALTKALELSKGKKANIYTDSRYAFATAHTHGSIYERRGWLTSEGKEIKNKAEIIALLKALFLPQEVAIIHCPGHQKGQDPVAVGNRQADRVARQAAMAEVLTLATEPDNTSHITAGKRTADGSEFEKRTADGSEFESPKKKAKVE

SEQ ID NO: 1563 - protein, 2102 aa, synthetic construct
MPAAKRVKLDGGDKKYSIGLDIGTNSVGWAVITDEYKVPSKKFKVLGNTDRHSIKKNLIGALLFDSGETAEATRLKRTARRRYTRRKNRICYLQEIFSNEMAKVDDSFFHRLEESFLVEEDKKHERHPIFGNIVDEVAYHEKYPTIYHLRKKLVDSTDKADLRLIYLALAHMIKFRGHFLIEGDLNPDNSDVDKLFIQLVQTYNQLFEENPINASGVDAKAILSARLSKSRRLENLIAQLPGEKKNGLFGNLIALSLGLTPNFKSNFDLAEDAKLQLSKDTYDDDLDNLLAQIGDQYADLFLAAKNLSDAILLSDILRVNTEITKAPLSASMIKRYDEHHQDLTLLKALVRQQLPEKYKEIFFDQSKNGYAGYIDGGASQEEFYKFIKPILEKMDGTEELLVKLNREDLLRKQRTFDNGSIPHQIHLGELHAILRRQEDFYPFLKDNREKIEKILTFRIPYYVGPLARGNSRFAWMTRKSEETITPWNFEEVVDKGASAQSFIERMTNFDKNLPNEKVLPKHSLLYEYFTVYNELTKVKYVTEGMRKPAFLSGEQKKAIVDLLFKTNRKVTVKQLKEDYFKKIECFDSVEISGVEDRFNASLGTYHDLLKIIKDKDFLDNEENEDILEDIVLTLTLFEDREMIEERLKTYAHLFDDKVMKQLKRRRYTGWGRLSRKLINGIRDKQSGKTILDFLKSDGFANRNFMQLIHDDSLTFKEDIQKAQVSGQGDSLHEHIANLAGSPAIKKGILQTVKVVDELVKVMGRHKPENIVIEMARENQTTQKGQKNSRERMKRIEEGIKELGSQILKEHPVENTQLQNEKLYLYYLQNGRDMYVDQELDINRLSDYDVDHIVPQSFLKDDSIDNKVLTRSDKARGKSDNVPSEEVVKKMKNYWRQLLNAKLITQRKFDNLTKAERGGLSELDKAGFIKRQLVETRQITKHVAQILDSRMNTKYDENDKLIREVKVITLKSKLVSDFRKDFQFYKVREINNYHHAHDAYLNAVVGTALIKKYPKLESEFVYGDYKVYDVRKMIAKSEQEIGKATAKYFFYSNIMNFFKTEITLANGEIRKRPLIETNGETGEIVWDKGRDFATVRKVLSMPQVNIVKKTEVQTGGFSKESILPKRNSDKLIARKKDWDPKKYGGFDSPTVAYSVLVVAKVEKGKSKKLKSVKELLGITIMERSSFEKNPIDFLEAKGYKEVKKDLIIKLPKYSLFELENGRKRMLASAGELQKGNELALPSKYVNFLYLASHYEKLKGSPEDNEQKQLFVEQHKHYLDEIIEQISEFSKRVILADANLDKVLSAYNKHRDKPIREQAENIIHLFTLTNLGAPAAFKYFDTTIDRKRYTSTKEVLDATLIHQSITGLYETRIDLSQLGGDGGGGSEAAAKPAPGGTVSLQDEHRLFDIPVTTSLPDVWLQDFPQAWAETGGLGRAKCQAPIIIDLKPTAVPVSIKQYPMSLEAHMGIRQHIIKFLELGVLRPCRSPWNTPLLPVKKPGTQDYRPVQDLREINKRTVDIHPTVPNPYNLLSTLKPDYSWYTVLDLKDAFFCLPLAPQSQELFAFEWKDPERGISGQLTWTRLPQGFKNSPTLFNEALHRDLTDFRTQHPEVTLLQYVDDLLLAAPTKKACTQGTRHLLQELGEKGYRASAKKAQICQTKVTYLGYILSEGKRWLTPGRIETVARIPPPRNPREVREFLGTAGFCRLWIPGFAELAAPLYALTKPSTPFTWQTEHQLAFEALKKALLSAPALGLPDTSKPFTLFLDERQGIAKGVLTQKLGPWKRPVAYLSKKLDPVAAGWPPCLRIMAATAMLVKDSAKLTLGQPLTVITPHTLEAIVRQPPDRWITNARLTHYQALLLDTDRVQFGPPVTLNPATLLPVPENQPSPHDCRQVLAETHGTREDLKDQELPDADHTWYTDGSSYLDSGTRRAGAAVVDGHNTIWAQSLPPGTSAQKAELIALTKALELSKGKKANIYTDSRYAFATAHTHGSIYERRGWLTSEGKEIKNKAEIIALLKALFLPQEVAIIHCPGHQKGQDPVAVGNRQADRVARQAAMAEVLTLATEPDNTSHITAGKRTADGSEFEKRTADGSEFESPKKKAKVE

SEQ ID NO: 1564 - protein, 2096 aa, synthetic construct
MPAAKRVKLDGGDKKYSIGLDIGTNSVGWAVITDEYKVPSKKFKVLGNTDRHSIKKNLIGALLFDSGETAEATRLKRTARRRYTRRKNRICYLQEIFSNEMAKVDDSFFHRLEESFLVEEDKKHERHPIFGNIVDEVAYHEKYPTIYHLRKKLVDSTDKADLRLIYLALAHMIKFRGHFLIEGDLNPDNSDVDKLFIQLVQTYNQLFEENPINASGVDAKAILSARLSKSRRLENLIAQLPGEKKNGLFGNLIALSLGLTPNFKSNFDLAEDAKLQLSKDTYDDDLDNLLAQIGDQYADLFLAAKNLSDAILLSDILRVNTEITKAPLSASMIKRYDEHHQDLTLLKALVRQQLPEKYKEIFFDQSKNGYAGYIDGGASQEEFYKFIKPILEKMDGTEELLVKLNREDLLRKQRTFDNGSIPHQIHLGELHAILRRQEDFYPFLKDNREKIEKILTFRIPYYVGPLARGNSRFAWMTRKSEETITPWNFEEVVDKGASAQSFIERMTNFDKNLPNEKVLPKHSLLYEYFTVYNELTKVKYVTEGMRKPAFLSGEQKKAIVDLLFKTNRKVTVKQLKEDYFKKIECFDSVEISGVEDRFNASLGTYHDLLKIIKDKDFLDNEENEDILEDIVLTLTLFEDREMIEERLKTYAHLFDDKVMKQLKRRRYTGWGRLSRKLINGIRDKQSGKTILDFLKSDGFANRNFMQLIHDDSLTFKEDIQKAQVSGQGDSLHEHIANLAGSPAIKKGILQTVKVVDELVKVMGRHKPENIVIEMARENQTTQKGQKNSRERMKRIEEGIKELGSQILKEHPVENTQLQNEKLYLYYLQNGRDMYVDQELDINRLSDYDVDHIVPQSFLKDDSIDNKVLTRSDKARGKSDNVPSEEVVKKMKNYWRQLLNAKLITQRKFDNLTKAERGGLSELDKAGFIKRQLVETRQITKHVAQILDSRMNTKYDENDKLIREVKVITLKSKLVSDFRKDFQFYKVREINNYHHAHDAYLNAVVGTALIKKYPKLESEFVYGDYKVYDVRKMIAKSEQEIGKATAKYFFYSNIMNFFKTEITLANGEIRKRPLIETNGETGEIVWDKGRDFATVRKVLSMPQVNIVKKTEVQTGGFSKESILPKRNSDKLIARKKDWDPKKYGGFDSPTVAYSVLVVAKVEKGKSKKLKSVKELLGITIMERSSFEKNPIDFLEAKGYKEVKKDLIIKLPKYSLFELENGRKRMLASAGELQKGNELALPSKYVNFLYLASHYEKLKGSPEDNEQKQLFVEQHKHYLDEIIEQISEFSKRVILADANLDKVLSAYNKHRDKPIREQAENIIHLFTLTNLGAPAAFKYFDTTIDRKRYTSTKEVLDATLIHQSITGLYETRIDLSQLGGDGGPAPAPGGTVSLQDEHRLFDIPVTTSLPDVWLQDFPQAWAETGGLGRAKCQAPIIIDLKPTAVPVSIKQYPMSLEAHMGIRQHIIKFLELGVLRPCRSPWNTPLLPVKKPGTQDYRPVQDLREINKRTVDIHPTVPNPYNLLSTLKPDYSWYTVLDLKDAFFCLPLAPQSQELFAFEWKDPERGISGQLTWTRLPQGFKNSPTLFNEALHRDLTDFRTQHPEVTLLQYVDDLLLAAPTKKACTQGTRHLLQELGEKGYRASAKKAQICQTKVTYLGYILSEGKRWLTPGRIETVARIPPPRNPREVREFLGTAGFCRLWIPGFAELAAPLYALTKPSTPFTWQTEHQLAFEALKKALLSAPALGLPDTSKPFTLFLDERQGIAKGVLTQKLGPWKRPVAYLSKKLDPVAAGWPPCLRIMAATAMLVKDSAKLTLGQPLTVITPHTLEAIVRQPPDRWITNARLTHYQALLLDTDRVQFGPPVTLNPATLLPVPENQPSPHDCRQVLAETHGTREDLKDQELPDADHTWYTDGSSYLDSGTRRAGAAVVDGHNTIWAQSLPPGTSAQKAELIALTKALELSKGKKANIYTDSRYAFATAHTHGSIYERRGWLTSEGKEIKNKAEIIALLKALFLPQEVAIIHCPGHQKGQDPVAVGNRQADRVARQAAMAEVLTLATEPDNTSHITAGKRTADGSEFEKRTADGSEFESPKKKAKVE

SEQ ID NO: 1565 - protein, 2097 aa, synthetic construct
MPAAKRVKLDGGDKKYSIGLDIGTNSVGWAVITDEYKVPSKKFKVLGNTDRHSIKKNLIGALLFDSGETAEATRLKRTARRRYTRRKNRICYLQEIFSNEMAKVDDSFFHRLEESFLVEEDKKHERHPIFGNIVDEVAYHEKYPTIYHLRKKLVDSTDKADLRLIYLALAHMIKFRGHFLIEGDLNPDNSDVDKLFIQLVQTYNQLFEENPINASGVDAKAILSARLSKSRRLENLIAQLPGEKKNGLFGNLIALSLGLTPNFKSNFDLAEDAKLQLSKDTYDDDLDNLLAQIGDQYADLFLAAKNLSDAILLSDILRVNTEITKAPLSASMIKRYDEHHQDLTLLKALVRQQLPEKYKEIFFDQSKNGYAGYIDGGASQEEFYKFIKPILEKMDGTEELLVKLNREDLLRKQRTFDNGSIPHQIHLGELHAILRRQEDFYPFLKDNREKIEKILTFRIPYYVGPLARGNSRFAWMTRKSEETITPWNFEEVVDKGASAQSFIERMTNFDKNLPNEKVLPKHSLLYEYFTVYNELTKVKYVTEGMRKPAFLSGEQKKAIVDLLFKTNRKVTVKQLKEDYFKKIECFDSVEISGVEDRFNASLGTYHDLLKIIKDKDFLDNEENEDILEDIVLTLTLFEDREMIEERLKTYAHLFDDKVMKQLKRRRYTGWGRLSRKLINGIRDKQSGKTILDFLKSDGFANRNFMQLIHDDSLTFKEDIQKAQVSGQGDSLHEHIANLAGSPAIKKGILQTVKVVDELVKVMGRHKPENIVIEMARENQTTQKGQKNSRERMKRIEEGIKELGSQILKEHPVENTQLQNEKLYLYYLQNGRDMYVDQELDINRLSDYDVDHIVPQSFLKDDSIDNKVLTRSDKARGKSDNVPSEEVVKKMKNYWRQLLNAKLITQRKFDNLTKAERGGLSELDKAGFIKRQLVETRQITKHVAQILDSRMNTKYDENDKLIREVKVITLKSKLVSDFRKDFQFYKVREINNYHHAHDAYLNAVVGTALIKKYPKLESEFVYGDYKVYDVRKMIAKSEQEIGKATAKYFFYSNIMNFFKTEITLANGEIRKRPLIETNGETGEIVWDKGRDFATVRKVLSMPQVNIVKKTEVQTGGFSKESILPKRNSDKLIARKKDWDPKKYGGFDSPTVAYSVLVVAKVEKGKSKKLKSVKELLGITIMERSSFEKNPIDFLEAKGYKEVKKDLIIKLPKYSLFELENGRKRMLASAGELQKGNELALPSKYVNFLYLASHYEKLKGSPEDNEQKQLFVEQHKHYLDEIIEQISEFSKRVILADANLDKVLSAYNKHRDKPIREQAENIIHLFTLTNLGAPAAFKYFDTTIDRKRYTSTKEVLDATLIHQSITGLYETRIDLSQLGGDGGGGGGSSGGTVSLQDEHRLFDIPVTTSLPDVWLQDFPQAWAETGGLGRAKCQAPIIIDLKPTAVPVSIKQYPMSLEAHMGIRQHIIKFLELGVLRPCRSPWNTPLLPVKKPGTQDYRPVQDLREINKRTVDIHPTVPNPYNLLSTLKPDYSWYTVLDLKDAFFCLPLAPQSQELFAFEWKDPERGISGQLTWTRLPQGFKNSPTLFNEALHRDLTDFRTQHPEVTLLQYVDDLLLAAPTKKACTQGTRHLLQELGEKGYRASAKKAQICQTKVTYLGYILSEGKRWLTPGRIETVARIPPPRNPREVREFLGTAGFCRLWIPGFAELAAPLYALTKPSTPFTWQTEHQLAFEALKKALLSAPALGLPDTSKPFTLFLDERQGIAKGVLTQKLGPWKRPVAYLSKKLDPVAAGWPPCLRIMAATAMLVKDSAKLTLGQPLTVITPHTLEAIVRQPPDRWITNARLTHYQALLLDTDRVQFGPPVTLNPATLLPVPENQPSPHDCRQVLAETHGTREDLKDQELPDADHTWYTDGSSYLDSGTRRAGAAVVDGHNTIWAQSLPPGTSAQKAELIALTKALELSKGKKANIYTDSRYAFATAHTHGSIYERRGWLTSEGKEIKNKAEIIALLKALFLPQEVAIIHCPGHQKGQDPVAVGNRQADRVARQAAMAEVLTLATEPDNTSHITAGKRTADGSEFEKRTADGSEFESPKKKAKVE

SEQ ID NO: 1566 - protein, 2099 aa, synthetic construct
MPAAKRVKLDGGDKKYSIGLDIGTNSVGWAVITDEYKVPSKKFKVLGNTDRHSIKKNLIGALLFDSGETAEATRLKRTARRRYTRRKNRICYLQEIFSNEMAKVDDSFFHRLEESFLVEEDKKHERHPIFGNIVDEVAYHEKYPTIYHLRKKLVDSTDKADLRLIYLALAHMIKFRGHFLIEGDLNPDNSDVDKLFIQLVQTYNQLFEENPINASGVDAKAILSARLSKSRRLENLIAQLPGEKKNGLFGNLIALSLGLTPNFKSNFDLAEDAKLQLSKDTYDDDLDNLLAQIGDQYADLFLAAKNLSDAILLSDILRVNTEITKAPLSASMIKRYDEHHQDLTLLKALVRQQLPEKYKEIFFDQSKNGYAGYIDGGASQEEFYKFIKPILEKMDGTEELLVKLNREDLLRKQRTFDNGSIPHQIHLGELHAILRRQEDFYPFLKDNREKIEKILTFRIPYYVGPLARGNSRFAWMTRKSEETITPWNFEEVVDKGASAQSFIERMTNFDKNLPNEKVLPKHSLLYEYFTVYNELTKVKYVTEGMRKPAFLSGEQKKAIVDLLFKTNRKVTVKQLKEDYFKKIECFDSVEISGVEDRFNASLGTYHDLLKIIKDKDFLDNEENEDILEDIVLTLTLFEDREMIEERLKTYAHLFDDKVMKQLKRRRYTGWGRLSRKLINGIRDKQSGKTILDFLKSDGFANRNFMQLIHDDSLTFKEDIQKAQVSGQGDSLHEHIANLAGSPAIKKGILQTVKVVDELVKVMGRHKPENIVIEMARENQTTQKGQKNSRERMKRIEEGIKELGSQILKEHPVENTQLQNEKLYLYYLQNGRDMYVDQELDINRLSDYDVDHIVPQSFLKDDSIDNKVLTRSDKARGKSDNVPSEEVVKKMKNYWRQLLNAKLITQRKFDNLTKAERGGLSELDKAGFIKRQLVETRQITKHVAQILDSRMNTKYDENDKLIREVKVITLKSKLVSDFRKDFQFYKVREINNYHHAHDAYLNAVVGTALIKKYPKLESEFVYGDYKVYDVRKMIAKSEQEIGKATAKYFFYSNIMNFFKTEITLANGEIRKRPLIETNGETGEIVWDKGRDFATVRKVLSMPQVNIVKKTEVQTGGFSKESILPKRNSDKLIARKKDWDPKKYGGFDSPTVAYSVLVVAKVEKGKSKKLKSVKELLGITIMERSSFEKNPIDFLEAKGYKEVKKDLIIKLPKYSLFELENGRKRMLASAGELQKGNELALPSKYVNFLYLASHYEKLKGSPEDNEQKQLFVEQHKHYLDEIIEQISEFSKRVILADANLDKVLSAYNKHRDKPIREQAENIIHLFTLTNLGAPAAFKYFDTTIDRKRYTSTKEVLDATLIHQSITGLYETRIDLSQLGGDGGGGGEAAAKGGTVSLQDEHRLFDIPVTTSLPDVWLQDFPQAWAETGGLGRAKCQAPIIIDLKPTAVPVSIKQYPMSLEAHMGIRQHIIKFLELGVLRPCRSPWNTPLLPVKKPGTQDYRPVQDLREINKRTVDIHPTVPNPYNLLSTLKPDYSWYTVLDLKDAFFCLPLAPQSQELFAFEWKDPERGISGQLTWTRLPQGFKNSPTLFNEALHRDLTDFRTQHPEVTLLQYVDDLLLAAPTKKACTQGTRHLLQELGEKGYRASAKKAQICQTKVTYLGYILSEGKRWLTPGRIETVARIPPPRNPREVREFLGTAGFCRLWIPGFAELAAPLYALTKPSTPFTWQTEHQLAFEALKKALLSAPALGLPDTSKPFTLFLDERQGIAKGVLTQKLGPWKRPVAYLSKKLDPVAAGWPPCLRIMAATAMLVKDSAKLTLGQPLTVITPHTLEAIVRQPPDRWITNARLTHYQALLLDTDRVQFGPPVTLNPATLLPVPENQPSPHDCRQVLAETHGTREDLKDQELPDADHTWYTDGSSYLDSGTRRAGAAVVDGHNTIWAQSLPPGTSAQKAELIALTKALELSKGKKANIYTDSRYAFATAHTHGSIYERRGWLTSEGKEIKNKAEIIALLKALFLPQEVAIIHCPGHQKGQDPVAVGNRQADRVARQAAMAEVLTLATEPDNTSHITAGKRTADGSEFEKRTADGSEFESPKKKAKVE

SEQ ID NO: 1567 - protein, 2102 aa, synthetic construct
MPAAKRVKLDGGDKKYSIGLDIGTNSVGWAVITDEYKVPSKKFKVLGNTDRHSIKKNLIGALLFDSGETAEATRLKRTARRRYTRRKNRICYLQEIFSNEMAKVDDSFFHRLEESFLVEEDKKHERHPIFGNIVDEVAYHEKYPTIYHLRKKLVDSTDKADLRLIYLALAHMIKFRGHFLIEGDLNPDNSDVDKLFIQLVQTYNQLFEENPINASGVDAKAILSARLSKSRRLENLIAQLPGEKKNGLFGNLIALSLGLTPNFKSNFDLAEDAKLQLSKDTYDDDLDNLLAQIGDQYADLFLAAKNLSDAILLSDILRVNTEITKAPLSASMIKRYDEHHQDLTLLKALVRQQLPEKYKEIFFDQSKNGYAGYIDGGASQEEFYKFIKPILEKMDGTEELLVKLNREDLLRKQRTFDNGSIPHQIHLGELHAILRRQEDFYPFLKDNREKIEKILTFRIPYYVGPLARGNSRFAWMTRKSEETITPWNFEEVVDKGASAQSFIERMTNFDKNLPNEKVLPKHSLLYEYFTVYNELTKVKYVTEGMRKPAFLSGEQKKAIVDLLFKTNRKVTVKQLKEDYFKKIECFDSVEISGVEDRFNASLGTYHDLLKIIKDKDFLDNEENEDILEDIVLTLTLFEDREMIEERLKTYAHLFDDKVMKQLKRRRYTGWGRLSRKLINGIRDKQSGKTILDFLKSDGFANRNFMQLIHDDSLTFKEDIQKAQVSGQGDSLHEHIANLAGSPAIKKGILQTVKVVDELVKVMGRHKPENIVIEMARENQTTQKGQKNSRERMKRIEEGIKELGSQILKEHPVENTQLQNEKLYLYYLQNGRDMYVDQELDINRLSDYDVDHIVPQSFLKDDSIDNKVLTRSDKARGKSDNVPSEEVVKKMKNYWRQLLNAKLITQRKFDNLTKAERGGLSELDKAGFIKRQLVETRQITKHVAQILDSRMNTKYDENDKLIREVKVITLKSKLVSDFRKDFQFYKVREINNYHHAHDAYLNAVVGTALIKKYPKLESEFVYGDYKVYDVRKMIAKSEQEIGKATAKYFFYSNIMNFFKTEITLANGEIRKRPLIETNGETGEIVWDKGRDFATVRKVLSMPQVNIVKKTEVQTGGFSKESILPKRNSDKLIARKKDWDPKKYGGFDSPTVAYSVLVVAKVEKGKSKKLKSVKELLGITIMERSSFEKNPIDFLEAKGYKEVKKDLIIKLPKYSLFELENGRKRMLASAGELQKGNELALPSKYVNFLYLASHYEKLKGSPEDNEQKQLFVEQHKHYLDEIIEQISEFSKRVILADANLDKVLSAYNKHRDKPIREQAENIIHLFTLTNLGAPAAFKYFDTTIDRKRYTSTKEVLDATLIHQSITGLYETRIDLSQLGGDGGGSSGGSEAAAKGGTVSLQDEHRLFDIPVTTSLPDVWLQDFPQAWAETGGLGRAKCQAPIIIDLKPTAVPVSIKQYPMSLEAHMGIRQHIIKFLELGVLRPCRSPWNTPLLPVKKPGTQDYRPVQDLREINKRTVDIHPTVPNPYNLLSTLKPDYSWYTVLDLKDAFFCLPLAPQSQELFAFEWKDPERGISGQLTWTRLPQGFKNSPTLFNEALHRDLTDFRTQHPEVTLLQYVDDLLLAAPTKKACTQGTRHLLQELGEKGYRASAKKAQICQTKVTYLGYILSEGKRWLTPGRIETVARIPPPRNPREVREFLGTAGFCRLWIPGFAELAAPLYALTKPSTPFTWQTEHQLAFEALKKALLSAPALGLPDTSKPFTLFLDERQGIAKGVLTQKLGPWKRPVAYLSKKLDPVAAGWPPCLRIMAATAMLVKDSAKLTLGQPLTVITPHTLEAIVRQPPDRWITNARLTHYQALLLDTDRVQFGPPVTLNPATLLPVPENQPSPHDCRQVLAETHGTREDLKDQELPDADHTWYTDGSSYLDSGTRRAGAAVVDGHNTIWAQSLPPGTSAQKAELIALTKALELSKGKKANIYTDSRYAFATAHTHGSIYERRGWLTSEGKEIKNKAEIIALLKALFLPQEVAIIHCPGHQKGQDPVAVGNRQADRVARQAAMAEVLTLATEPDNTSHITAGKRTADGSEFEKRTADGSEFESPKKKAKVE

SEQ ID NO: 1568 - protein, 2100 aa, synthetic construct
MPAAKRVKLDGGDKKYSIGLDIGTNSVGWAVITDEYKVPSKKFKVLGNTDRHSIKKNLIGALLFDSGETAEATRLKRTARRRYTRRKNRICYLQEIFSNEMAKVDDSFFHRLEESFLVEEDKKHERHPIFGNIVDEVAYHEKYPTIYHLRKKLVDSTDKADLRLIYLALAHMIKFRGHFLIEGDLNPDNSDVDKLFIQLVQTYNQLFEENPINASGVDAKAILSARLSKSRRLENLIAQLPGEKKNGLFGNLIALSLGLTPNFKSNFDLAEDAKLQLSKDTYDDDLDNLLAQIGDQYADLFLAAKNLSDAILLSDILRVNTEITKAPLSASMIKRYDEHHQDLTLLKALVRQQLPEKYKEIFFDQSKNGYAGYIDGGASQEEFYKFIKPILEKMDGTEELLVKLNREDLLRKQRTFDNGSIPHQIHLGELHAILRRQEDFYPFLKDNREKIEKILTFRIPYYVGPLARGNSRFAWMTRKSEETITPWNFEEVVDKGASAQSFIERMTNFDKNLPNEKVLPKHSLLYEYFTVYNELTKVKYVTEGMRKPAFLSGEQKKAIVDLLFKTNRKVTVKQLKEDYFKKIECFDSVEISGVEDRFNASLGTYHDLLKIIKDKDFLDNEENEDILEDIVLTLTLFEDREMIEERLKTYAHLFDDKVMKQLKRRRYTGWGRLSRKLINGIRDKQSGKTILDFLKSDGFANRNFMQLIHDDSLTFKEDIQKAQVSGQGDSLHEHIANLAGSPAIKKGILQTVKVVDELVKVMGRHKPENIVIEMARENQTTQKGQKNSRERMKRIEEGIKELGSQILKEHPVENTQLQNEKLYLYYLQNGRDMYVDQELDINRLSDYDVDHIVPQSFLKDDSIDNKVLTRSDKARGKSDNVPSEEVVKKMKNYWRQLLNAKLITQRKFDNLTKAERGGLSELDKAGFIKRQLVETRQITKHVAQILDSRMNTKYDENDKLIREVKVITLKSKLVSDFRKDFQFYKVREINNYHHAHDAYLNAVVGTALIKKYPKLESEFVYGDYKVYDVRKMIAKSEQEIGKATAKYFFYSNIMNFFKTEITLANGEIRKRPLIETNGETGEIVWDKGRDFATVRKVLSMPQVNIVKKTEVQTGGFSKESILPKRNSDKLIARKKDWDPKKYGGFDSPTVAYSVLVVAKVEKGKSKKLKSVKELLGITIMERSSFEKNPIDFLEAKGYKEVKKDLIIKLPKYSLFELENGRKRMLASAGELQKGNELALPSKYVNFLYLASHYEKLKGSPEDNEQKQLFVEQHKHYLDEIIEQISEFSKRVILADANLDKVLSAYNKHRDKPIREQAENIIHLFTLTNLGAPAAFKYFDTTIDRKRYTSTKEVLDATLIHQSITGLYETRIDLSQLGGDGGPAPGSSGGGGGTVSLQDEHRLFDIPVTTSLPDVWLQDFPQAWAETGGLGRAKCQAPIIIDLKPTAVPVSIKQYPMSLEAHMGIRQHIIKFLELGVLRPCRSPWNTPLLPVKKPGTQDYRPVQDLREINKRTVDIHPTVPNPYNLLSTLKPDYSWYTVLDLKDAFFCLPLAPQSQELFAFEWKDPERGISGQLTWTRLPQGFKNSPTLFNEALHRDLTDFRTQHPEVTLLQYVDDLLLAAPTKKACTQGTRHLLQELGEKGYRASAKKAQICQTKVTYLGYILSEGKRWLTPGRIETVARIPPPRNPREVREFLGTAGFCRLWIPGFAELAAPLYALTKPSTPFTWQTEHQLAFEALKKALLSAPALGLPDTSKPFTLFLDERQGIAKGVLTQKLGPWKRPVAYLSKKLDPVAAGWPPCLRIMAATAMLVKDSAKLTLGQPLTVITPHTLEAIVRQPPDRWITNARLTHYQALLLDTDRVQFGPPVTLNPATLLPVPENQPSPHDCRQVLAETHGTREDLKDQELPDADHTWYTDGSSYLDSGTRRAGAAVVDGHNTIWAQSLPPGTSAQKAELIALTKALELSKGKKANIYTDSRYAFATAHTHGSIYERRGWLTSEGKEIKNKAEIIALLKALFLPQEVAIIHCPGHQKGQDPVAVGNRQADRVARQAAMAEVLTLATEPDNTSHITAGKRTADGSEFEKRTADGSEFESPKKKAKVE

SEQ ID NO: 1569 - protein, 2099 aa, synthetic construct
MPAAKRVKLDGGDKKYSIGLDIGTNSVGWAVITDEYKVPSKKFKVLGNTDRHSIKKNLIGALLFDSGETAEATRLKRTARRRYTRRKNRICYLQEIFSNEMAKVDDSFFHRLEESFLVEEDKKHERHPIFGNIVDEVAYHEKYPTIYHLRKKLVDSTDKADLRLIYLALAHMIKFRGHFLIEGDLNPDNSDVDKLFIQLVQTYNQLFEENPINASGVDAKAILSARLSKSRRLENLIAQLPGEKKNGLFGNLIALSLGLTPNFKSNFDLAEDAKLQLSKDTYDDDLDNLLAQIGDQYADLFLAAKNLSDAILLSDILRVNTEITKAPLSASMIKRYDEHHQDLTLLKALVRQQLPEKYKEIFFDQSKNGYAGYIDGGASQEEFYKFIKPILEKMDGTEELLVKLNREDLLRKQRTFDNGSIPHQIHLGELHAILRRQEDFYPFLKDNREKIEKILTFRIPYYVGPLARGNSRFAWMTRKSEETITPWNFEEVVDKGASAQSFIERMTNFDKNLPNEKVLPKHSLLYEYFTVYNELTKVKYVTEGMRKPAFLSGEQKKAIVDLLFKTNRKVTVKQLKEDYFKKIECFDSVEISGVEDRFNASLGTYHDLLKIIKDKDFLDNEENEDILEDIVLTLTLFEDREMIEERLKTYAHLFDDKVMKQLKRRRYTGWGRLSRKLINGIRDKQSGKTILDFLKSDGFANRNFMQLIHDDSLTFKEDIQKAQVSGQGDSLHEHIANLAGSPAIKKGILQTVKVVDELVKVMGRHKPENIVIEMARENQTTQKGQKNSRERMKRIEEGIKELGSQILKEHPVENTQLQNEKLYLYYLQNGRDMYVDQELDINRLSDYDVDHIVPQSFLKDDSIDNKVLTRSDKARGKSDNVPSEEVVKKMKNYWRQLLNAKLITQRKFDNLTKAERGGLSELDKAGFIKRQLVETRQITKHVAQILDSRMNTKYDENDKLIREVKVITLKSKLVSDFRKDFQFYKVREINNYHHAHDAYLNAVVGTALIKKYPKLESEFVYGDYKVYDVRKMIAKSEQEIGKATAKYFFYSNIMNFFKTEITLANGEIRKRPLIETNGETGEIVWDKGRDFATVRKVLSMPQVNIVKKTEVQTGGFSKESILPKRNSDKLIARKKDWDPKKYGGFDSPTVAYSVLVVAKVEKGKSKKLKSVKELLGITIMERSSFEKNPIDFLEAKGYKEVKKDLIIKLPKYSLFELENGRKRMLASAGELQKGNELALPSKYVNFLYLASHYEKLKGSPEDNEQKQLFVEQHKHYLDEIIEQISEFSKRVILADANLDKVLSAYNKHRDKPIREQAENIIHLFTLTNLGAPAAFKYFDTTIDRKRYTSTKEVLDATLIHQSITGLYETRIDLSQLGGDGGPAPEAAAKGGTVSLQDEHRLFDIPVTTSLPDVWLQDFPQAWAETGGLGRAKCQAPIIIDLKPTAVPVSIKQYPMSLEAHMGIRQHIIKFLELGVLRPCRSPWNTPLLPVKKPGTQDYRPVQDLREINKRTVDIHPTVPNPYNLLSTLKPDYSWYTVLDLKDAFFCLPLAPQSQELFAFEWKDPERGISGQLTWTRLPQGFKNSPTLFNEALHRDLTDFRTQHPEVTLLQYVDDLLLAAPTKKACTQGTRHLLQELGEKGYRASAKKAQICQTKVTYLGYILSEGKRWLTPGRIETVARIPPPRNPREVREFLGTAGFCRLWIPGFAELAAPLYALTKPSTPFTWQTEHQLAFEALKKALLSAPALGLPDTSKPFTLFLDERQGIAKGVLTQKLGPWKRPVAYLSKKLDPVAAGWPPCLRIMAATAMLVKDSAKLTLGQPLTVITPHTLEAIVRQPPDRWITNARLTHYQALLLDTDRVQFGPPVTLNPATLLPVPENQPSPHDCRQVLAETHGTREDLKDQELPDADHTWYTDGSSYLDSGTRRAGAAVVDGHNTIWAQSLPPGTSAQKAELIALTKALELSKGKKANIYTDSRYAFATAHTHGSIYERRGWLTSEGKEIKNKAEIIALLKALFLPQEVAIIHCPGHQKGQDPVAVGNRQADRVARQAAMAEVLTLATEPDNTSHITAGKRTADGSEFEKRTADGSEFESPKKKAKVE

SEQ ID NO: 1570 - protein, 2107 aa, synthetic construct
MPAAKRVKLDGGDKKYSIGLDIGTNSVGWAVITDEYKVPSKKFKVLGNTDRHSIKKNLIGALLFDSGETAEATRLKRTARRRYTRRKNRICYLQEIFSNEMAKVDDSFFHRLEESFLVEEDKKHERHPIFGNIVDEVAYHEKYPTIYHLRKKLVDSTDKADLRLIYLALAHMIKFRGHFLIEGDLNPDNSDVDKLFIQLVQTYNQLFEENPINASGVDAKAILSARLSKSRRLENLIAQLPGEKKNGLFGNLIALSLGLTPNFKSNFDLAEDAKLQLSKDTYDDDLDNLLAQIGDQYADLFLAAKNLSDAILLSDILRVNTEITKAPLSASMIKRYDEHHQDLTLLKALVRQQLPEKYKEIFFDQSKNGYAGYIDGGASQEEFYKFIKPILEKMDGTEELLVKLNREDLLRKQRTFDNGSIPHQIHLGELHAILRRQEDFYPFLKDNREKIEKILTFRIPYYVGPLARGNSRFAWMTRKSEETITPWNFEEVVDKGASAQSFIERMTNFDKNLPNEKVLPKHSLLYEYFTVYNELTKVKYVTEGMRKPAFLSGEQKKAIVDLLFKTNRKVTVKQLKEDYFKKIECFDSVEISGVEDRFNASLGTYHDLLKIIKDKDFLDNEENEDILEDIVLTLTLFEDREMIEERLKTYAHLFDDKVMKQLKRRRYTGWGRLSRKLINGIRDKQSGKTILDFLKSDGFANRNFMQLIHDDSLTFKEDIQKAQVSGQGDSLHEHIANLAGSPAIKKGILQTVKVVDELVKVMGRHKPENIVIEMARENQTTQKGQKNSRERMKRIEEGIKELGSQILKEHPVENTQLQNEKLYLYYLQNGRDMYVDQELDINRLSDYDVDHIVPQSFLKDDSIDNKVLTRSDKARGKSDNVPSEEVVKKMKNYWRQLLNAKLITQRKFDNLTKAERGGLSELDKAGFIKRQLVETRQITKHVAQILDSRMNTKYDENDKLIREVKVITLKSKLVSDFRKDFQFYKVREINNYHHAHDAYLNAVVGTALIKKYPKLESEFVYGDYKVYDVRKMIAKSEQEIGKATAKYFFYSNIMNFFKTEITLANGEIRKRPLIETNGETGEIVWDKGRDFATVRKVLSMPQVNIVKKTEVQTGGFSKESILPKRNSDKLIARKKDWDPKKYGGFDSPTVAYSVLVVAKVEKGKSKKLKSVKELLGITIMERSSFEKNPIDFLEAKGYKEVKKDLIIKLPKYSLFELENGRKRMLASAGELQKGNELALPSKYVNFLYLASHYEKLKGSPEDNEQKQLFVEQHKHYLDEIIEQISEFSKRVILADANLDKVLSAYNKHRDKPIREQAENIIHLFTLTNLGAPAAFKYFDTTIDRKRYTSTKEVLDATLIHQSITGLYETRIDLSQLGGDGGSGSETPGTSESATPESGGTVSLQDEHRLFDIPVTTSLPDVWLQDFPQAWAETGGLGRAKCQAPIIIDLKPTAVPVSIKQYPMSLEAHMGIRQHIIKFLELGVLRPCRSPWNTPLLPVKKPGTQDYRPVQDLREINKRTVDIHPTVPNPYNLLSTLKPDYSWYTVLDLKDAFFCLPLAPQSQELFAFEWKDPERGISGQLTWTRLPQGFKNSPTLFNEALHRDLTDFRTQHPEVTLLQYVDDLLLAAPTKKACTQGTRHLLQELGEKGYRASAKKAQICQTKVTYLGYILSEGKRWLTPGRIETVARIPPPRNPREVREFLGTAGFCRLWIPGFAELAAPLYALTKPSTPFTWQTEHQLAFEALKKALLSAPALGLPDTSKPFTLFLDERQGIAKGVLTQKLGPWKRPVAYLSKKLDPVAAGWPPCLRIMAATAMLVKDSAKLTLGQPLTVITPHTLEAIVRQPPDRWITNARLTHYQALLLDTDRVQFGPPVTLNPATLLPVPENQPSPHDCRQVLAETHGTREDLKDQELPDADHTWYTDGSSYLDSGTRRAGAAVVDGHNTIWAQSLPPGTSAQKAELIALTKALELSKGKKANIYTDSRYAFATAHTHGSIYERRGWLTSEGKEIKNKAEIIALLKALFLPQEVAIIHCPGHQKGQDPVAVGNRQADRVARQAAMAEVLTLATEPDNTSHITAGKRTADGSEFEKRTADGSEFESPKKKAKVE

SEQ ID NO: 1571 - protein, 2102 aa, synthetic construct
MPAAKRVKLDGGDKKYSIGLDIGTNSVGWAVITDEYKVPSKKFKVLGNTDRHSIKKNLIGALLFDSGETAEATRLKRTARRRYTRRKNRICYLQEIFSNEMAKVDDSFFHRLEESFLVEEDKKHERHPIFGNIVDEVAYHEKYPTIYHLRKKLVDSTDKADLRLIYLALAHMIKFRGHFLIEGDLNPDNSDVDKLFIQLVQTYNQLFEENPINASGVDAKAILSARLSKSRRLENLIAQLPGEKKNGLFGNLIALSLGLTPNFKSNFDLAEDAKLQLSKDTYDDDLDNLLAQIGDQYADLFLAAKNLSDAILLSDILRVNTEITKAPLSASMIKRYDEHHQDLTLLKALVRQQLPEKYKEIFFDQSKNGYAGYIDGGASQEEFYKFIKPILEKMDGTEELLVKLNREDLLRKQRTFDNGSIPHQIHLGELHAILRRQEDFYPFLKDNREKIEKILTFRIPYYVGPLARGNSRFAWMTRKSEETITPWNFEEVVDKGASAQSFIERMTNFDKNLPNEKVLPKHSLLYEYFTVYNELTKVKYVTEGMRKPAFLSGEQKKAIVDLLFKTNRKVTVKQLKEDYFKKIECFDSVEISGVEDRFNASLGTYHDLLKIIKDKDFLDNEENEDILEDIVLTLTLFEDREMIEERLKTYAHLFDDKVMKQLKRRRYTGWGRLSRKLINGIRDKQSGKTILDFLKSDGFANRNFMQLIHDDSLTFKEDIQKAQVSGQGDSLHEHIANLAGSPAIKKGILQTVKVVDELVKVMGRHKPENIVIEMARENQTTQKGQKNSRERMKRIEEGIKELGSQILKEHPVENTQLQNEKLYLYYLQNGRDMYVDQELDINRLSDYDVDHIVPQSFLKDDSIDNKVLTRSDKARGKSDNVPSEEVVKKMKNYWRQLLNAKLITQRKFDNLTKAERGGLSELDKAGFIKRQLVETRQITKHVAQILDSRMNTKYDENDKLIREVKVITLKSKLVSDFRKDFQFYKVREINNYHHAHDAYLNAVVGTALIKKYPKLESEFVYGDYKVYDVRKMIAKSEQEIGKATAKYFFYSNIMNFFKTEITLANGEIRKRPLIETNGETGEIVWDKGRDFATVRKVLSMPQVNIVKKTEVQTGGFSKESILPKRNSDKLIARKKDWDPKKYGGFDSPTVAYSVLVVAKVEKGKSKKLKSVKELLGITIMERSSFEKNPIDFLEAKGYKEVKKDLIIKLPKYSLFELENGRKRMLASAGELQKGNELALPSKYVNFLYLASHYEKLKGSPEDNEQKQLFVEQHKHYLDEIIEQISEFSKRVILADANLDKVLSAYNKHRDKPIREQAENIIHLFTLTNLGAPAAFKYFDTTIDRKRYTSTKEVLDATLIHQSITGLYETRIDLSQLGGDGGEAAAKGSSPAPGGTVSLQDEHRLFDIPVTTSLPDVWLQDFPQAWAETGGLGRAKCQAPIIIDLKPTAVPVSIKQYPMSLEAHMGIRQHIIKFLELGVLRPCRSPWNTPLLPVKKPGTQDYRPVQDLREINKRTVDIHPTVPNPYNLLSTLKPDYSWYTVLDLKDAFFCLPLAPQSQELFAFEWKDPERGISGQLTWTRLPQGFKNSPTLFNEALHRDLTDFRTQHPEVTLLQYVDDLLLAAPTKKACTQGTRHLLQELGEKGYRASAKKAQICQTKVTYLGYILSEGKRWLTPGRIETVARIPPPRNPREVREFLGTAGFCRLWIPGFAELAAPLYALTKPSTPFTWQTEHQLAFEALKKALLSAPALGLPDTSKPFTLFLDERQGIAKGVLTQKLGPWKRPVAYLSKKLDPVAAGWPPCLRIMAATAMLVKDSAKLTLGQPLTVITPHTLEAIVRQPPDRWITNARLTHYQALLLDTDRVQFGPPVTLNPATLLPVPENQPSPHDCRQVLAETHGTREDLKDQELPDADHTWYTDGSSYLDSGTRRAGAAVVDGHNTIWAQSLPPGTSAQKAELIALTKALELSKGKKANIYTDSRYAFATAHTHGSIYERRGWLTSEGKEIKNKAEIIALLKALFLPQEVAIIHCPGHQKGQDPVAVGNRQADRVARQAAMAEVLTLATEPDNTSHITAGKRTADGSEFEKRTADGSEFESPKKKAKVE

SEQ ID NO: 1572 - protein, 2097 aa, synthetic construct
MPAAKRVKLDGGDKKYSIGLDIGTNSVGWAVITDEYKVPSKKFKVLGNTDRHSIKKNLIGALLFDSGETAEATRLKRTARRRYTRRKNRICYLQEIFSNEMAKVDDSFFHRLEESFLVEEDKKHERHPIFGNIVDEVAYHEKYPTIYHLRKKLVDSTDKADLRLIYLALAHMIKFRGHFLIEGDLNPDNSDVDKLFIQLVQTYNQLFEENPINASGVDAKAILSARLSKSRRLENLIAQLPGEKKNGLFGNLIALSLGLTPNFKSNFDLAEDAKLQLSKDTYDDDLDNLLAQIGDQYADLFLAAKNLSDAILLSDILRVNTEITKAPLSASMIKRYDEHHQDLTLLKALVRQQLPEKYKEIFFDQSKNGYAGYIDGGASQEEFYKFIKPILEKMDGTEELLVKLNREDLLRKQRTFDNGSIPHQIHLGELHAILRRQEDFYPFLKDNREKIEKILTFRIPYYVGPLARGNSRFAWMTRKSEETITPWNFEEVVDKGASAQSFIERMTNFDKNLPNEKVLPKHSLLYEYFTVYNELTKVKYVTEGMRKPAFLSGEQKKAIVDLLFKTNRKVTVKQLKEDYFKKIECFDSVEISGVEDRFNASLGTYHDLLKIIKDKDFLDNEENEDILEDIVLTLTLFEDREMIEERLKTYAHLFDDKVMKQLKRRRYTGWGRLSRKLINGIRDKQSGKTILDFLKSDGFANRNFMQLIHDDSLTFKEDIQKAQVSGQGDSLHEHIANLAGSPAIKKGILQTVKVVDELVKVMGRHKPENIVIEMARENQTTQKGQKNSRERMKRIEEGIKELGSQILKEHPVENTQLQNEKLYLYYLQNGRDMYVDQELDINRLSDYDVDHIVPQSFLKDDSIDNKVLTRSDKARGKSDNVPSEEVVKKMKNYWRQLLNAKLITQRKFDNLTKAERGGLSELDKAGFIKRQLVETRQITKHVAQILDSRMNTKYDENDKLIREVKVITLKSKLVSDFRKDFQFYKVREINNYHHAHDAYLNAVVGTALIKKYPKLESEFVYGDYKVYDVRKMIAKSEQEIGKATAKYFFYSNIMNFFKTEITLANGEIRKRPLIETNGETGEIVWDKGRDFATVRKVLSMPQVNIVKKTEVQTGGFSKESILPKRNSDKLIARKKDWDPKKYGGFDSPTVAYSVLVVAKVEKGKSKKLKSVKELLGITIMERSSFEKNPIDFLEAKGYKEVKKDLIIKLPKYSLFELENGRKRMLASAGELQKGNELALPSKYVNFLYLASHYEKLKGSPEDNEQKQLFVEQHKHYLDEIIEQISEFSKRVILADANLDKVLSAYNKHRDKPIREQAENIIHLFTLTNLGAPAAFKYFDTTIDRKRYTSTKEVLDATLIHQSITGLYETRIDLSQLGGDGGGGGGGGGGTVSLQDEHRLFDIPVTTSLPDVWLQDFPQAWAETGGLGRAKCQAPIIIDLKPTAVPVSIKQYPMSLEAHMGIRQHIIKFLELGVLRPCRSPWNTPLLPVKKPGTQDYRPVQDLREINKRTVDIHPTVPNPYNLLSTLKPDYSWYTVLDLKDAFFCLPLAPQSQELFAFEWKDPERGISGQLTWTRLPQGFKNSPTLFNEALHRDLTDFRTQHPEVTLLQYVDDLLLAAPTKKACTQGTRHLLQELGEKGYRASAKKAQICQTKVTYLGYILSEGKRWLTPGRIETVARIPPPRNPREVREFLGTAGFCRLWIPGFAELAAPLYALTKPSTPFTWQTEHQLAFEALKKALLSAPALGLPDTSKPFTLFLDERQGIAKGVLTQKLGPWKRPVAYLSKKLDPVAAGWPPCLRIMAATAMLVKDSAKLTLGQPLTVITPHTLEAIVRQPPDRWITNARLTHYQALLLDTDRVQFGPPVTLNPATLLPVPENQPSPHDCRQVLAETHGTREDLKDQELPDADHTWYTDGSSYLDSGTRRAGAAVVDGHNTIWAQSLPPGTSAQKAELIALTKALELSKGKKANIYTDSRYAFATAHTHGSIYERRGWLTSEGKEIKNKAEIIALLKALFLPQEVAIIHCPGHQKGQDPVAVGNRQADRVARQAAMAEVLTLATEPDNTSHITAGKRTADGSEFEKRTADGSEFESPKKKAKVE

SEQ ID NO: 1573 - protein, 2100 aa, synthetic construct
MPAAKRVKLDGGDKKYSIGLDIGTNSVGWAVITDEYKVPSKKFKVLGNTDRHSIKKNLIGALLFDSGETAEATRLKRTARRRYTRRKNRICYLQEIFSNEMAKVDDSFFHRLEESFLVEEDKKHERHPIFGNIVDEVAYHEKYPTIYHLRKKLVDSTDKADLRLIYLALAHMIKFRGHFLIEGDLNPDNSDVDKLFIQLVQTYNQLFEENPINASGVDAKAILSARLSKSRRLENLIAQLPGEKKNGLFGNLIALSLGLTPNFKSNFDLAEDAKLQLSKDTYDDDLDNLLAQIGDQYADLFLAAKNLSDAILLSDILRVNTEITKAPLSASMIKRYDEHHQDLTLLKALVRQQLPEKYKEIFFDQSKNGYAGYIDGGASQEEFYKFIKPILEKMDGTEELLVKLNREDLLRKQRTFDNGSIPHQIHLGELHAILRRQEDFYPFLKDNREKIEKILTFRIPYYVGPLARGNSRFAWMTRKSEETITPWNFEEVVDKGASAQSFIERMTNFDKNLPNEKVLPKHSLLYEYFTVYNELTKVKYVTEGMRKPAFLSGEQKKAIVDLLFKTNRKVTVKQLKEDYFKKIECFDSVEISGVEDRFNASLGTYHDLLKIIKDKDFLDNEENEDILEDIVLTLTLFEDREMIEERLKTYAHLFDDKVMKQLKRRRYTGWGRLSRKLINGIRDKQSGKTILDFLKSDGFANRNFMQLIHDDSLTFKEDIQKAQVSGQGDSLHEHIANLAGSPAIKKGILQTVKVVDELVKVMGRHKPENIVIEMARENQTTQKGQKNSRERMKRIEEGIKELGSQILKEHPVENTQLQNEKLYLYYLQNGRDMYVDQELDINRLSDYDVDHIVPQSFLKDDSIDNKVLTRSDKARGKSDNVPSEEVVKKMKNYWRQLLNAKLITQRKFDNLTKAERGGLSELDKAGFIKRQLVETRQITKHVAQILDSRMNTKYDENDKLIREVKVITLKSKLVSDFRKDFQFYKVREINNYHHAHDAYLNAVVGTALIKKYPKLESEFVYGDYKVYDVRKMIAKSEQEIGKATAKYFFYSNIMNFFKTEITLANGEIRKRPLIETNGETGEIVWDKGRDFATVRKVLSMPQVNIVKKTEVQTGGFSKESILPKRNSDKLIARKKDWDPKKYGGFDSPTVAYSVLVVAKVEKGKSKKLKSVKELLGITIMERSSFEKNPIDFLEAKGYKEVKKDLIIKLPKYSLFELENGRKRMLASAGELQKGNELALPSKYVNFLYLASHYEKLKGSPEDNEQKQLFVEQHKHYLDEIIEQISEFSKRVILADANLDKVLSAYNKHRDKPIREQAENIIHLFTLTNLGAPAAFKYFDTTIDRKRYTSTKEVLDATLIHQSITGLYETRIDLSQLGGDGGGGSGGSGGSGGTVSLQDEHRLFDIPVTTSLPDVWLQDFPQAWAETGGLGRAKCQAPIIIDLKPTAVPVSIKQYPMSLEAHMGIRQHIIKFLELGVLRPCRSPWNTPLLPVKKPGTQDYRPVQDLREINKRTVDIHPTVPNPYNLLSTLKPDYSWYTVLDLKDAFFCLPLAPQSQELFAFEWKDPERGISGQLTWTRLPQGFKNSPTLFNEALHRDLTDFRTQHPEVTLLQYVDDLLLAAPTKKACTQGTRHLLQELGEKGYRASAKKAQICQTKVTYLGYILSEGKRWLTPGRIETVARIPPPRNPREVREFLGTAGFCRLWIPGFAELAAPLYALTKPSTPFTWQTEHQLAFEALKKALLSAPALGLPDTSKPFTLFLDERQGIAKGVLTQKLGPWKRPVAYLSKKLDPVAAGWPPCLRIMAATAMLVKDSAKLTLGQPLTVITPHTLEAIVRQPPDRWITNARLTHYQALLLDTDRVQFGPPVTLNPATLLPVPENQPSPHDCRQVLAETHGTREDLKDQELPDADHTWYTDGSSYLDSGTRRAGAAVVDGHNTIWAQSLPPGTSAQKAELIALTKALELSKGKKANIYTDSRYAFATAHTHGSIYERRGWLTSEGKEIKNKAEIIALLKALFLPQEVAIIHCPGHQKGQDPVAVGNRQADRVARQAAMAEVLTLATEPDNTSHITAGKRTADGSEFEKRTADGSEFESPKKKAKVE

SEQ ID NO: 1574 - protein, 2102 aa, synthetic construct
MPAAKRVKLDGGDKKYSIGLDIGTNSVGWAVITDEYKVPSKKFKVLGNTDRHSIKKNLIGALLFDSGETAEATRLKRTARRRYTRRKNRICYLQEIFSNEMAKVDDSFFHRLEESFLVEEDKKHERHPIFGNIVDEVAYHEKYPTIYHLRKKLVDSTDKADLRLIYLALAHMIKFRGHFLIEGDLNPDNSDVDKLFIQLVQTYNQLFEENPINASGVDAKAILSARLSKSRRLENLIAQLPGEKKNGLFGNLIALSLGLTPNFKSNFDLAEDAKLQLSKDTYDDDLDNLLAQIGDQYADLFLAAKNLSDAILLSDILRVNTEITKAPLSASMIKRYDEHHQDLTLLKALVRQQLPEKYKEIFFDQSKNGYAGYIDGGASQEEFYKFIKPILEKMDGTEELLVKLNREDLLRKQRTFDNGSIPHQIHLGELHAILRRQEDFYPFLKDNREKIEKILTFRIPYYVGPLARGNSRFAWMTRKSEETITPWNFEEVVDKGASAQSFIERMTNFDKNLPNEKVLPKHSLLYEYFTVYNELTKVKYVTEGMRKPAFLSGEQKKAIVDLLFKTNRKVTVKQLKEDYFKKIECFDSVEISGVEDRFNASLGTYHDLLKIIKDKDFLDNEENEDILEDIVLTLTLFEDREMIEERLKTYAHLFDDKVMKQLKRRRYTGWGRLSRKLINGIRDKQSGKTILDFLKSDGFANRNFMQLIHDDSLTFKEDIQKAQVSGQGDSLHEHIANLAGSPAIKKGILQTVKVVDELVKVMGRHKPENIVIEMARENQTTQKGQKNSRERMKRIEEGIKELGSQILKEHPVENTQLQNEKLYLYYLQNGRDMYVDQELDINRLSDYDVDHIVPQSFLKDDSIDNKVLTRSDKARGKSDNVPSEEVVKKMKNYWRQLLNAKLITQRKFDNLTKAERGGLSELDKAGFIKRQLVETRQITKHVAQILDSRMNTKYDENDKLIREVKVITLKSKLVSDFRKDFQFYKVREINNYHHAHDAYLNAVVGTALIKKYPKLESEFVYGDYKVYDVRKMIAKSEQEIGKATAKYFFYSNIMNFFKTEITLANGEIRKRPLIETNGETGEIVWDKGRDFATVRKVLSMPQVNIVKKTEVQTGGFSKESILPKRNSDKLIARKKDWDPKKYGGFDSPTVAYSVLVVAKVEKGKSKKLKSVKELLGITIMERSSFEKNPIDFLEAKGYKEVKKDLIIKLPKYSLFELENGRKRMLASAGELQKGNELALPSKYVNFLYLASHYEKLKGSPEDNEQKQLFVEQHKHYLDEIIEQISEFSKRVILADANLDKVLSAYNKHRDKPIREQAENIIHLFTLTNLGAPAAFKYFDTTIDRKRYTSTKEVLDATLIHQSITGLYETRIDLSQLGGDGGGGGEAAAKGSSGGTVSLQDEHRLFDIPVTTSLPDVWLQDFPQAWAETGGLGRAKCQAPIIIDLKPTAVPVSIKQYPMSLEAHMGIRQHIIKFLELGVLRPCRSPWNTPLLPVKKPGTQDYRPVQDLREINKRTVDIHPTVPNPYNLLSTLKPDYSWYTVLDLKDAFFCLPLAPQSQELFAFEWKDPERGISGQLTWTRLPQGFKNSPTLFNEALHRDLTDFRTQHPEVTLLQYVDDLLLAAPTKKACTQGTRHLLQELGEKGYRASAKKAQICQTKVTYLGYILSEGKRWLTPGRIETVARIPPPRNPREVREFLGTAGFCRLWIPGFAELAAPLYALTKPSTPFTWQTEHQLAFEALKKALLSAPALGLPDTSKPFTLFLDERQGIAKGVLTQKLGPWKRPVAYLSKKLDPVAAGWPPCLRIMAATAMLVKDSAKLTLGQPLTVITPHTLEAIVRQPPDRWITNARLTHYQALLLDTDRVQFGPPVTLNPATLLPVPENQPSPHDCRQVLAETHGTREDLKDQELPDADHTWYTDGSSYLDSGTRRAGAAVVDGHNTIWAQSLPPGTSAQKAELIALTKALELSKGKKANIYTDSRYAFATAHTHGSIYERRGWLTSEGKEIKNKAEIIALLKALFLPQEVAIIHCPGHQKGQDPVAVGNRQADRVARQAAMAEVLTLATEPDNTSHITAGKRTADGSEFEKRTADGSEFESPKKKAKVE

SEQ ID NO: 1575 - protein, 2102 aa, synthetic construct
MPAAKRVKLDGGDKKYSIGLDIGTNSVGWAVITDEYKVPSKKFKVLGNTDRHSIKKNLIGALLFDSGETAEATRLKRTARRRYTRRKNRICYLQEIFSNEMAKVDDSFFHRLEESFLVEEDKKHERHPIFGNIVDEVAYHEKYPTIYHLRKKLVDSTDKADLRLIYLALAHMIKFRGHFLIEGDLNPDNSDVDKLFIQLVQTYNQLFEENPINASGVDAKAILSARLSKSRRLENLIAQLPGEKKNGLFGNLIALSLGLTPNFKSNFDLAEDAKLQLSKDTYDDDLDNLLAQIGDQYADLFLAAKNLSDAILLSDILRVNTEITKAPLSASMIKRYDEHHQDLTLLKALVRQQLPEKYKEIFFDQSKNGYAGYIDGGASQEEFYKFIKPILEKMDGTEELLVKLNREDLLRKQRTFDNGSIPHQIHLGELHAILRRQEDFYPFLKDNREKIEKILTFRIPYYVGPLARGNSRFAWMTRKSEETITPWNFEEVVDKGASAQSFIERMTNFDKNLPNEKVLPKHSLLYEYFTVYNELTKVKYVTEGMRKPAFLSGEQKKAIVDLLFKTNRKVTVKQLKEDYFKKIECFDSVEISGVEDRFNASLGTYHDLLKIIKDKDFLDNEENEDILEDIVLTLTLFEDREMIEERLKTYAHLFDDKVMKQLKRRRYTGWGRLSRKLINGIRDKQSGKTILDFLKSDGFANRNFMQLIHDDSLTFKEDIQKAQVSGQGDSLHEHIANLAGSPAIKKGILQTVKVVDELVKVMGRHKPENIVIEMARENQTTQKGQKNSRERMKRIEEGIKELGSQILKEHPVENTQLQNEKLYLYYLQNGRDMYVDQELDINRLSDYDVDHIVPQSFLKDDSIDNKVLTRSDKARGKSDNVPSEEVVKKMKNYWRQLLNAKLITQRKFDNLTKAERGGLSELDKAGFIKRQLVETRQITKHVAQILDSRMNTKYDENDKLIREVKVITLKSKLVSDFRKDFQFYKVREINNYHHAHDAYLNAVVGTALIKKYPKLESEFVYGDYKVYDVRKMIAKSEQEIGKATAKYFFYSNIMNFFKTEITLANGEIRKRPLIETNGETGEIVWDKGRDFATVRKVLSMPQVNIVKKTEVQTGGFSKESILPKRNSDKLIARKKDWDPKKYGGFDSPTVAYSVLVVAKVEKGKSKKLKSVKELLGITIMERSSFEKNPIDFLEAKGYKEVKKDLIIKLPKYSLFELENGRKRMLASAGELQKGNELALPSKYVNFLYLASHYEKLKGSPEDNEQKQLFVEQHKHYLDEIIEQISEFSKRVILADANLDKVLSAYNKHRDKPIREQAENIIHLFTLTNLGAPAAFKYFDTTIDRKRYTSTKEVLDATLIHQSITGLYETRIDLSQLGGDGGPAPEAAAKGSSGGTVSLQDEHRLFDIPVTTSLPDVWLQDFPQAWAETGGLGRAKCQAPIIIDLKPTAVPVSIKQYPMSLEAHMGIRQHIIKFLELGVLRPCRSPWNTPLLPVKKPGTQDYRPVQDLREINKRTVDIHPTVPNPYNLLSTLKPDYSWYTVLDLKDAFFCLPLAPQSQELFAFEWKDPERGISGQLTWTRLPQGFKNSPTLFNEALHRDLTDFRTQHPEVTLLQYVDDLLLAAPTKKACTQGTRHLLQELGEKGYRASAKKAQICQTKVTYLGYILSEGKRWLTPGRIETVARIPPPRNPREVREFLGTAGFCRLWIPGFAELAAPLYALTKPSTPFTWQTEHQLAFEALKKALLSAPALGLPDTSKPFTLFLDERQGIAKGVLTQKLGPWKRPVAYLSKKLDPVAAGWPPCLRIMAATAMLVKDSAKLTLGQPLTVITPHTLEAIVRQPPDRWITNARLTHYQALLLDTDRVQFGPPVTLNPATLLPVPENQPSPHDCRQVLAETHGTREDLKDQELPDADHTWYTDGSSYLDSGTRRAGAAVVDGHNTIWAQSLPPGTSAQKAELIALTKALELSKGKKANIYTDSRYAFATAHTHGSIYERRGWLTSEGKEIKNKAEIIALLKALFLPQEVAIIHCPGHQKGQDPVAVGNRQADRVARQAAMAEVLTLATEPDNTSHITAGKRTADGSEFEKRTADGSEFESPKKKAKVE

SEQ ID NO: 1576 - protein, 2102 aa, synthetic construct
MPAAKRVKLDGGDKKYSIGLDIGTNSVGWAVITDEYKVPSKKFKVLGNTDRHSIKKNLIGALLFDSGETAEATRLKRTARRRYTRRKNRICYLQEIFSNEMAKVDDSFFHRLEESFLVEEDKKHERHPIFGNIVDEVAYHEKYPTIYHLRKKLVDSTDKADLRLIYLALAHMIKFRGHFLIEGDLNPDNSDVDKLFIQLVQTYNQLFEENPINASGVDAKAILSARLSKSRRLENLIAQLPGEKKNGLFGNLIALSLGLTPNFKSNFDLAEDAKLQLSKDTYDDDLDNLLAQIGDQYADLFLAAKNLSDAILLSDILRVNTEITKAPLSASMIKRYDEHHQDLTLLKALVRQQLPEKYKEIFFDQSKNGYAGYIDGGASQEEFYKFIKPILEKMDGTEELLVKLNREDLLRKQRTFDNGSIPHQIHLGELHAILRRQEDFYPFLKDNREKIEKILTFRIPYYVGPLARGNSRFAWMTRKSEETITPWNFEEVVDKGASAQSFIERMTNFDKNLPNEKVLPKHSLLYEYFTVYNELTKVKYVTEGMRKPAFLSGEQKKAIVDLLFKTNRKVTVKQLKEDYFKKIECFDSVEISGVEDRFNASLGTYHDLLKIIKDKDFLDNEENEDILEDIVLTLTLFEDREMIEERLKTYAHLFDDKVMKQLKRRRYTGWGRLSRKLINGIRDKQSGKTILDFLKSDGFANRNFMQLIHDDSLTFKEDIQKAQVSGQGDSLHEHIANLAGSPAIKKGILQTVKVVDELVKVMGRHKPENIVIEMARENQTTQKGQKNSRERMKRIEEGIKELGSQILKEHPVENTQLQNEKLYLYYLQNGRDMYVDQELDINRLSDYDVDHIVPQSFLKDDSIDNKVLTRSDKARGKSDNVPSEEVVKKMKNYWRQLLNAKLITQRKFDNLTKAERGGLSELDKAGFIKRQLVETRQITKHVAQILDSRMNTKYDENDKLIREVKVITLKSKLVSDFRKDFQFYKVREINNYHHAHDAYLNAVVGTALIKKYPKLESEFVYGDYKVYDVRKMIAKSEQEIGKATAKYFFYSNIMNFFKTEITLANGEIRKRPLIETNGETGEIVWDKGRDFATVRKVLSMPQVNIVKKTEVQTGGFSKESILPKRNSDKLIARKKDWDPKKYGGFDSPTVAYSVLVVAKVEKGKSKKLKSVKELLGITIMERSSFEKNPIDFLEAKGYKEVKKDLIIKLPKYSLFELENGRKRMLASAGELQKGNELALPSKYVNFLYLASHYEKLKGSPEDNEQKQLFVEQHKHYLDEIIEQISEFSKRVILADANLDKVLSAYNKHRDKPIREQAENIIHLFTLTNLGAPAAFKYFDTTIDRKRYTSTKEVLDATLIHQSITGLYETRIDLSQLGGDGGEAAAKGSSGGGGGTVSLQDEHRLFDIPVTTSLPDVWLQDFPQAWAETGGLGRAKCQAPIIIDLKPTAVPVSIKQYPMSLEAHMGIRQHIIKFLELGVLRPCRSPWNTPLLPVKKPGTQDYRPVQDLREINKRTVDIHPTVPNPYNLLSTLKPDYSWYTVLDLKDAFFCLPLAPQSQELFAFEWKDPERGISGQLTWTRLPQGFKNSPTLFNEALHRDLTDFRTQHPEVTLLQYVDDLLLAAPTKKACTQGTRHLLQELGEKGYRASAKKAQICQTKVTYLGYILSEGKRWLTPGRIETVARIPPPRNPREVREFLGTAGFCRLWIPGFAELAAPLYALTKPSTPFTWQTEHQLAFEALKKALLSAPALGLPDTSKPFTLFLDERQGIAKGVLTQKLGPWKRPVAYLSKKLDPVAAGWPPCLRIMAATAMLVKDSAKLTLGQPLTVITPHTLEAIVRQPPDRWITNARLTHYQALLLDTDRVQFGPPVTLNPATLLPVPENQPSPHDCRQVLAETHGTREDLKDQELPDADHTWYTDGSSYLDSGTRRAGAAVVDGHNTIWAQSLPPGTSAQKAELIALTKALELSKGKKANIYTDSRYAFATAHTHGSIYERRGWLTSEGKEIKNKAEIIALLKALFLPQEVAIIHCPGHQKGQDPVAVGNRQADRVARQAAMAEVLTLATEPDNTSHITAGKRTADGSEFEKRTADGSEFESPKKKAKVE

SEQ ID NO: 1577 - protein, 2102 aa, synthetic construct
MPAAKRVKLDGGDKKYSIGLDIGTNSVGWAVITDEYKVPSKKFKVLGNTDRHSIKKNLIGALLFDSGETAEATRLKRTARRRYTRRKNRICYLQEIFSNEMAKVDDSFFHRLEESFLVEEDKKHERHPIFGNIVDEVAYHEKYPTIYHLRKKLVDSTDKADLRLIYLALAHMIKFRGHFLIEGDLNPDNSDVDKLFIQLVQTYNQLFEENPINASGVDAKAILSARLSKSRRLENLIAQLPGEKKNGLFGNLIALSLGLTPNFKSNFDLAEDAKLQLSKDTYDDDLDNLLAQIGDQYADLFLAAKNLSDAILLSDILRVNTEITKAPLSASMIKRYDEHHQDLTLLKALVRQQLPEKYKEIFFDQSKNGYAGYIDGGASQEEFYKFIKPILEKMDGTEELLVKLNREDLLRKQRTFDNGSIPHQIHLGELHAILRRQEDFYPFLKDNREKIEKILTFRIPYYVGPLARGNSRFAWMTRKSEETITPWNFEEVVDKGASAQSFIERMTNFDKNLPNEKVLPKHSLLYEYFTVYNELTKVKYVTEGMRKPAFLSGEQKKAIVDLLFKTNRKVTVKQLKEDYFKKIECFDSVEISGVEDRFNASLGTYHDLLKIIKDKDFLDNEENEDILEDIVLTLTLFEDREMIEERLKTYAHLFDDKVMKQLKRRRYTGWGRLSRKLINGIRDKQSGKTILDFLKSDGFANRNFMQLIHDDSLTFKEDIQKAQVSGQGDSLHEHIANLAGSPAIKKGILQTVKVVDELVKVMGRHKPENIVIEMARENQTTQKGQKNSRERMKRIEEGIKELGSQILKEHPVENTQLQNEKLYLYYLQNGRDMYVDQELDINRLSDYDVDHIVPQSFLKDDSIDNKVLTRSDKARGKSDNVPSEEVVKKMKNYWRQLLNAKLITQRKFDNLTKAERGGLSELDKAGFIKRQLVETRQITKHVAQILDSRMNTKYDENDKLIREVKVITLKSKLVSDFRKDFQFYKVREINNYHHAHDAYLNAVVGTALIKKYPKLESEFVYGDYKVYDVRKMIAKSEQEIGKATAKYFFYSNIMNFFKTEITLANGEIRKRPLIETNGETGEIVWDKGRDFATVRKVLSMPQVNIVKKTEVQTGGFSKESILPKRNSDKLIARKKDWDPKKYGGFDSPTVAYSVLVVAKVEKGKSKKLKSVKELLGITIMERSSFEKNPIDFLEAKGYKEVKKDLIIKLPKYSLFELENGRKRMLASAGELQKGNELALPSKYVNFLYLASHYEKLKGSPEDNEQKQLFVEQHKHYLDEIIEQISEFSKRVILADANLDKVLSAYNKHRDKPIREQAENIIHLFTLTNLGAPAAFKYFDTTIDRKRYTSTKEVLDATLIHQSITGLYETRIDLSQLGGDGGEAAAKGGGGGSGGTVSLQDEHRLFDIPVTTSLPDVWLQDFPQAWAETGGLGRAKCQAPIIIDLKPTAVPVSIKQYPMSLEAHMGIRQHIIKFLELGVLRPCRSPWNTPLLPVKKPGTQDYRPVQDLREINKRTVDIHPTVPNPYNLLSTLKPDYSWYTVLDLKDAFFCLPLAPQSQELFAFEWKDPERGISGQLTWTRLPQGFKNSPTLFNEALHRDLTDFRTQHPEVTLLQYVDDLLLAAPTKKACTQGTRHLLQELGEKGYRASAKKAQICQTKVTYLGYILSEGKRWLTPGRIETVARIPPPRNPREVREFLGTAGFCRLWIPGFAELAAPLYALTKPSTPFTWQTEHQLAFEALKKALLSAPALGLPDTSKPFTLFLDERQGIAKGVLTQKLGPWKRPVAYLSKKLDPVAAGWPPCLRIMAATAMLVKDSAKLTLGQPLTVITPHTLEAIVRQPPDRWITNARLTHYQALLLDTDRVQFGPPVTLNPATLLPVPENQPSPHDCRQVLAETHGTREDLKDQELPDADHTWYTDGSSYLDSGTRRAGAAVVDGHNTIWAQSLPPGTSAQKAELIALTKALELSKGKKANIYTDSRYAFATAHTHGSIYERRGWLTSEGKEIKNKAEIIALLKALFLPQEVAIIHCPGHQKGQDPVAVGNRQADRVARQAAMAEVLTLATEPDNTSHITAGKRTADGSEFEKRTADGSEFESPKKKAKVE

SEQ ID NO: 1578 - protein, 2100 aa, synthetic construct
MPAAKRVKLDGGDKKYSIGLDIGTNSVGWAVITDEYKVPSKKFKVLGNTDRHSIKKNLIGALLFDSGETAEATRLKRTARRRYTRRKNRICYLQEIFSNEMAKVDDSFFHRLEESFLVEEDKKHERHPIFGNIVDEVAYHEKYPTIYHLRKKLVDSTDKADLRLIYLALAHMIKFRGHFLIEGDLNPDNSDVDKLFIQLVQTYNQLFEENPINASGVDAKAILSARLSKSRRLENLIAQLPGEKKNGLFGNLIALSLGLTPNFKSNFDLAEDAKLQLSKDTYDDDLDNLLAQIGDQYADLFLAAKNLSDAILLSDILRVNTEITKAPLSASMIKRYDEHHQDLTLLKALVRQQLPEKYKEIFFDQSKNGYAGYIDGGASQEEFYKFIKPILEKMDGTEELLVKLNREDLLRKQRTFDNGSIPHQIHLGELHAILRRQEDFYPFLKDNREKIEKILTFRIPYYVGPLARGNSRFAWMTRKSEETITPWNFEEVVDKGASAQSFIERMTNFDKNLPNEKVLPKHSLLYEYFTVYNELTKVKYVTEGMRKPAFLSGEQKKAIVDLLFKTNRKVTVKQLKEDYFKKIECFDSVEISGVEDRFNASLGTYHDLLKIIKDKDFLDNEENEDILEDIVLTLTLFEDREMIEERLKTYAHLFDDKVMKQLKRRRYTGWGRLSRKLINGIRDKQSGKTILDFLKSDGFANRNFMQLIHDDSLTFKEDIQKAQVSGQGDSLHEHIANLAGSPAIKKGILQTVKVVDELVKVMGRHKPENIVIEMARENQTTQKGQKNSRERMKRIEEGIKELGSQILKEHPVENTQLQNEKLYLYYLQNGRDMYVDQELDINRLSDYDVDHIVPQSFLKDDSIDNKVLTRSDKARGKSDNVPSEEVVKKMKNYWRQLLNAKLITQRKFDNLTKAERGGLSELDKAGFIKRQLVETRQITKHVAQILDSRMNTKYDENDKLIREVKVITLKSKLVSDFRKDFQFYKVREINNYHHAHDAYLNAVVGTALIKKYPKLESEFVYGDYKVYDVRKMIAKSEQEIGKATAKYFFYSNIMNFFKTEITLANGEIRKRPLIETNGETGEIVWDKGRDFATVRKVLSMPQVNIVKKTEVQTGGFSKESILPKRNSDKLIARKKDWDPKKYGGFDSPTVAYSVLVVAKVEKGKSKKLKSVKELLGITIMERSSFEKNPIDFLEAKGYKEVKKDLIIKLPKYSLFELENGRKRMLASAGELQKGNELALPSKYVNFLYLASHYEKLKGSPEDNEQKQLFVEQHKHYLDEIIEQISEFSKRVILADANLDKVLSAYNKHRDKPIREQAENIIHLFTLTNLGAPAAFKYFDTTIDRKRYTSTKEVLDATLIHQSITGLYETRIDLSQLGGDGGGGGGSSPAPGGTVSLQDEHRLFDIPVTTSLPDVWLQDFPQAWAETGGLGRAKCQAPIIIDLKPTAVPVSIKQYPMSLEAHMGIRQHIIKFLELGVLRPCRSPWNTPLLPVKKPGTQDYRPVQDLREINKRTVDIHPTVPNPYNLLSTLKPDYSWYTVLDLKDAFFCLPLAPQSQELFAFEWKDPERGISGQLTWTRLPQGFKNSPTLFNEALHRDLTDFRTQHPEVTLLQYVDDLLLAAPTKKACTQGTRHLLQELGEKGYRASAKKAQICQTKVTYLGYILSEGKRWLTPGRIETVARIPPPRNPREVREFLGTAGFCRLWIPGFAELAAPLYALTKPSTPFTWQTEHQLAFEALKKALLSAPALGLPDTSKPFTLFLDERQGIAKGVLTQKLGPWKRPVAYLSKKLDPVAAGWPPCLRIMAATAMLVKDSAKLTLGQPLTVITPHTLEAIVRQPPDRWITNARLTHYQALLLDTDRVQFGPPVTLNPATLLPVPENQPSPHDCRQVLAETHGTREDLKDQELPDADHTWYTDGSSYLDSGTRRAGAAVVDGHNTIWAQSLPPGTSAQKAELIALTKALELSKGKKANIYTDSRYAFATAHTHGSIYERRGWLTSEGKEIKNKAEIIALLKALFLPQEVAIIHCPGHQKGQDPVAVGNRQADRVARQAAMAEVLTLATEPDNTSHITAGKRTADGSEFEKRTADGSEFESPKKKAKVE

SEQ ID NO: 1579 - protein, 2102 aa, synthetic construct
MPAAKRVKLDGGDKKYSIGLDIGTNSVGWAVITDEYKVPSKKFKVLGNTDRHSIKKNLIGALLFDSGETAEATRLKRTARRRYTRRKNRICYLQEIFSNEMAKVDDSFFHRLEESFLVEEDKKHERHPIFGNIVDEVAYHEKYPTIYHLRKKLVDSTDKADLRLIYLALAHMIKFRGHFLIEGDLNPDNSDVDKLFIQLVQTYNQLFEENPINASGVDAKAILSARLSKSRRLENLIAQLPGEKKNGLFGNLIALSLGLTPNFKSNFDLAEDAKLQLSKDTYDDDLDNLLAQIGDQYADLFLAAKNLSDAILLSDILRVNTEITKAPLSASMIKRYDEHHQDLTLLKALVRQQLPEKYKEIFFDQSKNGYAGYIDGGASQEEFYKFIKPILEKMDGTEELLVKLNREDLLRKQRTFDNGSIPHQIHLGELHAILRRQEDFYPFLKDNREKIEKILTFRIPYYVGPLARGNSRFAWMTRKSEETITPWNFEEVVDKGASAQSFIERMTNFDKNLPNEKVLPKHSLLYEYFTVYNELTKVKYVTEGMRKPAFLSGEQKKAIVDLLFKTNRKVTVKQLKEDYFKKIECFDSVEISGVEDRFNASLGTYHDLLKIIKDKDFLDNEENEDILEDIVLTLTLFEDREMIEERLKTYAHLFDDKVMKQLKRRRYTGWGRLSRKLINGIRDKQSGKTILDFLKSDGFANRNFMQLIHDDSLTFKEDIQKAQVSGQGDSLHEHIANLAGSPAIKKGILQTVKVVDELVKVMGRHKPENIVIEMARENQTTQKGQKNSRERMKRIEEGIKELGSQILKEHPVENTQLQNEKLYLYYLQNGRDMYVDQELDINRLSDYDVDHIVPQSFLKDDSIDNKVLTRSDKARGKSDNVPSEEVVKKMKNYWRQLLNAKLITQRKFDNLTKAERGGLSELDKAGFIKRQLVETRQITKHVAQILDSRMNTKYDENDKLIREVKVITLKSKLVSDFRKDFQFYKVREINNYHHAHDAYLNAVVGTALIKKYPKLESEFVYGDYKVYDVRKMIAKSEQEIGKATAKYFFYSNIMNFFKTEITLANGEIRKRPLIETNGETGEIVWDKGRDFATVRKVLSMPQVNIVKKTEVQTGGFSKESILPKRNSDKLIARKKDWDPKKYGGFDSPTVAYSVLVVAKVEKGKSKKLKSVKELLGITIMERSSFEKNPIDFLEAKGYKEVKKDLIIKLPKYSLFELENGRKRMLASAGELQKGNELALPSKYVNFLYLASHYEKLKGSPEDNEQKQLFVEQHKHYLDEIIEQISEFSKRVILADANLDKVLSAYNKHRDKPIREQAENIIHLFTLTNLGAPAAFKYFDTTIDRKRYTSTKEVLDATLIHQSITGLYETRIDLSQLGGDGGEAAAKPAPGGSGGTVSLQDEHRLFDIPVTTSLPDVWLQDFPQAWAETGGLGRAKCQAPIIIDLKPTAVPVSIKQYPMSLEAHMGIRQHIIKFLELGVLRPCRSPWNTPLLPVKKPGTQDYRPVQDLREINKRTVDIHPTVPNPYNLLSTLKPDYSWYTVLDLKDAFFCLPLAPQSQELFAFEWKDPERGISGQLTWTRLPQGFKNSPTLFNEALHRDLTDFRTQHPEVTLLQYVDDLLLAAPTKKACTQGTRHLLQELGEKGYRASAKKAQICQTKVTYLGYILSEGKRWLTPGRIETVARIPPPRNPREVREFLGTAGFCRLWIPGFAELAAPLYALTKPSTPFTWQTEHQLAFEALKKALLSAPALGLPDTSKPFTLFLDERQGIAKGVLTQKLGPWKRPVAYLSKKLDPVAAGWPPCLRIMAATAMLVKDSAKLTLGQPLTVITPHTLEAIVRQPPDRWITNARLTHYQALLLDTDRVQFGPPVTLNPATLLPVPENQPSPHDCRQVLAETHGTREDLKDQELPDADHTWYTDGSSYLDSGTRRAGAAVVDGHNTIWAQSLPPGTSAQKAELIALTKALELSKGKKANIYTDSRYAFATAHTHGSIYERRGWLTSEGKEIKNKAEIIALLKALFLPQEVAIIHCPGHQKGQDPVAVGNRQADRVARQAAMAEVLTLATEPDNTSHITAGKRTADGSEFEKRTADGSEFESPKKKAKVE

SEQ ID NO: 1580 - protein, 2102 aa, synthetic construct
MPAAKRVKLDGGDKKYSIGLDIGTNSVGWAVITDEYKVPSKKFKVLGNTDRHSIKKNLIGALLFDSGETAEATRLKRTARRRYTRRKNRICYLQEIFSNEMAKVDDSFFHRLEESFLVEEDKKHERHPIFGNIVDEVAYHEKYPTIYHLRKKLVDSTDKADLRLIYLALAHMIKFRGHFLIEGDLNPDNSDVDKLFIQLVQTYNQLFEENPINASGVDAKAILSARLSKSRRLENLIAQLPGEKKNGLFGNLIALSLGLTPNFKSNFDLAEDAKLQLSKDTYDDDLDNLLAQIGDQYADLFLAAKNLSDAILLSDILRVNTEITKAPLSASMIKRYDEHHQDLTLLKALVRQQLPEKYKEIFFDQSKNGYAGYIDGGASQEEFYKFIKPILEKMDGTEELLVKLNREDLLRKQRTFDNGSIPHQIHLGELHAILRRQEDFYPFLKDNREKIEKILTFRIPYYVGPLARGNSRFAWMTRKSEETITPWNFEEVVDKGASAQSFIERMTNFDKNLPNEKVLPKHSLLYEYFTVYNELTKVKYVTEGMRKPAFLSGEQKKAIVDLLFKTNRKVTVKQLKEDYFKKIECFDSVEISGVEDRFNASLGTYHDLLKIIKDKDFLDNEENEDILEDIVLTLTLFEDREMIEERLKTYAHLFDDKVMKQLKRRRYTGWGRLSRKLINGIRDKQSGKTILDFLKSDGFANRNFMQLIHDDSLTFKEDIQKAQVSGQGDSLHEHIANLAGSPAIKKGILQTVKVVDELVKVMGRHKPENIVIEMARENQTTQKGQKNSRERMKRIEEGIKELGSQILKEHPVENTQLQNEKLYLYYLQNGRDMYVDQELDINRLSDYDVDHIVPQSFLKDDSIDNKVLTRSDKARGKSDNVPSEEVVKKMKNYWRQLLNAKLITQRKFDNLTKAERGGLSELDKAGFIKRQLVETRQITKHVAQILDSRMNTKYDENDKLIREVKVITLKSKLVSDFRKDFQFYKVREINNYHHAHDAYLNAVVGTALIKKYPKLESEFVYGDYKVYDVRKMIAKSEQEIGKATAKYFFYSNIMNFFKTEITLANGEIRKRPLIETNGETGEIVWDKGRDFATVRKVLSMPQVNIVKKTEVQTGGFSKESILPKRNSDKLIARKKDWDPKKYGGFDSPTVAYSVLVVAKVEKGKSKKLKSVKELLGITIMERSSFEKNPIDFLEAKGYKEVKKDLIIKLPKYSLFELENGRKRMLASAGELQKGNELALPSKYVNFLYLASHYEKLKGSPEDNEQKQLFVEQHKHYLDEIIEQISEFSKRVILADANLDKVLSAYNKHRDKPIREQAENIIHLFTLTNLGAPAAFKYFDTTIDRKRYTSTKEVLDATLIHQSITGLYETRIDLSQLGGDGGPAPGGGEAAAKGGTVSLQDEHRLFDIPVTTSLPDVWLQDFPQAWAETGGLGRAKCQAPIIIDLKPTAVPVSIKQYPMSLEAHMGIRQHIIKFLELGVLRPCRSPWNTPLLPVKKPGTQDYRPVQDLREINKRTVDIHPTVPNPYNLLSTLKPDYSWYTVLDLKDAFFCLPLAPQSQELFAFEWKDPERGISGQLTWTRLPQGFKNSPTLFNEALHRDLTDFRTQHPEVTLLQYVDDLLLAAPTKKACTQGTRHLLQELGEKGYRASAKKAQICQTKVTYLGYILSEGKRWLTPGRIETVARIPPPRNPREVREFLGTAGFCRLWIPGFAELAAPLYALTKPSTPFTWQTEHQLAFEALKKALLSAPALGLPDTSKPFTLFLDERQGIAKGVLTQKLGPWKRPVAYLSKKLDPVAAGWPPCLRIMAATAMLVKDSAKLTLGQPLTVITPHTLEAIVRQPPDRWITNARLTHYQALLLDTDRVQFGPPVTLNPATLLPVPENQPSPHDCRQVLAETHGTREDLKDQELPDADHTWYTDGSSYLDSGTRRAGAAVVDGHNTIWAQSLPPGTSAQKAELIALTKALELSKGKKANIYTDSRYAFATAHTHGSIYERRGWLTSEGKEIKNKAEIIALLKALFLPQEVAIIHCPGHQKGQDPVAVGNRQADRVARQAAMAEVLTLATEPDNTSHITAGKRTADGSEFEKRTADGSEFESPKKKAKVE

SEQ ID NO: 1581 - protein, 2102 aa, synthetic construct
MPAAKRVKLDGGDKKYSIGLDIGTNSVGWAVITDEYKVPSKKFKVLGNTDRHSIKKNLIGALLFDSGETAEATRLKRTARRRYTRRKNRICYLQEIFSNEMAKVDDSFFHRLEESFLVEEDKKHERHPIFGNIVDEVAYHEKYPTIYHLRKKLVDSTDKADLRLIYLALAHMIKFRGHFLIEGDLNPDNSDVDKLFIQLVQTYNQLFEENPINASGVDAKAILSARLSKSRRLENLIAQLPGEKKNGLFGNLIALSLGLTPNFKSNFDLAEDAKLQLSKDTYDDDLDNLLAQIGDQYADLFLAAKNLSDAILLSDILRVNTEITKAPLSASMIKRYDEHHQDLTLLKALVRQQLPEKYKEIFFDQSKNGYAGYIDGGASQEEFYKFIKPILEKMDGTEELLVKLNREDLLRKQRTFDNGSIPHQIHLGELHAILRRQEDFYPFLKDNREKIEKILTFRIPYYVGPLARGNSRFAWMTRKSEETITPWNFEEVVDKGASAQSFIERMTNFDKNLPNEKVLPKHSLLYEYFTVYNELTKVKYVTEGMRKPAFLSGEQKKAIVDLLFKTNRKVTVKQLKEDYFKKIECFDSVEISGVEDRFNASLGTYHDLLKIIKDKDFLDNEENEDILEDIVLTLTLFEDREMIEERLKTYAHLFDDKVMKQLKRRRYTGWGRLSRKLINGIRDKQSGKTILDFLKSDGFANRNFMQLIHDDSLTFKEDIQKAQVSGQGDSLHEHIANLAGSPAIKKGILQTVKVVDELVKVMGRHKPENIVIEMARENQTTQKGQKNSRERMKRIEEGIKELGSQILKEHPVENTQLQNEKLYLYYLQNGRDMYVDQELDINRLSDYDVDHIVPQSFLKDDSIDNKVLTRSDKARGKSDNVPSEEVVKKMKNYWRQLLNAKLITQRKFDNLTKAERGGLSELDKAGFIKRQLVETRQITKHVAQILDSRMNTKYDENDKLIREVKVITLKSKLVSDFRKDFQFYKVREINNYHHAHDAYLNAVVGTALIKKYPKLESEFVYGDYKVYDVRKMIAKSEQEIGKATAKYFFYSNIMNFFKTEITLANGEIRKRPLIETNGETGEIVWDKGRDFATVRKVLSMPQVNIVKKTEVQTGGFSKESILPKRNSDKLIARKKDWDPKKYGGFDSPTVAYSVLVVAKVEKGKSKKLKSVKELLGITIMERSSFEKNPIDFLEAKGYKEVKKDLIIKLPKYSLFELENGRKRMLASAGELQKGNELALPSKYVNFLYLASHYEKLKGSPEDNEQKQLFVEQHKHYLDEIIEQISEFSKRVILADANLDKVLSAYNKHRDKPIREQAENIIHLFTLTNLGAPAAFKYFDTTIDRKRYTSTKEVLDATLIHQSITGLYETRIDLSQLGGDGGPAPEAAAKGGGGGTVSLQDEHRLFDIPVTTSLPDVWLQDFPQAWAETGGLGRAKCQAPIIIDLKPTAVPVSIKQYPMSLEAHMGIRQHIIKFLELGVLRPCRSPWNTPLLPVKKPGTQDYRPVQDLREINKRTVDIHPTVPNPYNLLSTLKPDYSWYTVLDLKDAFFCLPLAPQSQELFAFEWKDPERGISGQLTWTRLPQGFKNSPTLFNEALHRDLTDFRTQHPEVTLLQYVDDLLLAAPTKKACTQGTRHLLQELGEKGYRASAKKAQICQTKVTYLGYILSEGKRWLTPGRIETVARIPPPRNPREVREFLGTAGFCRLWIPGFAELAAPLYALTKPSTPFTWQTEHQLAFEALKKALLSAPALGLPDTSKPFTLFLDERQGIAKGVLTQKLGPWKRPVAYLSKKLDPVAAGWPPCLRIMAATAMLVKDSAKLTLGQPLTVITPHTLEAIVRQPPDRWITNARLTHYQALLLDTDRVQFGPPVTLNPATLLPVPENQPSPHDCRQVLAETHGTREDLKDQELPDADHTWYTDGSSYLDSGTRRAGAAVVDGHNTIWAQSLPPGTSAQKAELIALTKALELSKGKKANIYTDSRYAFATAHTHGSIYERRGWLTSEGKEIKNKAEIIALLKALFLPQEVAIIHCPGHQKGQDPVAVGNRQADRVARQAAMAEVLTLATEPDNTSHITAGKRTADGSEFEKRTADGSEFESPKKKAKVE

SEQ ID NO: 1582 - protein, 2100 aa, synthetic construct
MPAAKRVKLDGGDKKYSIGLDIGTNSVGWAVITDEYKVPSKKFKVLGNTDRHSIKKNLIGALLFDSGETAEATRLKRTARRRYTRRKNRICYLQEIFSNEMAKVDDSFFHRLEESFLVEEDKKHERHPIFGNIVDEVAYHEKYPTIYHLRKKLVDSTDKADLRLIYLALAHMIKFRGHFLIEGDLNPDNSDVDKLFIQLVQTYNQLFEENPINASGVDAKAILSARLSKSRRLENLIAQLPGEKKNGLFGNLIALSLGLTPNFKSNFDLAEDAKLQLSKDTYDDDLDNLLAQIGDQYADLFLAAKNLSDAILLSDILRVNTEITKAPLSASMIKRYDEHHQDLTLLKALVRQQLPEKYKEIFFDQSKNGYAGYIDGGASQEEFYKFIKPILEKMDGTEELLVKLNREDLLRKQRTFDNGSIPHQIHLGELHAILRRQEDFYPFLKDNREKIEKILTFRIPYYVGPLARGNSRFAWMTRKSEETITPWNFEEVVDKGASAQSFIERMTNFDKNLPNEKVLPKHSLLYEYFTVYNELTKVKYVTEGMRKPAFLSGEQKKAIVDLLFKTNRKVTVKQLKEDYFKKIECFDSVEISGVEDRFNASLGTYHDLLKIIKDKDFLDNEENEDILEDIVLTLTLFEDREMIEERLKTYAHLFDDKVMKQLKRRRYTGWGRLSRKLINGIRDKQSGKTILDFLKSDGFANRNFMQLIHDDSLTFKEDIQKAQVSGQGDSLHEHIANLAGSPAIKKGILQTVKVVDELVKVMGRHKPENIVIEMARENQTTQKGQKNSRERMKRIEEGIKELGSQILKEHPVENTQLQNEKLYLYYLQNGRDMYVDQELDINRLSDYDVDHIVPQSFLKDDSIDNKVLTRSDKARGKSDNVPSEEVVKKMKNYWRQLLNAKLITQRKFDNLTKAERGGLSELDKAGFIKRQLVETRQITKHVAQILDSRMNTKYDENDKLIREVKVITLKSKLVSDFRKDFQFYKVREINNYHHAHDAYLNAVVGTALIKKYPKLESEFVYGDYKVYDVRKMIAKSEQEIGKATAKYFFYSNIMNFFKTEITLANGEIRKRPLIETNGETGEIVWDKGRDFATVRKVLSMPQVNIVKKTEVQTGGFSKESILPKRNSDKLIARKKDWDPKKYGGFDSPTVAYSVLVVAKVEKGKSKKLKSVKELLGITIMERSSFEKNPIDFLEAKGYKEVKKDLIIKLPKYSLFELENGRKRMLASAGELQKGNELALPSKYVNFLYLASHYEKLKGSPEDNEQKQLFVEQHKHYLDEIIEQISEFSKRVILADANLDKVLSAYNKHRDKPIREQAENIIHLFTLTNLGAPAAFKYFDTTIDRKRYTSTKEVLDATLIHQSITGLYETRIDLSQLGGDGGGSSGSSGSSGGTVSLQDEHRLFDIPVTTSLPDVWLQDFPQAWAETGGLGRAKCQAPIIIDLKPTAVPVSIKQYPMSLEAHMGIRQHIIKFLELGVLRPCRSPWNTPLLPVKKPGTQDYRPVQDLREINKRTVDIHPTVPNPYNLLSTLKPDYSWYTVLDLKDAFFCLPLAPQSQELFAFEWKDPERGISGQLTWTRLPQGFKNSPTLFNEALHRDLTDFRTQHPEVTLLQYVDDLLLAAPTKKACTQGTRHLLQELGEKGYRASAKKAQICQTKVTYLGYILSEGKRWLTPGRIETVARIPPPRNPREVREFLGTAGFCRLWIPGFAELAAPLYALTKPSTPFTWQTEHQLAFEALKKALLSAPALGLPDTSKPFTLFLDERQGIAKGVLTQKLGPWKRPVAYLSKKLDPVAAGWPPCLRIMAATAMLVKDSAKLTLGQPLTVITPHTLEAIVRQPPDRWITNARLTHYQALLLDTDRVQFGPPVTLNPATLLPVPENQPSPHDCRQVLAETHGTREDLKDQELPDADHTWYTDGSSYLDSGTRRAGAAVVDGHNTIWAQSLPPGTSAQKAELIALTKALELSKGKKANIYTDSRYAFATAHTHGSIYERRGWLTSEGKEIKNKAEIIALLKALFLPQEVAIIHCPGHQKGQDPVAVGNRQADRVARQAAMAEVLTLATEPDNTSHITAGKRTADGSEFEKRTADGSEFESPKKKAKVE

SEQ ID NO: 1583 - protein, 2099 aa, synthetic construct
MPAAKRVKLDGGDKKYSIGLDIGTNSVGWAVITDEYKVPSKKFKVLGNTDRHSIKKNLIGALLFDSGETAEATRLKRTARRRYTRRKNRICYLQEIFSNEMAKVDDSFFHRLEESFLVEEDKKHERHPIFGNIVDEVAYHEKYPTIYHLRKKLVDSTDKADLRLIYLALAHMIKFRGHFLIEGDLNPDNSDVDKLFIQLVQTYNQLFEENPINASGVDAKAILSARLSKSRRLENLIAQLPGEKKNGLFGNLIALSLGLTPNFKSNFDLAEDAKLQLSKDTYDDDLDNLLAQIGDQYADLFLAAKNLSDAILLSDILRVNTEITKAPLSASMIKRYDEHHQDLTLLKALVRQQLPEKYKEIFFDQSKNGYAGYIDGGASQEEFYKFIKPILEKMDGTEELLVKLNREDLLRKQRTFDNGSIPHQIHLGELHAILRRQEDFYPFLKDNREKIEKILTFRIPYYVGPLARGNSRFAWMTRKSEETITPWNFEEVVDKGASAQSFIERMTNFDKNLPNEKVLPKHSLLYEYFTVYNELTKVKYVTEGMRKPAFLSGEQKKAIVDLLFKTNRKVTVKQLKEDYFKKIECFDSVEISGVEDRFNASLGTYHDLLKIIKDKDFLDNEENEDILEDIVLTLTLFEDREMIEERLKTYAHLFDDKVMKQLKRRRYTGWGRLSRKLINGIRDKQSGKTILDFLKSDGFANRNFMQLIHDDSLTFKEDIQKAQVSGQGDSLHEHIANLAGSPAIKKGILQTVKVVDELVKVMGRHKPENIVIEMARENQTTQKGQKNSRERMKRIEEGIKELGSQILKEHPVENTQLQNEKLYLYYLQNGRDMYVDQELDINRLSDYDVDHIVPQSFLKDDSIDNKVLTRSDKARGKSDNVPSEEVVKKMKNYWRQLLNAKLITQRKFDNLTKAERGGLSELDKAGFIKRQLVETRQITKHVAQILDSRMNTKYDENDKLIREVKVITLKSKLVSDFRKDFQFYKVREINNYHHAHDAYLNAVVGTALIKKYPKLESEFVYGDYKVYDVRKMIAKSEQEIGKATAKYFFYSNIMNFFKTEITLANGEIRKRPLIETNGETGEIVWDKGRDFATVRKVLSMPQVNIVKKTEVQTGGFSKESILPKRNSDKLIARKKDWDPKKYGGFDSPTVAYSVLVVAKVEKGKSKKLKSVKELLGITIMERSSFEKNPIDFLEAKGYKEVKKDLIIKLPKYSLFELENGRKRMLASAGELQKGNELALPSKYVNFLYLASHYEKLKGSPEDNEQKQLFVEQHKHYLDEIIEQISEFSKRVILADANLDKVLSAYNKHRDKPIREQAENIIHLFTLTNLGAPAAFKYFDTTIDRKRYTSTKEVLDATLIHQSITGLYETRIDLSQLGGDGGEAAAKGSSGGTVSLQDEHRLFDIPVTTSLPDVWLQDFPQAWAETGGLGRAKCQAPIIIDLKPTAVPVSIKQYPMSLEAHMGIRQHIIKFLELGVLRPCRSPWNTPLLPVKKPGTQDYRPVQDLREINKRTVDIHPTVPNPYNLLSTLKPDYSWYTVLDLKDAFFCLPLAPQSQELFAFEWKDPERGISGQLTWTRLPQGFKNSPTLFNEALHRDLTDFRTQHPEVTLLQYVDDLLLAAPTKKACTQGTRHLLQELGEKGYRASAKKAQICQTKVTYLGYILSEGKRWLTPGRIETVARIPPPRNPREVREFLGTAGFCRLWIPGFAELAAPLYALTKPSTPFTWQTEHQLAFEALKKALLSAPALGLPDTSKPFTLFLDERQGIAKGVLTQKLGPWKRPVAYLSKKLDPVAAGWPPCLRIMAATAMLVKDSAKLTLGQPLTVITPHTLEAIVRQPPDRWITNARLTHYQALLLDTDRVQFGPPVTLNPATLLPVPENQPSPHDCRQVLAETHGTREDLKDQELPDADHTWYTDGSSYLDSGTRRAGAAVVDGHNTIWAQSLPPGTSAQKAELIALTKALELSKGKKANIYTDSRYAFATAHTHGSIYERRGWLTSEGKEIKNKAEIIALLKALFLPQEVAIIHCPGHQKGQDPVAVGNRQADRVARQAAMAEVLTLATEPDNTSHITAGKRTADGSEFEKRTADGSEFESPKKKAKVE

SEQ ID NO: 1584 - protein, 2100 aa, synthetic construct
MPAAKRVKLDGGDKKYSIGLDIGTNSVGWAVITDEYKVPSKKFKVLGNTDRHSIKKNLIGALLFDSGETAEATRLKRTARRRYTRRKNRICYLQEIFSNEMAKVDDSFFHRLEESFLVEEDKKHERHPIFGNIVDEVAYHEKYPTIYHLRKKLVDSTDKADLRLIYLALAHMIKFRGHFLIEGDLNPDNSDVDKLFIQLVQTYNQLFEENPINASGVDAKAILSARLSKSRRLENLIAQLPGEKKNGLFGNLIALSLGLTPNFKSNFDLAEDAKLQLSKDTYDDDLDNLLAQIGDQYADLFLAAKNLSDAILLSDILRVNTEITKAPLSASMIKRYDEHHQDLTLLKALVRQQLPEKYKEIFFDQSKNGYAGYIDGGASQEEFYKFIKPILEKMDGTEELLVKLNREDLLRKQRTFDNGSIPHQIHLGELHAILRRQEDFYPFLKDNREKIEKILTFRIPYYVGPLARGNSRFAWMTRKSEETITPWNFEEVVDKGASAQSFIERMTNFDKNLPNEKVLPKHSLLYEYFTVYNELTKVKYVTEGMRKPAFLSGEQKKAIVDLLFKTNRKVTVKQLKEDYFKKIECFDSVEISGVEDRFNASLGTYHDLLKIIKDKDFLDNEENEDILEDIVLTLTLFEDREMIEERLKTYAHLFDDKVMKQLKRRRYTGWGRLSRKLINGIRDKQSGKTILDFLKSDGFANRNFMQLIHDDSLTFKEDIQKAQVSGQGDSLHEHIANLAGSPAIKKGILQTVKVVDELVKVMGRHKPENIVIEMARENQTTQKGQKNSRERMKRIEEGIKELGSQILKEHPVENTQLQNEKLYLYYLQNGRDMYVDQELDINRLSDYDVDHIVPQSFLKDDSIDNKVLTRSDKARGKSDNVPSEEVVKKMKNYWRQLLNAKLITQRKFDNLTKAERGGLSELDKAGFIKRQLVETRQITKHVAQILDSRMNTKYDENDKLIREVKVITLKSKLVSDFRKDFQFYKVREINNYHHAHDAYLNAVVGTALIKKYPKLESEFVYGDYKVYDVRKMIAKSEQEIGKATAKYFFYSNIMNFFKTEITLANGEIRKRPLIETNGETGEIVWDKGRDFATVRKVLSMPQVNIVKKTEVQTGGFSKESILPKRNSDKLIARKKDWDPKKYGGFDSPTVAYSVLVVAKVEKGKSKKLKSVKELLGITIMERSSFEKNPIDFLEAKGYKEVKKDLIIKLPKYSLFELENGRKRMLASAGELQKGNELALPSKYVNFLYLASHYEKLKGSPEDNEQKQLFVEQHKHYLDEIIEQISEFSKRVILADANLDKVLSAYNKHRDKPIREQAENIIHLFTLTNLGAPAAFKYFDTTIDRKRYTSTKEVLDATLIHQSITGLYETRIDLSQLGGDGGGSSGGSPAPGGTVSLQDEHRLFDIPVTTSLPDVWLQDFPQAWAETGGLGRAKCQAPIIIDLKPTAVPVSIKQYPMSLEAHMGIRQHIIKFLELGVLRPCRSPWNTPLLPVKKPGTQDYRPVQDLREINKRTVDIHPTVPNPYNLLSTLKPDYSWYTVLDLKDAFFCLPLAPQSQELFAFEWKDPERGISGQLTWTRLPQGFKNSPTLFNEALHRDLTDFRTQHPEVTLLQYVDDLLLAAPTKKACTQGTRHLLQELGEKGYRASAKKAQICQTKVTYLGYILSEGKRWLTPGRIETVARIPPPRNPREVREFLGTAGFCRLWIPGFAELAAPLYALTKPSTPFTWQTEHQLAFEALKKALLSAPALGLPDTSKPFTLFLDERQGIAKGVLTQKLGPWKRPVAYLSKKLDPVAAGWPPCLRIMAATAMLVKDSAKLTLGQPLTVITPHTLEAIVRQPPDRWITNARLTHYQALLLDTDRVQFGPPVTLNPATLLPVPENQPSPHDCRQVLAETHGTREDLKDQELPDADHTWYTDGSSYLDSGTRRAGAAVVDGHNTIWAQSLPPGTSAQKAELIALTKALELSKGKKANIYTDSRYAFATAHTHGSIYERRGWLTSEGKEIKNKAEIIALLKALFLPQEVAIIHCPGHQKGQDPVAVGNRQADRVARQAAMAEVLTLATEPDNTSHITAGKRTADGSEFEKRTADGSEFESPKKKAKVE

SEQ ID NO: 1585 - protein, 2102 aa, synthetic construct
MPAAKRVKLDGGDKKYSIGLDIGTNSVGWAVITDEYKVPSKKFKVLGNTDRHSIKKNLIGALLFDSGETAEATRLKRTARRRYTRRKNRICYLQEIFSNEMAKVDDSFFHRLEESFLVEEDKKHERHPIFGNIVDEVAYHEKYPTIYHLRKKLVDSTDKADLRLIYLALAHMIKFRGHFLIEGDLNPDNSDVDKLFIQLVQTYNQLFEENPINASGVDAKAILSARLSKSRRLENLIAQLPGEKKNGLFGNLIALSLGLTPNFKSNFDLAEDAKLQLSKDTYDDDLDNLLAQIGDQYADLFLAAKNLSDAILLSDILRVNTEITKAPLSASMIKRYDEHHQDLTLLKALVRQQLPEKYKEIFFDQSKNGYAGYIDGGASQEEFYKFIKPILEKMDGTEELLVKLNREDLLRKQRTFDNGSIPHQIHLGELHAILRRQEDFYPFLKDNREKIEKILTFRIPYYVGPLARGNSRFAWMTRKSEETITPWNFEEVVDKGASAQSFIERMTNFDKNLPNEKVLPKHSLLYEYFTVYNELTKVKYVTEGMRKPAFLSGEQKKAIVDLLFKTNRKVTVKQLKEDYFKKIECFDSVEISGVEDRFNASLGTYHDLLKIIKDKDFLDNEENEDILEDIVLTLTLFEDREMIEERLKTYAHLFDDKVMKQLKRRRYTGWGRLSRKLINGIRDKQSGKTILDFLKSDGFANRNFMQLIHDDSLTFKEDIQKAQVSGQGDSLHEHIANLAGSPAIKKGILQTVKVVDELVKVMGRHKPENIVIEMARENQTTQKGQKNSRERMKRIEEGIKELGSQILKEHPVENTQLQNEKLYLYYLQNGRDMYVDQELDINRLSDYDVDHIVPQSFLKDDSIDNKVLTRSDKARGKSDNVPSEEVVKKMKNYWRQLLNAKLITQRKFDNLTKAERGGLSELDKAGFIKRQLVETRQITKHVAQILDSRMNTKYDENDKLIREVKVITLKSKLVSDFRKDFQFYKVREINNYHHAHDAYLNAVVGTALIKKYPKLESEFVYGDYKVYDVRKMIAKSEQEIGKATAKYFFYSNIMNFFKTEITLANGEIRKRPLIETNGETGEIVWDKGRDFATVRKVLSMPQVNIVKKTEVQTGGFSKESILPKRNSDKLIARKKDWDPKKYGGFDSPTVAYSVLVVAKVEKGKSKKLKSVKELLGITIMERSSFEKNPIDFLEAKGYKEVKKDLIIKLPKYSLFELENGRKRMLASAGELQKGNELALPSKYVNFLYLASHYEKLKGSPEDNEQKQLFVEQHKHYLDEIIEQISEFSKRVILADANLDKVLSAYNKHRDKPIREQAENIIHLFTLTNLGAPAAFKYFDTTIDRKRYTSTKEVLDATLIHQSITGLYETRIDLSQLGGDGGGGGEAAAKGGSGGTVSLQDEHRLFDIPVTTSLPDVWLQDFPQAWAETGGLGRAKCQAPIIIDLKPTAVPVSIKQYPMSLEAHMGIRQHIIKFLELGVLRPCRSPWNTPLLPVKKPGTQDYRPVQDLREINKRTVDIHPTVPNPYNLLSTLKPDYSWYTVLDLKDAFFCLPLAPQSQELFAFEWKDPERGISGQLTWTRLPQGFKNSPTLFNEALHRDLTDFRTQHPEVTLLQYVDDLLLAAPTKKACTQGTRHLLQELGEKGYRASAKKAQICQTKVTYLGYILSEGKRWLTPGRIETVARIPPPRNPREVREFLGTAGFCRLWIPGFAELAAPLYALTKPSTPFTWQTEHQLAFEALKKALLSAPALGLPDTSKPFTLFLDERQGIAKGVLTQKLGPWKRPVAYLSKKLDPVAAGWPPCLRIMAATAMLVKDSAKLTLGQPLTVITPHTLEAIVRQPPDRWITNARLTHYQALLLDTDRVQFGPPVTLNPATLLPVPENQPSPHDCRQVLAETHGTREDLKDQELPDADHTWYTDGSSYLDSGTRRAGAAVVDGHNTIWAQSLPPGTSAQKAELIALTKALELSKGKKANIYTDSRYAFATAHTHGSIYERRGWLTSEGKEIKNKAEIIALLKALFLPQEVAIIHCPGHQKGQDPVAVGNRQADRVARQAAMAEVLTLATEPDNTSHITAGKRTADGSEFEKRTADGSEFESPKKKAKVE

SEQ ID NO: 1586 - protein, 2100 aa, synthetic construct
MPAAKRVKLDGGDKKYSIGLDIGTNSVGWAVITDEYKVPSKKFKVLGNTDRHSIKKNLIGALLFDSGETAEATRLKRTARRRYTRRKNRICYLQEIFSNEMAKVDDSFFHRLEESFLVEEDKKHERHPIFGNIVDEVAYHEKYPTIYHLRKKLVDSTDKADLRLIYLALAHMIKFRGHFLIEGDLNPDNSDVDKLFIQLVQTYNQLFEENPINASGVDAKAILSARLSKSRRLENLIAQLPGEKKNGLFGNLIALSLGLTPNFKSNFDLAEDAKLQLSKDTYDDDLDNLLAQIGDQYADLFLAAKNLSDAILLSDILRVNTEITKAPLSASMIKRYDEHHQDLTLLKALVRQQLPEKYKEIFFDQSKNGYAGYIDGGASQEEFYKFIKPILEKMDGTEELLVKLNREDLLRKQRTFDNGSIPHQIHLGELHAILRRQEDFYPFLKDNREKIEKILTFRIPYYVGPLARGNSRFAWMTRKSEETITPWNFEEVVDKGASAQSFIERMTNFDKNLPNEKVLPKHSLLYEYFTVYNELTKVKYVTEGMRKPAFLSGEQKKAIVDLLFKTNRKVTVKQLKEDYFKKIECFDSVEISGVEDRFNASLGTYHDLLKIIKDKDFLDNEENEDILEDIVLTLTLFEDREMIEERLKTYAHLFDDKVMKQLKRRRYTGWGRLSRKLINGIRDKQSGKTILDFLKSDGFANRNFMQLIHDDSLTFKEDIQKAQVSGQGDSLHEHIANLAGSPAIKKGILQTVKVVDELVKVMGRHKPENIVIEMARENQTTQKGQKNSRERMKRIEEGIKELGSQILKEHPVENTQLQNEKLYLYYLQNGRDMYVDQELDINRLSDYDVDHIVPQSFLKDDSIDNKVLTRSDKARGKSDNVPSEEVVKKMKNYWRQLLNAKLITQRKFDNLTKAERGGLSELDKAGFIKRQLVETRQITKHVAQILDSRMNTKYDENDKLIREVKVITLKSKLVSDFRKDFQFYKVREINNYHHAHDAYLNAVVGTALIKKYPKLESEFVYGDYKVYDVRKMIAKSEQEIGKATAKYFFYSNIMNFFKTEITLANGEIRKRPLIETNGETGEIVWDKGRDFATVRKVLSMPQVNIVKKTEVQTGGFSKESILPKRNSDKLIARKKDWDPKKYGGFDSPTVAYSVLVVAKVEKGKSKKLKSVKELLGITIMERSSFEKNPIDFLEAKGYKEVKKDLIIKLPKYSLFELENGRKRMLASAGELQKGNELALPSKYVNFLYLASHYEKLKGSPEDNEQKQLFVEQHKHYLDEIIEQISEFSKRVILADANLDKVLSAYNKHRDKPIREQAENIIHLFTLTNLGAPAAFKYFDTTIDRKRYTSTKEVLDATLIHQSITGLYETRIDLSQLGGDGGPAPGSSGGSGGTVSLQDEHRLFDIPVTTSLPDVWLQDFPQAWAETGGLGRAKCQAPIIIDLKPTAVPVSIKQYPMSLEAHMGIRQHIIKFLELGVLRPCRSPWNTPLLPVKKPGTQDYRPVQDLREINKRTVDIHPTVPNPYNLLSTLKPDYSWYTVLDLKDAFFCLPLAPQSQELFAFEWKDPERGISGQLTWTRLPQGFKNSPTLFNEALHRDLTDFRTQHPEVTLLQYVDDLLLAAPTKKACTQGTRHLLQELGEKGYRASAKKAQICQTKVTYLGYILSEGKRWLTPGRIETVARIPPPRNPREVREFLGTAGFCRLWIPGFAELAAPLYALTKPSTPFTWQTEHQLAFEALKKALLSAPALGLPDTSKPFTLFLDERQGIAKGVLTQKLGPWKRPVAYLSKKLDPVAAGWPPCLRIMAATAMLVKDSAKLTLGQPLTVITPHTLEAIVRQPPDRWITNARLTHYQALLLDTDRVQFGPPVTLNPATLLPVPENQPSPHDCRQVLAETHGTREDLKDQELPDADHTWYTDGSSYLDSGTRRAGAAVVDGHNTIWAQSLPPGTSAQKAELIALTKALELSKGKKANIYTDSRYAFATAHTHGSIYERRGWLTSEGKEIKNKAEIIALLKALFLPQEVAIIHCPGHQKGQDPVAVGNRQADRVARQAAMAEVLTLATEPDNTSHITAGKRTADGSEFEKRTADGSEFESPKKKAKVE

SEQ ID NO: 1587 - protein, 2101 aa, synthetic construct
MPAAKRVKLDGGDKKYSIGLDIGTNSVGWAVITDEYKVPSKKFKVLGNTDRHSIKKNLIGALLFDSGETAEATRLKRTARRRYTRRKNRICYLQEIFSNEMAKVDDSFFHRLEESFLVEEDKKHERHPIFGNIVDEVAYHEKYPTIYHLRKKLVDSTDKADLRLIYLALAHMIKFRGHFLIEGDLNPDNSDVDKLFIQLVQTYNQLFEENPINASGVDAKAILSARLSKSRRLENLIAQLPGEKKNGLFGNLIALSLGLTPNFKSNFDLAEDAKLQLSKDTYDDDLDNLLAQIGDQYADLFLAAKNLSDAILLSDILRVNTEITKAPLSASMIKRYDEHHQDLTLLKALVRQQLPEKYKEIFFDQSKNGYAGYIDGGASQEEFYKFIKPILEKMDGTEELLVKLNREDLLRKQRTFDNGSIPHQIHLGELHAILRRQEDFYPFLKDNREKIEKILTFRIPYYVGPLARGNSRFAWMTRKSEETITPWNFEEVVDKGASAQSFIERMTNFDKNLPNEKVLPKHSLLYEYFTVYNELTKVKYVTEGMRKPAFLSGEQKKAIVDLLFKTNRKVTVKQLKEDYFKKIECFDSVEISGVEDRFNASLGTYHDLLKIIKDKDFLDNEENEDILEDIVLTLTLFEDREMIEERLKTYAHLFDDKVMKQLKRRRYTGWGRLSRKLINGIRDKQSGKTILDFLKSDGFANRNFMQLIHDDSLTFKEDIQKAQVSGQGDSLHEHIANLAGSPAIKKGILQTVKVVDELVKVMGRHKPENIVIEMARENQTTQKGQKNSRERMKRIEEGIKELGSQILKEHPVENTQLQNEKLYLYYLQNGRDMYVDQELDINRLSDYDVDHIVPQSFLKDDSIDNKVLTRSDKARGKSDNVPSEEVVKKMKNYWRQLLNAKLITQRKFDNLTKAERGGLSELDKAGFIKRQLVETRQITKHVAQILDSRMNTKYDENDKLIREVKVITLKSKLVSDFRKDFQFYKVREINNYHHAHDAYLNAVVGTALIKKYPKLESEFVYGDYKVYDVRKMIAKSEQEIGKATAKYFFYSNIMNFFKTEITLANGEIRKRPLIETNGETGEIVWDKGRDFATVRKVLSMPQVNIVKKTEVQTGGFSKESILPKRNSDKLIARKKDWDPKKYGGFDSPTVAYSVLVVAKVEKGKSKKLKSVKELLGITIMERSSFEKNPIDFLEAKGYKEVKKDLIIKLPKYSLFELENGRKRMLASAGELQKGNELALPSKYVNFLYLASHYEKLKGSPEDNEQKQLFVEQHKHYLDEIIEQISEFSKRVILADANLDKVLSAYNKHRDKPIREQAENIIHLFTLTNLGAPAAFKYFDTTIDRKRYTSTKEVLDATLIHQSITGLYETRIDLSQLGGDGGEAAAKEAAAKGGTVSLQDEHRLFDIPVTTSLPDVWLQDFPQAWAETGGLGRAKCQAPIIIDLKPTAVPVSIKQYPMSLEAHMGIRQHIIKFLELGVLRPCRSPWNTPLLPVKKPGTQDYRPVQDLREINKRTVDIHPTVPNPYNLLSTLKPDYSWYTVLDLKDAFFCLPLAPQSQELFAFEWKDPERGISGQLTWTRLPQGFKNSPTLFNEALHRDLTDFRTQHPEVTLLQYVDDLLLAAPTKKACTQGTRHLLQELGEKGYRASAKKAQICQTKVTYLGYILSEGKRWLTPGRIETVARIPPPRNPREVREFLGTAGFCRLWIPGFAELAAPLYALTKPSTPFTWQTEHQLAFEALKKALLSAPALGLPDTSKPFTLFLDERQGIAKGVLTQKLGPWKRPVAYLSKKLDPVAAGWPPCLRIMAATAMLVKDSAKLTLGQPLTVITPHTLEAIVRQPPDRWITNARLTHYQALLLDTDRVQFGPPVTLNPATLLPVPENQPSPHDCRQVLAETHGTREDLKDQELPDADHTWYTDGSSYLDSGTRRAGAAVVDGHNTIWAQSLPPGTSAQKAELIALTKALELSKGKKANIYTDSRYAFATAHTHGSIYERRGWLTSEGKEIKNKAEIIALLKALFLPQEVAIIHCPGHQKGQDPVAVGNRQADRVARQAAMAEVLTLATEPDNTSHITAGKRTADGSEFEKRTADGSEFESPKKKAKVE

SEQ ID NO: 1588 - protein, 2109 aa, synthetic construct
MPAAKRVKLDGGDKKYSIGLDIGTNSVGWAVITDEYKVPSKKFKVLGNTDRHSIKKNLIGALLFDSGETAEATRLKRTARRRYTRRKNRICYLQEIFSNEMAKVDDSFFHRLEESFLVEEDKKHERHPIFGNIVDEVAYHEKYPTIYHLRKKLVDSTDKADLRLIYLALAHMIKFRGHFLIEGDLNPDNSDVDKLFIQLVQTYNQLFEENPINASGVDAKAILSARLSKSRRLENLIAQLPGEKKNGLFGNLIALSLGLTPNFKSNFDLAEDAKLQLSKDTYDDDLDNLLAQIGDQYADLFLAAKNLSDAILLSDILRVNTEITKAPLSASMIKRYDEHHQDLTLLKALVRQQLPEKYKEIFFDQSKNGYAGYIDGGASQEEFYKFIKPILEKMDGTEELLVKLNREDLLRKQRTFDNGSIPHQIHLGELHAILRRQEDFYPFLKDNREKIEKILTFRIPYYVGPLARGNSRFAWMTRKSEETITPWNFEEVVDKGASAQSFIERMTNFDKNLPNEKVLPKHSLLYEYFTVYNELTKVKYVTEGMRKPAFLSGEQKKAIVDLLFKTNRKVTVKQLKEDYFKKIECFDSVEISGVEDRFNASLGTYHDLLKIIKDKDFLDNEENEDILEDIVLTLTLFEDREMIEERLKTYAHLFDDKVMKQLKRRRYTGWGRLSRKLINGIRDKQSGKTILDFLKSDGFANRNFMQLIHDDSLTFKEDIQKAQVSGQGDSLHEHIANLAGSPAIKKGILQTVKVVDELVKVMGRHKPENIVIEMARENQTTQKGQKNSRERMKRIEEGIKELGSQILKEHPVENTQLQNEKLYLYYLQNGRDMYVDQELDINRLSDYDVDHIVPQSFLKDDSIDNKVLTRSDKARGKSDNVPSEEVVKKMKNYWRQLLNAKLITQRKFDNLTKAERGGLSELDKAGFIKRQLVETRQITKHVAQILDSRMNTKYDENDKLIREVKVITLKSKLVSDFRKDFQFYKVREINNYHHAHDAYLNAVVGTALIKKYPKLESEFVYGDYKVYDVRKMIAKSEQEIGKATAKYFFYSNIMNFFKTEITLANGEIRKRPLIETNGETGEIVWDKGRDFATVRKVLSMPQVNIVKKTEVQTGGFSKESILPKRNSDKLIARKKDWDPKKYGGFDSPTVAYSVLVVAKVEKGKSKKLKSVKELLGITIMERSSFEKNPIDFLEAKGYKEVKKDLIIKLPKYSLFELENGRKRMLASAGELQKGNELALPSKYVNFLYLASHYEKLKGSPEDNEQKQLFVEQHKHYLDEIIEQISEFSKRVILADANLDKVLSAYNKHRDKPIREQAENIIHLFTLTNLGAPAAFKYFDTTIDRKRYTSTKEVLDATLIHQSITGLYETRIDLSQLGGDGGGSSGSSGSSGSSGSSGSSGGTVSLQDEHRLFDIPVTTSLPDVWLQDFPQAWAETGGLGRAKCQAPIIIDLKPTAVPVSIKQYPMSLEAHMGIRQHIIKFLELGVLRPCRSPWNTPLLPVKKPGTQDYRPVQDLREINKRTVDIHPTVPNPYNLLSTLKPDYSWYTVLDLKDAFFCLPLAPQSQELFAFEWKDPERGISGQLTWTRLPQGFKNSPTLFNEALHRDLTDFRTQHPEVTLLQYVDDLLLAAPTKKACTQGTRHLLQELGEKGYRASAKKAQICQTKVTYLGYILSEGKRWLTPGRIETVARIPPPRNPREVREFLGTAGFCRLWIPGFAELAAPLYALTKPSTPFTWQTEHQLAFEALKKALLSAPALGLPDTSKPFTLFLDERQGIAKGVLTQKLGPWKRPVAYLSKKLDPVAAGWPPCLRIMAATAMLVKDSAKLTLGQPLTVITPHTLEAIVRQPPDRWITNARLTHYQALLLDTDRVQFGPPVTLNPATLLPVPENQPSPHDCRQVLAETHGTREDLKDQELPDADHTWYTDGSSYLDSGTRRAGAAVVDGHNTIWAQSLPPGTSAQKAELIALTKALELSKGKKANIYTDSRYAFATAHTHGSIYERRGWLTSEGKEIKNKAEIIALLKALFLPQEVAIIHCPGHQKGQDPVAVGNRQADRVARQAAMAEVLTLATEPDNTSHITAGKRTADGSEFEKRTADGSEFESPKKKAKVE

SEQ ID NO: 1589 - protein, 2102 aa, synthetic construct
MPAAKRVKLDGGDKKYSIGLDIGTNSVGWAVITDEYKVPSKKFKVLGNTDRHSIKKNLIGALLFDSGETAEATRLKRTARRRYTRRKNRICYLQEIFSNEMAKVDDSFFHRLEESFLVEEDKKHERHPIFGNIVDEVAYHEKYPTIYHLRKKLVDSTDKADLRLIYLALAHMIKFRGHFLIEGDLNPDNSDVDKLFIQLVQTYNQLFEENPINASGVDAKAILSARLSKSRRLENLIAQLPGEKKNGLFGNLIALSLGLTPNFKSNFDLAEDAKLQLSKDTYDDDLDNLLAQIGDQYADLFLAAKNLSDAILLSDILRVNTEITKAPLSASMIKRYDEHHQDLTLLKALVRQQLPEKYKEIFFDQSKNGYAGYIDGGASQEEFYKFIKPILEKMDGTEELLVKLNREDLLRKQRTFDNGSIPHQIHLGELHAILRRQEDFYPFLKDNREKIEKILTFRIPYYVGPLARGNSRFAWMTRKSEETITPWNFEEVVDKGASAQSFIERMTNFDKNLPNEKVLPKHSLLYEYFTVYNELTKVKYVTEGMRKPAFLSGEQKKAIVDLLFKTNRKVTVKQLKEDYFKKIECFDSVEISGVEDRFNASLGTYHDLLKIIKDKDFLDNEENEDILEDIVLTLTLFEDREMIEERLKTYAHLFDDKVMKQLKRRRYTGWGRLSRKLINGIRDKQSGKTILDFLKSDGFANRNFMQLIHDDSLTFKEDIQKAQVSGQGDSLHEHIANLAGSPAIKKGILQTVKVVDELVKVMGRHKPENIVIEMARENQTTQKGQKNSRERMKRIEEGIKELGSQILKEHPVENTQLQNEKLYLYYLQNGRDMYVDQELDINRLSDYDVDHIVPQSFLKDDSIDNKVLTRSDKARGKSDNVPSEEVVKKMKNYWRQLLNAKLITQRKFDNLTKAERGGLSELDKAGFIKRQLVETRQITKHVAQILDSRMNTKYDENDKLIREVKVITLKSKLVSDFRKDFQFYKVREINNYHHAHDAYLNAVVGTALIKKYPKLESEFVYGDYKVYDVRKMIAKSEQEIGKATAKYFFYSNIMNFFKTEITLANGEIRKRPLIETNGETGEIVWDKGRDFATVRKVLSMPQVNIVKKTEVQTGGFSKESILPKRNSDKLIARKKDWDPKKYGGFDSPTVAYSVLVVAKVEKGKSKKLKSVKELLGITIMERSSFEKNPIDFLEAKGYKEVKKDLIIKLPKYSLFELENGRKRMLASAGELQKGNELALPSKYVNFLYLASHYEKLKGSPEDNEQKQLFVEQHKHYLDEIIEQISEFSKRVILADANLDKVLSAYNKHRDKPIREQAENIIHLFTLTNLGAPAAFKYFDTTIDRKRYTSTKEVLDATLIHQSITGLYETRIDLSQLGGDGGGGGEAAAKPAPGGTVSLQDEHRLFDIPVTTSLPDVWLQDFPQAWAETGGLGRAKCQAPIIIDLKPTAVPVSIKQYPMSLEAHMGIRQHIIKFLELGVLRPCRSPWNTPLLPVKKPGTQDYRPVQDLREINKRTVDIHPTVPNPYNLLSTLKPDYSWYTVLDLKDAFFCLPLAPQSQELFAFEWKDPERGISGQLTWTRLPQGFKNSPTLFNEALHRDLTDFRTQHPEVTLLQYVDDLLLAAPTKKACTQGTRHLLQELGEKGYRASAKKAQICQTKVTYLGYILSEGKRWLTPGRIETVARIPPPRNPREVREFLGTAGFCRLWIPGFAELAAPLYALTKPSTPFTWQTEHQLAFEALKKALLSAPALGLPDTSKPFTLFLDERQGIAKGVLTQKLGPWKRPVAYLSKKLDPVAAGWPPCLRIMAATAMLVKDSAKLTLGQPLTVITPHTLEAIVRQPPDRWITNARLTHYQALLLDTDRVQFGPPVTLNPATLLPVPENQPSPHDCRQVLAETHGTREDLKDQELPDADHTWYTDGSSYLDSGTRRAGAAVVDGHNTIWAQSLPPGTSAQKAELIALTKALELSKGKKANIYTDSRYAFATAHTHGSIYERRGWLTSEGKEIKNKAEIIALLKALFLPQEVAIIHCPGHQKGQDPVAVGNRQADRVARQAAMAEVLTLATEPDNTSHITAGKRTADGSEFEKRTADGSEFESPKKKAKVE

SEQ ID NO: 1590 - protein, 2097 aa, synthetic construct
MPAAKRVKLDGGDKKYSIGLDIGTNSVGWAVITDEYKVPSKKFKVLGNTDRHSIKKNLIGALLFDSGETAEATRLKRTARRRYTRRKNRICYLQEIFSNEMAKVDDSFFHRLEESFLVEEDKKHERHPIFGNIVDEVAYHEKYPTIYHLRKKLVDSTDKADLRLIYLALAHMIKFRGHFLIEGDLNPDNSDVDKLFIQLVQTYNQLFEENPINASGVDAKAILSARLSKSRRLENLIAQLPGEKKNGLFGNLIALSLGLTPNFKSNFDLAEDAKLQLSKDTYDDDLDNLLAQIGDQYADLFLAAKNLSDAILLSDILRVNTEITKAPLSASMIKRYDEHHQDLTLLKALVRQQLPEKYKEIFFDQSKNGYAGYIDGGASQEEFYKFIKPILEKMDGTEELLVKLNREDLLRKQRTFDNGSIPHQIHLGELHAILRRQEDFYPFLKDNREKIEKILTFRIPYYVGPLARGNSRFAWMTRKSEETITPWNFEEVVDKGASAQSFIERMTNFDKNLPNEKVLPKHSLLYEYFTVYNELTKVKYVTEGMRKPAFLSGEQKKAIVDLLFKTNRKVTVKQLKEDYFKKIECFDSVEISGVEDRFNASLGTYHDLLKIIKDKDFLDNEENEDILEDIVLTLTLFEDREMIEERLKTYAHLFDDKVMKQLKRRRYTGWGRLSRKLINGIRDKQSGKTILDFLKSDGFANRNFMQLIHDDSLTFKEDIQKAQVSGQGDSLHEHIANLAGSPAIKKGILQTVKVVDELVKVMGRHKPENIVIEMARENQTTQKGQKNSRERMKRIEEGIKELGSQILKEHPVENTQLQNEKLYLYYLQNGRDMYVDQELDINRLSDYDVDHIVPQSFLKDDSIDNKVLTRSDKARGKSDNVPSEEVVKKMKNYWRQLLNAKLITQRKFDNLTKAERGGLSELDKAGFIKRQLVETRQITKHVAQILDSRMNTKYDENDKLIREVKVITLKSKLVSDFRKDFQFYKVREINNYHHAHDAYLNAVVGTALIKKYPKLESEFVYGDYKVYDVRKMIAKSEQEIGKATAKYFFYSNIMNFFKTEITLANGEIRKRPLIETNGETGEIVWDKGRDFATVRKVLSMPQVNIVKKTEVQTGGFSKESILPKRNSDKLIARKKDWDPKKYGGFDSPTVAYSVLVVAKVEKGKSKKLKSVKELLGITIMERSSFEKNPIDFLEAKGYKEVKKDLIIKLPKYSLFELENGRKRMLASAGELQKGNELALPSKYVNFLYLASHYEKLKGSPEDNEQKQLFVEQHKHYLDEIIEQISEFSKRVILADANLDKVLSAYNKHRDKPIREQAENIIHLFTLTNLGAPAAFKYFDTTIDRKRYTSTKEVLDATLIHQSITGLYETRIDLSQLGGDGGPAPGGGGGTVSLQDEHRLFDIPVTTSLPDVWLQDFPQAWAETGGLGRAKCQAPIIIDLKPTAVPVSIKQYPMSLEAHMGIRQHIIKFLELGVLRPCRSPWNTPLLPVKKPGTQDYRPVQDLREINKRTVDIHPTVPNPYNLLSTLKPDYSWYTVLDLKDAFFCLPLAPQSQELFAFEWKDPERGISGQLTWTRLPQGFKNSPTLFNEALHRDLTDFRTQHPEVTLLQYVDDLLLAAPTKKACTQGTRHLLQELGEKGYRASAKKAQICQTKVTYLGYILSEGKRWLTPGRIETVARIPPPRNPREVREFLGTAGFCRLWIPGFAELAAPLYALTKPSTPFTWQTEHQLAFEALKKALLSAPALGLPDTSKPFTLFLDERQGIAKGVLTQKLGPWKRPVAYLSKKLDPVAAGWPPCLRIMAATAMLVKDSAKLTLGQPLTVITPHTLEAIVRQPPDRWITNARLTHYQALLLDTDRVQFGPPVTLNPATLLPVPENQPSPHDCRQVLAETHGTREDLKDQELPDADHTWYTDGSSYLDSGTRRAGAAVVDGHNTIWAQSLPPGTSAQKAELIALTKALELSKGKKANIYTDSRYAFATAHTHGSIYERRGWLTSEGKEIKNKAEIIALLKALFLPQEVAIIHCPGHQKGQDPVAVGNRQADRVARQAAMAEVLTLATEPDNTSHITAGKRTADGSEFEKRTADGSEFESPKKKAKVE

SEQ ID NO: 1591 - protein, 2100 aa, synthetic construct
MPAAKRVKLDGGDKKYSIGLDIGTNSVGWAVITDEYKVPSKKFKVLGNTDRHSIKKNLIGALLFDSGETAEATRLKRTARRRYTRRKNRICYLQEIFSNEMAKVDDSFFHRLEESFLVEEDKKHERHPIFGNIVDEVAYHEKYPTIYHLRKKLVDSTDKADLRLIYLALAHMIKFRGHFLIEGDLNPDNSDVDKLFIQLVQTYNQLFEENPINASGVDAKAILSARLSKSRRLENLIAQLPGEKKNGLFGNLIALSLGLTPNFKSNFDLAEDAKLQLSKDTYDDDLDNLLAQIGDQYADLFLAAKNLSDAILLSDILRVNTEITKAPLSASMIKRYDEHHQDLTLLKALVRQQLPEKYKEIFFDQSKNGYAGYIDGGASQEEFYKFIKPILEKMDGTEELLVKLNREDLLRKQRTFDNGSIPHQIHLGELHAILRRQEDFYPFLKDNREKIEKILTFRIPYYVGPLARGNSRFAWMTRKSEETITPWNFEEVVDKGASAQSFIERMTNFDKNLPNEKVLPKHSLLYEYFTVYNELTKVKYVTEGMRKPAFLSGEQKKAIVDLLFKTNRKVTVKQLKEDYFKKIECFDSVEISGVEDRFNASLGTYHDLLKIIKDKDFLDNEENEDILEDIVLTLTLFEDREMIEERLKTYAHLFDDKVMKQLKRRRYTGWGRLSRKLINGIRDKQSGKTILDFLKSDGFANRNFMQLIHDDSLTFKEDIQKAQVSGQGDSLHEHIANLAGSPAIKKGILQTVKVVDELVKVMGRHKPENIVIEMARENQTTQKGQKNSRERMKRIEEGIKELGSQILKEHPVENTQLQNEKLYLYYLQNGRDMYVDQELDINRLSDYDVDHIVPQSFLKDDSIDNKVLTRSDKARGKSDNVPSEEVVKKMKNYWRQLLNAKLITQRKFDNLTKAERGGLSELDKAGFIKRQLVETRQITKHVAQILDSRMNTKYDENDKLIREVKVITLKSKLVSDFRKDFQFYKVREINNYHHAHDAYLNAVVGTALIKKYPKLESEFVYGDYKVYDVRKMIAKSEQEIGKATAKYFFYSNIMNFFKTEITLANGEIRKRPLIETNGETGEIVWDKGRDFATVRKVLSMPQVNIVKKTEVQTGGFSKESILPKRNSDKLIARKKDWDPKKYGGFDSPTVAYSVLVVAKVEKGKSKKLKSVKELLGITIMERSSFEKNPIDFLEAKGYKEVKKDLIIKLPKYSLFELENGRKRMLASAGELQKGNELALPSKYVNFLYLASHYEKLKGSPEDNEQKQLFVEQHKHYLDEIIEQISEFSKRVILADANLDKVLSAYNKHRDKPIREQAENIIHLFTLTNLGAPAAFKYFDTTIDRKRYTSTKEVLDATLIHQSITGLYETRIDLSQLGGDGGGGSPAPGSSGGTVSLQDEHRLFDIPVTTSLPDVWLQDFPQAWAETGGLGRAKCQAPIIIDLKPTAVPVSIKQYPMSLEAHMGIRQHIIKFLELGVLRPCRSPWNTPLLPVKKPGTQDYRPVQDLREINKRTVDIHPTVPNPYNLLSTLKPDYSWYTVLDLKDAFFCLPLAPQSQELFAFEWKDPERGISGQLTWTRLPQGFKNSPTLFNEALHRDLTDFRTQHPEVTLLQYVDDLLLAAPTKKACTQGTRHLLQELGEKGYRASAKKAQICQTKVTYLGYILSEGKRWLTPGRIETVARIPPPRNPREVREFLGTAGFCRLWIPGFAELAAPLYALTKPSTPFTWQTEHQLAFEALKKALLSAPALGLPDTSKPFTLFLDERQGIAKGVLTQKLGPWKRPVAYLSKKLDPVAAGWPPCLRIMAATAMLVKDSAKLTLGQPLTVITPHTLEAIVRQPPDRWITNARLTHYQALLLDTDRVQFGPPVTLNPATLLPVPENQPSPHDCRQVLAETHGTREDLKDQELPDADHTWYTDGSSYLDSGTRRAGAAVVDGHNTIWAQSLPPGTSAQKAELIALTKALELSKGKKANIYTDSRYAFATAHTHGSIYERRGWLTSEGKEIKNKAEIIALLKALFLPQEVAIIHCPGHQKGQDPVAVGNRQADRVARQAAMAEVLTLATEPDNTSHITAGKRTADGSEFEKRTADGSEFESPKKKAKVE

SEQ ID NO: 1592 - protein, 2097 aa, synthetic construct
MPAAKRVKLDGGDKKYSIGLDIGTNSVGWAVITDEYKVPSKKFKVLGNTDRHSIKKNLIGALLFDSGETAEATRLKRTARRRYTRRKNRICYLQEIFSNEMAKVDDSFFHRLEESFLVEEDKKHERHPIFGNIVDEVAYHEKYPTIYHLRKKLVDSTDKADLRLIYLALAHMIKFRGHFLIEGDLNPDNSDVDKLFIQLVQTYNQLFEENPINASGVDAKAILSARLSKSRRLENLIAQLPGEKKNGLFGNLIALSLGLTPNFKSNFDLAEDAKLQLSKDTYDDDLDNLLAQIGDQYADLFLAAKNLSDAILLSDILRVNTEITKAPLSASMIKRYDEHHQDLTLLKALVRQQLPEKYKEIFFDQSKNGYAGYIDGGASQEEFYKFIKPILEKMDGTEELLVKLNREDLLRKQRTFDNGSIPHQIHLGELHAILRRQEDFYPFLKDNREKIEKILTFRIPYYVGPLARGNSRFAWMTRKSEETITPWNFEEVVDKGASAQSFIERMTNFDKNLPNEKVLPKHSLLYEYFTVYNELTKVKYVTEGMRKPAFLSGEQKKAIVDLLFKTNRKVTVKQLKEDYFKKIECFDSVEISGVEDRFNASLGTYHDLLKIIKDKDFLDNEENEDILEDIVLTLTLFEDREMIEERLKTYAHLFDDKVMKQLKRRRYTGWGRLSRKLINGIRDKQSGKTILDFLKSDGFANRNFMQLIHDDSLTFKEDIQKAQVSGQGDSLHEHIANLAGSPAIKKGILQTVKVVDELVKVMGRHKPENIVIEMARENQTTQKGQKNSRERMKRIEEGIKELGSQILKEHPVENTQLQNEKLYLYYLQNGRDMYVDQELDINRLSDYDVDHIVPQSFLKDDSIDNKVLTRSDKARGKSDNVPSEEVVKKMKNYWRQLLNAKLITQRKFDNLTKAERGGLSELDKAGFIKRQLVETRQITKHVAQILDSRMNTKYDENDKLIREVKVITLKSKLVSDFRKDFQFYKVREINNYHHAHDAYLNAVVGTALIKKYPKLESEFVYGDYKVYDVRKMIAKSEQEIGKATAKYFFYSNIMNFFKTEITLANGEIRKRPLIETNGETGEIVWDKGRDFATVRKVLSMPQVNIVKKTEVQTGGFSKESILPKRNSDKLIARKKDWDPKKYGGFDSPTVAYSVLVVAKVEKGKSKKLKSVKELLGITIMERSSFEKNPIDFLEAKGYKEVKKDLIIKLPKYSLFELENGRKRMLASAGELQKGNELALPSKYVNFLYLASHYEKLKGSPEDNEQKQLFVEQHKHYLDEIIEQISEFSKRVILADANLDKVLSAYNKHRDKPIREQAENIIHLFTLTNLGAPAAFKYFDTTIDRKRYTSTKEVLDATLIHQSITGLYETRIDLSQLGGDGGGSSPAPGGTVSLQDEHRLFDIPVTTSLPDVWLQDFPQAWAETGGLGRAKCQAPIIIDLKPTAVPVSIKQYPMSLEAHMGIRQHIIKFLELGVLRPCRSPWNTPLLPVKKPGTQDYRPVQDLREINKRTVDIHPTVPNPYNLLSTLKPDYSWYTVLDLKDAFFCLPLAPQSQELFAFEWKDPERGISGQLTWTRLPQGFKNSPTLFNEALHRDLTDFRTQHPEVTLLQYVDDLLLAAPTKKACTQGTRHLLQELGEKGYRASAKKAQICQTKVTYLGYILSEGKRWLTPGRIETVARIPPPRNPREVREFLGTAGFCRLWIPGFAELAAPLYALTKPSTPFTWQTEHQLAFEALKKALLSAPALGLPDTSKPFTLFLDERQGIAKGVLTQKLGPWKRPVAYLSKKLDPVAAGWPPCLRIMAATAMLVKDSAKLTLGQPLTVITPHTLEAIVRQPPDRWITNARLTHYQALLLDTDRVQFGPPVTLNPATLLPVPENQPSPHDCRQVLAETHGTREDLKDQELPDADHTWYTDGSSYLDSGTRRAGAAVVDGHNTIWAQSLPPGTSAQKAELIALTKALELSKGKKANIYTDSRYAFATAHTHGSIYERRGWLTSEGKEIKNKAEIIALLKALFLPQEVAIIHCPGHQKGQDPVAVGNRQADRVARQAAMAEVLTLATEPDNTSHITAGKRTADGSEFEKRTADGSEFESPKKKAKVE

SEQ ID NO: 1593 - protein, 2102 aa, synthetic construct
MPAAKRVKLDGGDKKYSIGLDIGTNSVGWAVITDEYKVPSKKFKVLGNTDRHSIKKNLIGALLFDSGETAEATRLKRTARRRYTRRKNRICYLQEIFSNEMAKVDDSFFHRLEESFLVEEDKKHERHPIFGNIVDEVAYHEKYPTIYHLRKKLVDSTDKADLRLIYLALAHMIKFRGHFLIEGDLNPDNSDVDKLFIQLVQTYNQLFEENPINASGVDAKAILSARLSKSRRLENLIAQLPGEKKNGLFGNLIALSLGLTPNFKSNFDLAEDAKLQLSKDTYDDDLDNLLAQIGDQYADLFLAAKNLSDAILLSDILRVNTEITKAPLSASMIKRYDEHHQDLTLLKALVRQQLPEKYKEIFFDQSKNGYAGYIDGGASQEEFYKFIKPILEKMDGTEELLVKLNREDLLRKQRTFDNGSIPHQIHLGELHAILRRQEDFYPFLKDNREKIEKILTFRIPYYVGPLARGNSRFAWMTRKSEETITPWNFEEVVDKGASAQSFIERMTNFDKNLPNEKVLPKHSLLYEYFTVYNELTKVKYVTEGMRKPAFLSGEQKKAIVDLLFKTNRKVTVKQLKEDYFKKIECFDSVEISGVEDRFNASLGTYHDLLKIIKDKDFLDNEENEDILEDIVLTLTLFEDREMIEERLKTYAHLFDDKVMKQLKRRRYTGWGRLSRKLINGIRDKQSGKTILDFLKSDGFANRNFMQLIHDDSLTFKEDIQKAQVSGQGDSLHEHIANLAGSPAIKKGILQTVKVVDELVKVMGRHKPENIVIEMARENQTTQKGQKNSRERMKRIEEGIKELGSQILKEHPVENTQLQNEKLYLYYLQNGRDMYVDQELDINRLSDYDVDHIVPQSFLKDDSIDNKVLTRSDKARGKSDNVPSEEVVKKMKNYWRQLLNAKLITQRKFDNLTKAERGGLSELDKAGFIKRQLVETRQITKHVAQILDSRMNTKYDENDKLIREVKVITLKSKLVSDFRKDFQFYKVREINNYHHAHDAYLNAVVGTALIKKYPKLESEFVYGDYKVYDVRKMIAKSEQEIGKATAKYFFYSNIMNFFKTEITLANGEIRKRPLIETNGETGEIVWDKGRDFATVRKVLSMPQVNIVKKTEVQTGGFSKESILPKRNSDKLIARKKDWDPKKYGGFDSPTVAYSVLVVAKVEKGKSKKLKSVKELLGITIMERSSFEKNPIDFLEAKGYKEVKKDLIIKLPKYSLFELENGRKRMLASAGELQKGNELALPSKYVNFLYLASHYEKLKGSPEDNEQKQLFVEQHKHYLDEIIEQISEFSKRVILADANLDKVLSAYNKHRDKPIREQAENIIHLFTLTNLGAPAAFKYFDTTIDRKRYTSTKEVLDATLIHQSITGLYETRIDLSQLGGDGGEAAAKGGGGSSGGTVSLQDEHRLFDIPVTTSLPDVWLQDFPQAWAETGGLGRAKCQAPIIIDLKPTAVPVSIKQYPMSLEAHMGIRQHIIKFLELGVLRPCRSPWNTPLLPVKKPGTQDYRPVQDLREINKRTVDIHPTVPNPYNLLSTLKPDYSWYTVLDLKDAFFCLPLAPQSQELFAFEWKDPERGISGQLTWTRLPQGFKNSPTLFNEALHRDLTDFRTQHPEVTLLQYVDDLLLAAPTKKACTQGTRHLLQELGEKGYRASAKKAQICQTKVTYLGYILSEGKRWLTPGRIETVARIPPPRNPREVREFLGTAGFCRLWIPGFAELAAPLYALTKPSTPFTWQTEHQLAFEALKKALLSAPALGLPDTSKPFTLFLDERQGIAKGVLTQKLGPWKRPVAYLSKKLDPVAAGWPPCLRIMAATAMLVKDSAKLTLGQPLTVITPHTLEAIVRQPPDRWITNARLTHYQALLLDTDRVQFGPPVTLNPATLLPVPENQPSPHDCRQVLAETHGTREDLKDQELPDADHTWYTDGSSYLDSGTRRAGAAVVDGHNTIWAQSLPPGTSAQKAELIALTKALELSKGKKANIYTDSRYAFATAHTHGSIYERRGWLTSEGKEIKNKAEIIALLKALFLPQEVAIIHCPGHQKGQDPVAVGNRQADRVARQAAMAEVLTLATEPDNTSHITAGKRTADGSEFEKRTADGSEFESPKKKAKVE

SEQ ID NO: 1594 - protein, 2103 aa, synthetic construct
MPAAKRVKLDGGDKKYSIGLDIGTNSVGWAVITDEYKVPSKKFKVLGNTDRHSIKKNLIGALLFDSGETAEATRLKRTARRRYTRRKNRICYLQEIFSNEMAKVDDSFFHRLEESFLVEEDKKHERHPIFGNIVDEVAYHEKYPTIYHLRKKLVDSTDKADLRLIYLALAHMIKFRGHFLIEGDLNPDNSDVDKLFIQLVQTYNQLFEENPINASGVDAKAILSARLSKSRRLENLIAQLPGEKKNGLFGNLIALSLGLTPNFKSNFDLAEDAKLQLSKDTYDDDLDNLLAQIGDQYADLFLAAKNLSDAILLSDILRVNTEITKAPLSASMIKRYDEHHQDLTLLKALVRQQLPEKYKEIFFDQSKNGYAGYIDGGASQEEFYKFIKPILEKMDGTEELLVKLNREDLLRKQRTFDNGSIPHQIHLGELHAILRRQEDFYPFLKDNREKIEKILTFRIPYYVGPLARGNSRFAWMTRKSEETITPWNFEEVVDKGASAQSFIERMTNFDKNLPNEKVLPKHSLLYEYFTVYNELTKVKYVTEGMRKPAFLSGEQKKAIVDLLFKTNRKVTVKQLKEDYFKKIECFDSVEISGVEDRFNASLGTYHDLLKIIKDKDFLDNEENEDILEDIVLTLTLFEDREMIEERLKTYAHLFDDKVMKQLKRRRYTGWGRLSRKLINGIRDKQSGKTILDFLKSDGFANRNFMQLIHDDSLTFKEDIQKAQVSGQGDSLHEHIANLAGSPAIKKGILQTVKVVDELVKVMGRHKPENIVIEMARENQTTQKGQKNSRERMKRIEEGIKELGSQILKEHPVENTQLQNEKLYLYYLQNGRDMYVDQELDINRLSDYDVDHIVPQSFLKDDSIDNKVLTRSDKARGKSDNVPSEEVVKKMKNYWRQLLNAKLITQRKFDNLTKAERGGLSELDKAGFIKRQLVETRQITKHVAQILDSRMNTKYDENDKLIREVKVITLKSKLVSDFRKDFQFYKVREINNYHHAHDAYLNAVVGTALIKKYPKLESEFVYGDYKVYDVRKMIAKSEQEIGKATAKYFFYSNIMNFFKTEITLANGEIRKRPLIETNGETGEIVWDKGRDFATVRKVLSMPQVNIVKKTEVQTGGFSKESILPKRNSDKLIARKKDWDPKKYGGFDSPTVAYSVLVVAKVEKGKSKKLKSVKELLGITIMERSSFEKNPIDFLEAKGYKEVKKDLIIKLPKYSLFELENGRKRMLASAGELQKGNELALPSKYVNFLYLASHYEKLKGSPEDNEQKQLFVEQHKHYLDEIIEQISEFSKRVILADANLDKVLSAYNKHRDKPIREQAENIIHLFTLTNLGAPAAFKYFDTTIDRKRYTSTKEVLDATLIHQSITGLYETRIDLSQLGGDGGGSAGSAAGSGEFGGTVSLQDEHRLFDIPVTTSLPDVWLQDFPQAWAETGGLGRAKCQAPIIIDLKPTAVPVSIKQYPMSLEAHMGIRQHIIKFLELGVLRPCRSPWNTPLLPVKKPGTQDYRPVQDLREINKRTVDIHPTVPNPYNLLSTLKPDYSWYTVLDLKDAFFCLPLAPQSQELFAFEWKDPERGISGQLTWTRLPQGFKNSPTLFNEALHRDLTDFRTQHPEVTLLQYVDDLLLAAPTKKACTQGTRHLLQELGEKGYRASAKKAQICQTKVTYLGYILSEGKRWLTPGRIETVARIPPPRNPREVREFLGTAGFCRLWIPGFAELAAPLYALTKPSTPFTWQTEHQLAFEALKKALLSAPALGLPDTSKPFTLFLDERQGIAKGVLTQKLGPWKRPVAYLSKKLDPVAAGWPPCLRIMAATAMLVKDSAKLTLGQPLTVITPHTLEAIVRQPPDRWITNARLTHYQALLLDTDRVQFGPPVTLNPATLLPVPENQPSPHDCRQVLAETHGTREDLKDQELPDADHTWYTDGSSYLDSGTRRAGAAVVDGHNTIWAQSLPPGTSAQKAELIALTKALELSKGKKANIYTDSRYAFATAHTHGSIYERRGWLTSEGKEIKNKAEIIALLKALFLPQEVAIIHCPGHQKGQDPVAVGNRQADRVARQAAMAEVLTLATEPDNTSHITAGKRTADGSEFEKRTADGSEFESPKKKAKVE

SEQ ID NO: 1595 - protein, 2100 aa, synthetic construct
MPAAKRVKLDGGDKKYSIGLDIGTNSVGWAVITDEYKVPSKKFKVLGNTDRHSIKKNLIGALLFDSGETAEATRLKRTARRRYTRRKNRICYLQEIFSNEMAKVDDSFFHRLEESFLVEEDKKHERHPIFGNIVDEVAYHEKYPTIYHLRKKLVDSTDKADLRLIYLALAHMIKFRGHFLIEGDLNPDNSDVDKLFIQLVQTYNQLFEENPINASGVDAKAILSARLSKSRRLENLIAQLPGEKKNGLFGNLIALSLGLTPNFKSNFDLAEDAKLQLSKDTYDDDLDNLLAQIGDQYADLFLAAKNLSDAILLSDILRVNTEITKAPLSASMIKRYDEHHQDLTLLKALVRQQLPEKYKEIFFDQSKNGYAGYIDGGASQEEFYKFIKPILEKMDGTEELLVKLNREDLLRKQRTFDNGSIPHQIHLGELHAILRRQEDFYPFLKDNREKIEKILTFRIPYYVGPLARGNSRFAWMTRKSEETITPWNFEEVVDKGASAQSFIERMTNFDKNLPNEKVLPKHSLLYEYFTVYNELTKVKYVTEGMRKPAFLSGEQKKAIVDLLFKTNRKVTVKQLKEDYFKKIECFDSVEISGVEDRFNASLGTYHDLLKIIKDKDFLDNEENEDILEDIVLTLTLFEDREMIEERLKTYAHLFDDKVMKQLKRRRYTGWGRLSRKLINGIRDKQSGKTILDFLKSDGFANRNFMQLIHDDSLTFKEDIQKAQVSGQGDSLHEHIANLAGSPAIKKGILQTVKVVDELVKVMGRHKPENIVIEMARENQTTQKGQKNSRERMKRIEEGIKELGSQILKEHPVENTQLQNEKLYLYYLQNGRDMYVDQELDINRLSDYDVDHIVPQSFLKDDSIDNKVLTRSDKARGKSDNVPSEEVVKKMKNYWRQLLNAKLITQRKFDNLTKAERGGLSELDKAGFIKRQLVETRQITKHVAQILDSRMNTKYDENDKLIREVKVITLKSKLVSDFRKDFQFYKVREINNYHHAHDAYLNAVVGTALIKKYPKLESEFVYGDYKVYDVRKMIAKSEQEIGKATAKYFFYSNIMNFFKTEITLANGEIRKRPLIETNGETGEIVWDKGRDFATVRKVLSMPQVNIVKKTEVQTGGFSKESILPKRNSDKLIARKKDWDPKKYGGFDSPTVAYSVLVVAKVEKGKSKKLKSVKELLGITIMERSSFEKNPIDFLEAKGYKEVKKDLIIKLPKYSLFELENGRKRMLASAGELQKGNELALPSKYVNFLYLASHYEKLKGSPEDNEQKQLFVEQHKHYLDEIIEQISEFSKRVILADANLDKVLSAYNKHRDKPIREQAENIIHLFTLTNLGAPAAFKYFDTTIDRKRYTSTKEVLDATLIHQSITGLYETRIDLSQLGGDGGGGGPAPGGSGGTVSLQDEHRLFDIPVTTSLPDVWLQDFPQAWAETGGLGRAKCQAPIIIDLKPTAVPVSIKQYPMSLEAHMGIRQHIIKFLELGVLRPCRSPWNTPLLPVKKPGTQDYRPVQDLREINKRTVDIHPTVPNPYNLLSTLKPDYSWYTVLDLKDAFFCLPLAPQSQELFAFEWKDPERGISGQLTWTRLPQGFKNSPTLFNEALHRDLTDFRTQHPEVTLLQYVDDLLLAAPTKKACTQGTRHLLQELGEKGYRASAKKAQICQTKVTYLGYILSEGKRWLTPGRIETVARIPPPRNPREVREFLGTAGFCRLWIPGFAELAAPLYALTKPSTPFTWQTEHQLAFEALKKALLSAPALGLPDTSKPFTLFLDERQGIAKGVLTQKLGPWKRPVAYLSKKLDPVAAGWPPCLRIMAATAMLVKDSAKLTLGQPLTVITPHTLEAIVRQPPDRWITNARLTHYQALLLDTDRVQFGPPVTLNPATLLPVPENQPSPHDCRQVLAETHGTREDLKDQELPDADHTWYTDGSSYLDSGTRRAGAAVVDGHNTIWAQSLPPGTSAQKAELIALTKALELSKGKKANIYTDSRYAFATAHTHGSIYERRGWLTSEGKEIKNKAEIIALLKALFLPQEVAIIHCPGHQKGQDPVAVGNRQADRVARQAAMAEVLTLATEPDNTSHITAGKRTADGSEFEKRTADGSEFESPKKKAKVE

SEQ ID NO: 1596 - protein, 2102 aa, synthetic construct
MPAAKRVKLDGGDKKYSIGLDIGTNSVGWAVITDEYKVPSKKFKVLGNTDRHSIKKNLIGALLFDSGETAEATRLKRTARRRYTRRKNRICYLQEIFSNEMAKVDDSFFHRLEESFLVEEDKKHERHPIFGNIVDEVAYHEKYPTIYHLRKKLVDSTDKADLRLIYLALAHMIKFRGHFLIEGDLNPDNSDVDKLFIQLVQTYNQLFEENPINASGVDAKAILSARLSKSRRLENLIAQLPGEKKNGLFGNLIALSLGLTPNFKSNFDLAEDAKLQLSKDTYDDDLDNLLAQIGDQYADLFLAAKNLSDAILLSDILRVNTEITKAPLSASMIKRYDEHHQDLTLLKALVRQQLPEKYKEIFFDQSKNGYAGYIDGGASQEEFYKFIKPILEKMDGTEELLVKLNREDLLRKQRTFDNGSIPHQIHLGELHAILRRQEDFYPFLKDNREKIEKILTFRIPYYVGPLARGNSRFAWMTRKSEETITPWNFEEVVDKGASAQSFIERMTNFDKNLPNEKVLPKHSLLYEYFTVYNELTKVKYVTEGMRKPAFLSGEQKKAIVDLLFKTNRKVTVKQLKEDYFKKIECFDSVEISGVEDRFNASLGTYHDLLKIIKDKDFLDNEENEDILEDIVLTLTLFEDREMIEERLKTYAHLFDDKVMKQLKRRRYTGWGRLSRKLINGIRDKQSGKTILDFLKSDGFANRNFMQLIHDDSLTFKEDIQKAQVSGQGDSLHEHIANLAGSPAIKKGILQTVKVVDELVKVMGRHKPENIVIEMARENQTTQKGQKNSRERMKRIEEGIKELGSQILKEHPVENTQLQNEKLYLYYLQNGRDMYVDQELDINRLSDYDVDHIVPQSFLKDDSIDNKVLTRSDKARGKSDNVPSEEVVKKMKNYWRQLLNAKLITQRKFDNLTKAERGGLSELDKAGFIKRQLVETRQITKHVAQILDSRMNTKYDENDKLIREVKVITLKSKLVSDFRKDFQFYKVREINNYHHAHDAYLNAVVGTALIKKYPKLESEFVYGDYKVYDVRKMIAKSEQEIGKATAKYFFYSNIMNFFKTEITLANGEIRKRPLIETNGETGEIVWDKGRDFATVRKVLSMPQVNIVKKTEVQTGGFSKESILPKRNSDKLIARKKDWDPKKYGGFDSPTVAYSVLVVAKVEKGKSKKLKSVKELLGITIMERSSFEKNPIDFLEAKGYKEVKKDLIIKLPKYSLFELENGRKRMLASAGELQKGNELALPSKYVNFLYLASHYEKLKGSPEDNEQKQLFVEQHKHYLDEIIEQISEFSKRVILADANLDKVLSAYNKHRDKPIREQAENIIHLFTLTNLGAPAAFKYFDTTIDRKRYTSTKEVLDATLIHQSITGLYETRIDLSQLGGDGGGSSPAPEAAAKGGTVSLQDEHRLFDIPVTTSLPDVWLQDFPQAWAETGGLGRAKCQAPIIIDLKPTAVPVSIKQYPMSLEAHMGIRQHIIKFLELGVLRPCRSPWNTPLLPVKKPGTQDYRPVQDLREINKRTVDIHPTVPNPYNLLSTLKPDYSWYTVLDLKDAFFCLPLAPQSQELFAFEWKDPERGISGQLTWTRLPQGFKNSPTLFNEALHRDLTDFRTQHPEVTLLQYVDDLLLAAPTKKACTQGTRHLLQELGEKGYRASAKKAQICQTKVTYLGYILSEGKRWLTPGRIETVARIPPPRNPREVREFLGTAGFCRLWIPGFAELAAPLYALTKPSTPFTWQTEHQLAFEALKKALLSAPALGLPDTSKPFTLFLDERQGIAKGVLTQKLGPWKRPVAYLSKKLDPVAAGWPPCLRIMAATAMLVKDSAKLTLGQPLTVITPHTLEAIVRQPPDRWITNARLTHYQALLLDTDRVQFGPPVTLNPATLLPVPENQPSPHDCRQVLAETHGTREDLKDQELPDADHTWYTDGSSYLDSGTRRAGAAVVDGHNTIWAQSLPPGTSAQKAELIALTKALELSKGKKANIYTDSRYAFATAHTHGSIYERRGWLTSEGKEIKNKAEIIALLKALFLPQEVAIIHCPGHQKGQDPVAVGNRQADRVARQAAMAEVLTLATEPDNTSHITAGKRTADGSEFEKRTADGSEFESPKKKAKVE

SEQ ID NO: 1597 - protein, 2101 aa, synthetic construct
MPAAKRVKLDGGDKKYSIGLDIGTNSVGWAVITDEYKVPSKKFKVLGNTDRHSIKKNLIGALLFDSGETAEATRLKRTARRRYTRRKNRICYLQEIFSNEMAKVDDSFFHRLEESFLVEEDKKHERHPIFGNIVDEVAYHEKYPTIYHLRKKLVDSTDKADLRLIYLALAHMIKFRGHFLIEGDLNPDNSDVDKLFIQLVQTYNQLFEENPINASGVDAKAILSARLSKSRRLENLIAQLPGEKKNGLFGNLIALSLGLTPNFKSNFDLAEDAKLQLSKDTYDDDLDNLLAQIGDQYADLFLAAKNLSDAILLSDILRVNTEITKAPLSASMIKRYDEHHQDLTLLKALVRQQLPEKYKEIFFDQSKNGYAGYIDGGASQEEFYKFIKPILEKMDGTEELLVKLNREDLLRKQRTFDNGSIPHQIHLGELHAILRRQEDFYPFLKDNREKIEKILTFRIPYYVGPLARGNSRFAWMTRKSEETITPWNFEEVVDKGASAQSFIERMTNFDKNLPNEKVLPKHSLLYEYFTVYNELTKVKYVTEGMRKPAFLSGEQKKAIVDLLFKTNRKVTVKQLKEDYFKKIECFDSVEISGVEDRFNASLGTYHDLLKIIKDKDFLDNEENEDILEDIVLTLTLFEDREMIEERLKTYAHLFDDKVMKQLKRRRYTGWGRLSRKLINGIRDKQSGKTILDFLKSDGFANRNFMQLIHDDSLTFKEDIQKAQVSGQGDSLHEHIANLAGSPAIKKGILQTVKVVDELVKVMGRHKPENIVIEMARENQTTQKGQKNSRERMKRIEEGIKELGSQILKEHPVENTQLQNEKLYLYYLQNGRDMYVDQELDINRLSDYDVDHIVPQSFLKDDSIDNKVLTRSDKARGKSDNVPSEEVVKKMKNYWRQLLNAKLITQRKFDNLTKAERGGLSELDKAGFIKRQLVETRQITKHVAQILDSRMNTKYDENDKLIREVKVITLKSKLVSDFRKDFQFYKVREINNYHHAHDAYLNAVVGTALIKKYPKLESEFVYGDYKVYDVRKMIAKSEQEIGKATAKYFFYSNIMNFFKTEITLANGEIRKRPLIETNGETGEIVWDKGRDFATVRKVLSMPQVNIVKKTEVQTGGFSKESILPKRNSDKLIARKKDWDPKKYGGFDSPTVAYSVLVVAKVEKGKSKKLKSVKELLGITIMERSSFEKNPIDFLEAKGYKEVKKDLIIKLPKYSLFELENGRKRMLASAGELQKGNELALPSKYVNFLYLASHYEKLKGSPEDNEQKQLFVEQHKHYLDEIIEQISEFSKRVILADANLDKVLSAYNKHRDKPIREQAENIIHLFTLTNLGAPAAFKYFDTTIDRKRYTSTKEVLDATLIHQSITGLYETRIDLSQLGGDGGGGGGSGGGGSGGTVSLQDEHRLFDIPVTTSLPDVWLQDFPQAWAETGGLGRAKCQAPIIIDLKPTAVPVSIKQYPMSLEAHMGIRQHIIKFLELGVLRPCRSPWNTPLLPVKKPGTQDYRPVQDLREINKRTVDIHPTVPNPYNLLSTLKPDYSWYTVLDLKDAFFCLPLAPQSQELFAFEWKDPERGISGQLTWTRLPQGFKNSPTLFNEALHRDLTDFRTQHPEVTLLQYVDDLLLAAPTKKACTQGTRHLLQELGEKGYRASAKKAQICQTKVTYLGYILSEGKRWLTPGRIETVARIPPPRNPREVREFLGTAGFCRLWIPGFAELAAPLYALTKPSTPFTWQTEHQLAFEALKKALLSAPALGLPDTSKPFTLFLDERQGIAKGVLTQKLGPWKRPVAYLSKKLDPVAAGWPPCLRIMAATAMLVKDSAKLTLGQPLTVITPHTLEAIVRQPPDRWITNARLTHYQALLLDTDRVQFGPPVTLNPATLLPVPENQPSPHDCRQVLAETHGTREDLKDQELPDADHTWYTDGSSYLDSGTRRAGAAVVDGHNTIWAQSLPPGTSAQKAELIALTKALELSKGKKANIYTDSRYAFATAHTHGSIYERRGWLTSEGKEIKNKAEIIALLKALFLPQEVAIIHCPGHQKGQDPVAVGNRQADRVARQAAMAEVLTLATEPDNTSHITAGKRTADGSEFEKRTADGSEFESPKKKAKVE

SEQ ID NO: 1598 - protein, 2102 aa, synthetic construct
MPAAKRVKLDGGDKKYSIGLDIGTNSVGWAVITDEYKVPSKKFKVLGNTDRHSIKKNLIGALLFDSGETAEATRLKRTARRRYTRRKNRICYLQEIFSNEMAKVDDSFFHRLEESFLVEEDKKHERHPIFGNIVDEVAYHEKYPTIYHLRKKLVDSTDKADLRLIYLALAHMIKFRGHFLIEGDLNPDNSDVDKLFIQLVQTYNQLFEENPINASGVDAKAILSARLSKSRRLENLIAQLPGEKKNGLFGNLIALSLGLTPNFKSNFDLAEDAKLQLSKDTYDDDLDNLLAQIGDQYADLFLAAKNLSDAILLSDILRVNTEITKAPLSASMIKRYDEHHQDLTLLKALVRQQLPEKYKEIFFDQSKNGYAGYIDGGASQEEFYKFIKPILEKMDGTEELLVKLNREDLLRKQRTFDNGSIPHQIHLGELHAILRRQEDFYPFLKDNREKIEKILTFRIPYYVGPLARGNSRFAWMTRKSEETITPWNFEEVVDKGASAQSFIERMTNFDKNLPNEKVLPKHSLLYEYFTVYNELTKVKYVTEGMRKPAFLSGEQKKAIVDLLFKTNRKVTVKQLKEDYFKKIECFDSVEISGVEDRFNASLGTYHDLLKIIKDKDFLDNEENEDILEDIVLTLTLFEDREMIEERLKTYAHLFDDKVMKQLKRRRYTGWGRLSRKLINGIRDKQSGKTILDFLKSDGFANRNFMQLIHDDSLTFKEDIQKAQVSGQGDSLHEHIANLAGSPAIKKGILQTVKVVDELVKVMGRHKPENIVIEMARENQTTQKGQKNSRERMKRIEEGIKELGSQILKEHPVENTQLQNEKLYLYYLQNGRDMYVDQELDINRLSDYDVDHIVPQSFLKDDSIDNKVLTRSDKARGKSDNVPSEEVVKKMKNYWRQLLNAKLITQRKFDNLTKAERGGLSELDKAGFIKRQLVETRQITKHVAQILDSRMNTKYDENDKLIREVKVITLKSKLVSDFRKDFQFYKVREINNYHHAHDAYLNAVVGTALIKKYPKLESEFVYGDYKVYDVRKMIAKSEQEIGKATAKYFFYSNIMNFFKTEITLANGEIRKRPLIETNGETGEIVWDKGRDFATVRKVLSMPQVNIVKKTEVQTGGFSKESILPKRNSDKLIARKKDWDPKKYGGFDSPTVAYSVLVVAKVEKGKSKKLKSVKELLGITIMERSSFEKNPIDFLEAKGYKEVKKDLIIKLPKYSLFELENGRKRMLASAGELQKGNELALPSKYVNFLYLASHYEKLKGSPEDNEQKQLFVEQHKHYLDEIIEQISEFSKRVILADANLDKVLSAYNKHRDKPIREQAENIIHLFTLTNLGAPAAFKYFDTTIDRKRYTSTKEVLDATLIHQSITGLYETRIDLSQLGGDGGGGSPAPEAAAKGGTVSLQDEHRLFDIPVTTSLPDVWLQDFPQAWAETGGLGRAKCQAPIIIDLKPTAVPVSIKQYPMSLEAHMGIRQHIIKFLELGVLRPCRSPWNTPLLPVKKPGTQDYRPVQDLREINKRTVDIHPTVPNPYNLLSTLKPDYSWYTVLDLKDAFFCLPLAPQSQELFAFEWKDPERGISGQLTWTRLPQGFKNSPTLFNEALHRDLTDFRTQHPEVTLLQYVDDLLLAAPTKKACTQGTRHLLQELGEKGYRASAKKAQICQTKVTYLGYILSEGKRWLTPGRIETVARIPPPRNPREVREFLGTAGFCRLWIPGFAELAAPLYALTKPSTPFTWQTEHQLAFEALKKALLSAPALGLPDTSKPFTLFLDERQGIAKGVLTQKLGPWKRPVAYLSKKLDPVAAGWPPCLRIMAATAMLVKDSAKLTLGQPLTVITPHTLEAIVRQPPDRWITNARLTHYQALLLDTDRVQFGPPVTLNPATLLPVPENQPSPHDCRQVLAETHGTREDLKDQELPDADHTWYTDGSSYLDSGTRRAGAAVVDGHNTIWAQSLPPGTSAQKAELIALTKALELSKGKKANIYTDSRYAFATAHTHGSIYERRGWLTSEGKEIKNKAEIIALLKALFLPQEVAIIHCPGHQKGQDPVAVGNRQADRVARQAAMAEVLTLATEPDNTSHITAGKRTADGSEFEKRTADGSEFESPKKKAKVE

SEQ ID NO: 1599 - protein, 2100 aa, synthetic construct
MPAAKRVKLDGGDKKYSIGLDIGTNSVGWAVITDEYKVPSKKFKVLGNTDRHSIKKNLIGALLFDSGETAEATRLKRTARRRYTRRKNRICYLQEIFSNEMAKVDDSFFHRLEESFLVEEDKKHERHPIFGNIVDEVAYHEKYPTIYHLRKKLVDSTDKADLRLIYLALAHMIKFRGHFLIEGDLNPDNSDVDKLFIQLVQTYNQLFEENPINASGVDAKAILSARLSKSRRLENLIAQLPGEKKNGLFGNLIALSLGLTPNFKSNFDLAEDAKLQLSKDTYDDDLDNLLAQIGDQYADLFLAAKNLSDAILLSDILRVNTEITKAPLSASMIKRYDEHHQDLTLLKALVRQQLPEKYKEIFFDQSKNGYAGYIDGGASQEEFYKFIKPILEKMDGTEELLVKLNREDLLRKQRTFDNGSIPHQIHLGELHAILRRQEDFYPFLKDNREKIEKILTFRIPYYVGPLARGNSRFAWMTRKSEETITPWNFEEVVDKGASAQSFIERMTNFDKNLPNEKVLPKHSLLYEYFTVYNELTKVKYVTEGMRKPAFLSGEQKKAIVDLLFKTNRKVTVKQLKEDYFKKIECFDSVEISGVEDRFNASLGTYHDLLKIIKDKDFLDNEENEDILEDIVLTLTLFEDREMIEERLKTYAHLFDDKVMKQLKRRRYTGWGRLSRKLINGIRDKQSGKTILDFLKSDGFANRNFMQLIHDDSLTFKEDIQKAQVSGQGDSLHEHIANLAGSPAIKKGILQTVKVVDELVKVMGRHKPENIVIEMARENQTTQKGQKNSRERMKRIEEGIKELGSQILKEHPVENTQLQNEKLYLYYLQNGRDMYVDQELDINRLSDYDVDHIVPQSFLKDDSIDNKVLTRSDKARGKSDNVPSEEVVKKMKNYWRQLLNAKLITQRKFDNLTKAERGGLSELDKAGFIKRQLVETRQITKHVAQILDSRMNTKYDENDKLIREVKVITLKSKLVSDFRKDFQFYKVREINNYHHAHDAYLNAVVGTALIKKYPKLESEFVYGDYKVYDVRKMIAKSEQEIGKATAKYFFYSNIMNFFKTEITLANGEIRKRPLIETNGETGEIVWDKGRDFATVRKVLSMPQVNIVKKTEVQTGGFSKESILPKRNSDKLIARKKDWDPKKYGGFDSPTVAYSVLVVAKVEKGKSKKLKSVKELLGITIMERSSFEKNPIDFLEAKGYKEVKKDLIIKLPKYSLFELENGRKRMLASAGELQKGNELALPSKYVNFLYLASHYEKLKGSPEDNEQKQLFVEQHKHYLDEIIEQISEFSKRVILADANLDKVLSAYNKHRDKPIREQAENIIHLFTLTNLGAPAAFKYFDTTIDRKRYTSTKEVLDATLIHQSITGLYETRIDLSQLGGDGGPAPGGSGSSGGTVSLQDEHRLFDIPVTTSLPDVWLQDFPQAWAETGGLGRAKCQAPIIIDLKPTAVPVSIKQYPMSLEAHMGIRQHIIKFLELGVLRPCRSPWNTPLLPVKKPGTQDYRPVQDLREINKRTVDIHPTVPNPYNLLSTLKPDYSWYTVLDLKDAFFCLPLAPQSQELFAFEWKDPERGISGQLTWTRLPQGFKNSPTLFNEALHRDLTDFRTQHPEVTLLQYVDDLLLAAPTKKACTQGTRHLLQELGEKGYRASAKKAQICQTKVTYLGYILSEGKRWLTPGRIETVARIPPPRNPREVREFLGTAGFCRLWIPGFAELAAPLYALTKPSTPFTWQTEHQLAFEALKKALLSAPALGLPDTSKPFTLFLDERQGIAKGVLTQKLGPWKRPVAYLSKKLDPVAAGWPPCLRIMAATAMLVKDSAKLTLGQPLTVITPHTLEAIVRQPPDRWITNARLTHYQALLLDTDRVQFGPPVTLNPATLLPVPENQPSPHDCRQVLAETHGTREDLKDQELPDADHTWYTDGSSYLDSGTRRAGAAVVDGHNTIWAQSLPPGTSAQKAELIALTKALELSKGKKANIYTDSRYAFATAHTHGSIYERRGWLTSEGKEIKNKAEIIALLKALFLPQEVAIIHCPGHQKGQDPVAVGNRQADRVARQAAMAEVLTLATEPDNTSHITAGKRTADGSEFEKRTADGSEFESPKKKAKVE

SEQ ID NO: 1600 - protein, 2006 aa, synthetic construct
MPAAKRVKLDGGDKKYSIGLDIGTNSVGWAVITDEYKVPSKKFKVLGNTDRHSIKKNLIGALLFDSGETAEATRLKRTARRRYTRRKNRICYLQEIFSNEMAKVDDSFFHRLEESFLVEEDKKHERHPIFGNIVDEVAYHEKYPTIYHLRKKLVDSTDKADLRLIYLALAHMIKFRGHFLIEGDLNPDNSDVDKLFIQLVQTYNQLFEENPINASGVDAKAILSARLSKSRRLENLIAQLPGEKKNGLFGNLIALSLGLTPNFKSNFDLAEDAKLQLSKDTYDDDLDNLLAQIGDQYADLFLAAKNLSDAILLSDILRVNTEITKAPLSASMIKRYDEHHQDLTLLKALVRQQLPEKYKEIFFDQSKNGYAGYIDGGASQEEFYKFIKPILEKMDGTEELLVKLNREDLLRKQRTFDNGSIPHQIHLGELHAILRRQEDFYPFLKDNREKIEKILTFRIPYYVGPLARGNSRFAWMTRKSEETITPWNFEEVVDKGASAQSFIERMTNFDKNLPNEKVLPKHSLLYEYFTVYNELTKVKYVTEGMRKPAFLSGEQKKAIVDLLFKTNRKVTVKQLKEDYFKKIECFDSVEISGVEDRFNASLGTYHDLLKIIKDKDFLDNEENEDILEDIVLTLTLFEDREMIEERLKTYAHLFDDKVMKQLKRRRYTGWGRLSRKLINGIRDKQSGKTILDFLKSDGFANRNFMQLIHDDSLTFKEDIQKAQVSGQGDSLHEHIANLAGSPAIKKGILQTVKVVDELVKVMGRHKPENIVIEMARENQTTQKGQKNSRERMKRIEEGIKELGSQILKEHPVENTQLQNEKLYLYYLQNGRDMYVDQELDINRLSDYDVDHIVPQSFLKDDSIDNKVLTRSDKARGKSDNVPSEEVVKKMKNYWRQLLNAKLITQRKFDNLTKAERGGLSELDKAGFIKRQLVETRQITKHVAQILDSRMNTKYDENDKLIREVKVITLKSKLVSDFRKDFQFYKVREINNYHHAHDAYLNAVVGTALIKKYPKLESEFVYGDYKVYDVRKMIAKSEQEIGKATAKYFFYSNIMNFFKTEITLANGEIRKRPLIETNGETGEIVWDKGRDFATVRKVLSMPQVNIVKKTEVQTGGFSKESILPKRNSDKLIARKKDWDPKKYGGFDSPTVAYSVLVVAKVEKGKSKKLKSVKELLGITIMERSSFEKNPIDFLEAKGYKEVKKDLIIKLPKYSLFELENGRKRMLASAGELQKGNELALPSKYVNFLYLASHYEKLKGSPEDNEQKQLFVEQHKHYLDEIIEQISEFSKRVILADANLDKVLSAYNKHRDKPIREQAENIIHLFTLTNLGAPAAFKYFDTTIDRKRYTSTKEVLDATLIHQSITGLYETRIDLSQLGGDGGEAAAKGGGPAPGGPLGTSDSPVTHADPIDWKSEEPVWVDQWPLTQEKLSAAQQLVQEQLRLGHIEPSTSAWNSPIFVIKKKSGKWRLLQDLRKVNETMMHMGALQPGLPTPSPIPDKSYIIVIDLKDCFYTIPLAPQDCKRFAFSLPSVNFKEPMQRYQWRVLPQGMTNSPTLCQKFVATAIAPVRQRFPQLYLVHYMDDILLAHTDEHLLYQAFSILKQHLSLNGLVIADEKIQTHFPYNYLGFSLYPRVYNTQLVKLQTDHLKTLNDFQKLLGDINWIRPYLKLPTYTLQPLFDILKGDSDPASPRTLSLEGRTALQSIEEAIRQQQITYCDYQRSWGLYILPTPRAPTGVLYQDKPLRWIYLSATPTKHLLPYYELVAKIIAKGRHEAIQYFGMEPPFICVPYALEQQDWLFQFSDNWSIAFANYPGQITHHYPSDKLLQFASSHAFIFPKIVRRQPIPEATLIFTDGSSNGTAALIINHQTYYAQTSFSSAQVVELFAVHQALLTVPTSFNLFTDSSYVVGALQMIETVPIIGTTSPEVLNLFTLIQQVLHCRQHPCFFGHIRAHSTLPGALVQGNHTADVLTKQVFFQSAGKRTADGSEFEKRTADGSEFESPKKKAKVE

SEQ ID NO: 1601 - protein, 2006 aa, synthetic construct
MPAAKRVKLDGGDKKYSIGLDIGTNSVGWAVITDEYKVPSKKFKVLGNTDRHSIKKNLIGALLFDSGETAEATRLKRTARRRYTRRKNRICYLQEIFSNEMAKVDDSFFHRLEESFLVEEDKKHERHPIFGNIVDEVAYHEKYPTIYHLRKKLVDSTDKADLRLIYLALAHMIKFRGHFLIEGDLNPDNSDVDKLFIQLVQTYNQLFEENPINASGVDAKAILSARLSKSRRLENLIAQLPGEKKNGLFGNLIALSLGLTPNFKSNFDLAEDAKLQLSKDTYDDDLDNLLAQIGDQYADLFLAAKNLSDAILLSDILRVNTEITKAPLSASMIKRYDEHHQDLTLLKALVRQQLPEKYKEIFFDQSKNGYAGYIDGGASQEEFYKFIKPILEKMDGTEELLVKLNREDLLRKQRTFDNGSIPHQIHLGELHAILRRQEDFYPFLKDNREKIEKILTFRIPYYVGPLARGNSRFAWMTRKSEETITPWNFEEVVDKGASAQSFIERMTNFDKNLPNEKVLPKHSLLYEYFTVYNELTKVKYVTEGMRKPAFLSGEQKKAIVDLLFKTNRKVTVKQLKEDYFKKIECFDSVEISGVEDRFNASLGTYHDLLKIIKDKDFLDNEENEDILEDIVLTLTLFEDREMIEERLKTYAHLFDDKVMKQLKRRRYTGWGRLSRKLINGIRDKQSGKTILDFLKSDGFANRNFMQLIHDDSLTFKEDIQKAQVSGQGDSLHEHIANLAGSPAIKKGILQTVKVVDELVKVMGRHKPENIVIEMARENQTTQKGQKNSRERMKRIEEGIKELGSQILKEHPVENTQLQNEKLYLYYLQNGRDMYVDQELDINRLSDYDVDHIVPQSFLKDDSIDNKVLTRSDKARGKSDNVPSEEVVKKMKNYWRQLLNAKLITQRKFDNLTKAERGGLSELDKAGFIKRQLVETRQITKHVAQILDSRMNTKYDENDKLIREVKVITLKSKLVSDFRKDFQFYKVREINNYHHAHDAYLNAVVGTALIKKYPKLESEFVYGDYKVYDVRKMIAKSEQEIGKATAKYFFYSNIMNFFKTEITLANGEIRKRPLIETNGETGEIVWDKGRDFATVRKVLSMPQVNIVKKTEVQTGGFSKESILPKRNSDKLIARKKDWDPKKYGGFDSPTVAYSVLVVAKVEKGKSKKLKSVKELLGITIMERSSFEKNPIDFLEAKGYKEVKKDLIIKLPKYSLFELENGRKRMLASAGELQKGNELALPSKYVNFLYLASHYEKLKGSPEDNEQKQLFVEQHKHYLDEIIEQISEFSKRVILADANLDKVLSAYNKHRDKPIREQAENIIHLFTLTNLGAPAAFKYFDTTIDRKRYTSTKEVLDATLIHQSITGLYETRIDLSQLGGDGGGGSEAAAKGSSGGPLGTSDSPVTHADPIDWKSEEPVWVDQWPLTQEKLSAAQQLVQEQLRLGHIEPSTSAWNSPIFVIKKKSGKWRLLQDLRKVNETMMHMGALQPGLPTPSPIPDKSYIIVIDLKDCFYTIPLAPQDCKRFAFSLPSVNFKEPMQRYQWRVLPQGMTNSPTLCQKFVATAIAPVRQRFPQLYLVHYMDDILLAHTDEHLLYQAFSILKQHLSLNGLVIADEKIQTHFPYNYLGFSLYPRVYNTQLVKLQTDHLKTLNDFQKLLGDINWIRPYLKLPTYTLQPLFDILKGDSDPASPRTLSLEGRTALQSIEEAIRQQQITYCDYQRSWGLYILPTPRAPTGVLYQDKPLRWIYLSATPTKHLLPYYELVAKIIAKGRHEAIQYFGMEPPFICVPYALEQQDWLFQFSDNWSIAFANYPGQITHHYPSDKLLQFASSHAFIFPKIVRRQPIPEATLIFTDGSSNGTAALIINHQTYYAQTSFSSAQVVELFAVHQALLTVPTSFNLFTDSSYVVGALQMIETVPIIGTTSPEVLNLFTLIQQVLHCRQHPCFFGHIRAHSTLPGALVQGNHTADVLTKQVFFQSAGKRTADGSEFEKRTADGSEFESPKKKAKVE

SEQ ID NO: 1602 - protein, 2013 aa, synthetic construct
MPAAKRVKLDGGDKKYSIGLDIGTNSVGWAVITDEYKVPSKKFKVLGNTDRHSIKKNLIGALLFDSGETAEATRLKRTARRRYTRRKNRICYLQEIFSNEMAKVDDSFFHRLEESFLVEEDKKHERHPIFGNIVDEVAYHEKYPTIYHLRKKLVDSTDKADLRLIYLALAHMIKFRGHFLIEGDLNPDNSDVDKLFIQLVQTYNQLFEENPINASGVDAKAILSARLSKSRRLENLIAQLPGEKKNGLFGNLIALSLGLTPNFKSNFDLAEDAKLQLSKDTYDDDLDNLLAQIGDQYADLFLAAKNLSDAILLSDILRVNTEITKAPLSASMIKRYDEHHQDLTLLKALVRQQLPEKYKEIFFDQSKNGYAGYIDGGASQEEFYKFIKPILEKMDGTEELLVKLNREDLLRKQRTFDNGSIPHQIHLGELHAILRRQEDFYPFLKDNREKIEKILTFRIPYYVGPLARGNSRFAWMTRKSEETITPWNFEEVVDKGASAQSFIERMTNFDKNLPNEKVLPKHSLLYEYFTVYNELTKVKYVTEGMRKPAFLSGEQKKAIVDLLFKTNRKVTVKQLKEDYFKKIECFDSVEISGVEDRFNASLGTYHDLLKIIKDKDFLDNEENEDILEDIVLTLTLFEDREMIEERLKTYAHLFDDKVMKQLKRRRYTGWGRLSRKLINGIRDKQSGKTILDFLKSDGFANRNFMQLIHDDSLTFKEDIQKAQVSGQGDSLHEHIANLAGSPAIKKGILQTVKVVDELVKVMGRHKPENIVIEMARENQTTQKGQKNSRERMKRIEEGIKELGSQILKEHPVENTQLQNEKLYLYYLQNGRDMYVDQELDINRLSDYDVDHIVPQSFLKDDSIDNKVLTRSDKARGKSDNVPSEEVVKKMKNYWRQLLNAKLITQRKFDNLTKAERGGLSELDKAGFIKRQLVETRQITKHVAQILDSRMNTKYDENDKLIREVKVITLKSKLVSDFRKDFQFYKVREINNYHHAHDAYLNAVVGTALIKKYPKLESEFVYGDYKVYDVRKMIAKSEQEIGKATAKYFFYSNIMNFFKTEITLANGEIRKRPLIETNGETGEIVWDKGRDFATVRKVLSMPQVNIVKKTEVQTGGFSKESILPKRNSDKLIARKKDWDPKKYGGFDSPTVAYSVLVVAKVEKGKSKKLKSVKELLGITIMERSSFEKNPIDFLEAKGYKEVKKDLIIKLPKYSLFELENGRKRMLASAGELQKGNELALPSKYVNFLYLASHYEKLKGSPEDNEQKQLFVEQHKHYLDEIIEQISEFSKRVILADANLDKVLSAYNKHRDKPIREQAENIIHLFTLTNLGAPAAFKYFDTTIDRKRYTSTKEVLDATLIHQSITGLYETRIDLSQLGGDGGGSSGSSGSSGSSGSSGSSGGPLGTSDSPVTHADPIDWKSEEPVWVDQWPLTQEKLSAAQQLVQEQLRLGHIEPSTSAWNSPIFVIKKKSGKWRLLQDLRKVNETMMHMGALQPGLPTPSPIPDKSYIIVIDLKDCFYTIPLAPQDCKRFAFSLPSVNFKEPMQRYQWRVLPQGMTNSPTLCQKFVATAIAPVRQRFPQLYLVHYMDDILLAHTDEHLLYQAFSILKQHLSLNGLVIADEKIQTHFPYNYLGFSLYPRVYNTQLVKLQTDHLKTLNDFQKLLGDINWIRPYLKLPTYTLQPLFDILKGDSDPASPRTLSLEGRTALQSIEEAIRQQQITYCDYQRSWGLYILPTPRAPTGVLYQDKPLRWIYLSATPTKHLLPYYELVAKIIAKGRHEAIQYFGMEPPFICVPYALEQQDWLFQFSDNWSIAFANYPGQITHHYPSDKLLQFASSHAFIFPKIVRRQPIPEATLIFTDGSSNGTAALIINHQTYYAQTSFSSAQVVELFAVHQALLTVPTSFNLFTDSSYVVGALQMIETVPIIGTTSPEVLNLFTLIQQVLHCRQHPCFFGHIRAHSTLPGALVQGNHTADVLTKQVFFQSAGKRTADGSEFEKRTADGSEFESPKKKAKVE

SEQ ID NO: 1603 - protein, 2001 aa, synthetic construct
MPAAKRVKLDGGDKKYSIGLDIGTNSVGWAVITDEYKVPSKKFKVLGNTDRHSIKKNLIGALLFDSGETAEATRLKRTARRRYTRRKNRICYLQEIFSNEMAKVDDSFFHRLEESFLVEEDKKHERHPIFGNIVDEVAYHEKYPTIYHLRKKLVDSTDKADLRLIYLALAHMIKFRGHFLIEGDLNPDNSDVDKLFIQLVQTYNQLFEENPINASGVDAKAILSARLSKSRRLENLIAQLPGEKKNGLFGNLIALSLGLTPNFKSNFDLAEDAKLQLSKDTYDDDLDNLLAQIGDQYADLFLAAKNLSDAILLSDILRVNTEITKAPLSASMIKRYDEHHQDLTLLKALVRQQLPEKYKEIFFDQSKNGYAGYIDGGASQEEFYKFIKPILEKMDGTEELLVKLNREDLLRKQRTFDNGSIPHQIHLGELHAILRRQEDFYPFLKDNREKIEKILTFRIPYYVGPLARGNSRFAWMTRKSEETITPWNFEEVVDKGASAQSFIERMTNFDKNLPNEKVLPKHSLLYEYFTVYNELTKVKYVTEGMRKPAFLSGEQKKAIVDLLFKTNRKVTVKQLKEDYFKKIECFDSVEISGVEDRFNASLGTYHDLLKIIKDKDFLDNEENEDILEDIVLTLTLFEDREMIEERLKTYAHLFDDKVMKQLKRRRYTGWGRLSRKLINGIRDKQSGKTILDFLKSDGFANRNFMQLIHDDSLTFKEDIQKAQVSGQGDSLHEHIANLAGSPAIKKGILQTVKVVDELVKVMGRHKPENIVIEMARENQTTQKGQKNSRERMKRIEEGIKELGSQILKEHPVENTQLQNEKLYLYYLQNGRDMYVDQELDINRLSDYDVDHIVPQSFLKDDSIDNKVLTRSDKARGKSDNVPSEEVVKKMKNYWRQLLNAKLITQRKFDNLTKAERGGLSELDKAGFIKRQLVETRQITKHVAQILDSRMNTKYDENDKLIREVKVITLKSKLVSDFRKDFQFYKVREINNYHHAHDAYLNAVVGTALIKKYPKLESEFVYGDYKVYDVRKMIAKSEQEIGKATAKYFFYSNIMNFFKTEITLANGEIRKRPLIETNGETGEIVWDKGRDFATVRKVLSMPQVNIVKKTEVQTGGFSKESILPKRNSDKLIARKKDWDPKKYGGFDSPTVAYSVLVVAKVEKGKSKKLKSVKELLGITIMERSSFEKNPIDFLEAKGYKEVKKDLIIKLPKYSLFELENGRKRMLASAGELQKGNELALPSKYVNFLYLASHYEKLKGSPEDNEQKQLFVEQHKHYLDEIIEQISEFSKRVILADANLDKVLSAYNKHRDKPIREQAENIIHLFTLTNLGAPAAFKYFDTTIDRKRYTSTKEVLDATLIHQSITGLYETRIDLSQLGGDGGGSSGSSGGPLGTSDSPVTHADPIDWKSEEPVWVDQWPLTQEKLSAAQQLVQEQLRLGHIEPSTSAWNSPIFVIKKKSGKWRLLQDLRKVNETMMHMGALQPGLPTPSPIPDKSYIIVIDLKDCFYTIPLAPQDCKRFAFSLPSVNFKEPMQRYQWRVLPQGMTNSPTLCQKFVATAIAPVRQRFPQLYLVHYMDDILLAHTDEHLLYQAFSILKQHLSLNGLVIADEKIQTHFPYNYLGFSLYPRVYNTQLVKLQTDHLKTLNDFQKLLGDINWIRPYLKLPTYTLQPLFDILKGDSDPASPRTLSLEGRTALQSIEEAIRQQQITYCDYQRSWGLYILPTPRAPTGVLYQDKPLRWIYLSATPTKHLLPYYELVAKIIAKGRHEAIQYFGMEPPFICVPYALEQQDWLFQFSDNWSIAFANYPGQITHHYPSDKLLQFASSHAFIFPKIVRRQPIPEATLIFTDGSSNGTAALIINHQTYYAQTSFSSAQVVELFAVHQALLTVPTSFNLFTDSSYVVGALQMIETVPIIGTTSPEVLNLFTLIQQVLHCRQHPCFFGHIRAHSTLPGALVQGNHTADVLTKQVFFQSAGKRTADGSEFEKRTADGSEFESPKKKAKVE

SEQ ID NO: 1604 - protein, 2216 aa, synthetic construct
MPAAKRVKLDGGDKKYSIGLDIGTNSVGWAVITDEYKVPSKKFKVLGNTDRHSIKKNLIGALLFDSGETAEATRLKRTARRRYTRRKNRICYLQEIFSNEMAKVDDSFFHRLEESFLVEEDKKHERHPIFGNIVDEVAYHEKYPTIYHLRKKLVDSTDKADLRLIYLALAHMIKFRGHFLIEGDLNPDNSDVDKLFIQLVQTYNQLFEENPINASGVDAKAILSARLSKSRRLENLIAQLPGEKKNGLFGNLIALSLGLTPNFKSNFDLAEDAKLQLSKDTYDDDLDNLLAQIGDQYADLFLAAKNLSDAILLSDILRVNTEITKAPLSASMIKRYDEHHQDLTLLKALVRQQLPEKYKEIFFDQSKNGYAGYIDGGASQEEFYKFIKPILEKMDGTEELLVKLNREDLLRKQRTFDNGSIPHQIHLGELHAILRRQEDFYPFLKDNREKIEKILTFRIPYYVGPLARGNSRFAWMTRKSEETITPWNFEEVVDKGASAQSFIERMTNFDKNLPNEKVLPKHSLLYEYFTVYNELTKVKYVTEGMRKPAFLSGEQKKAIVDLLFKTNRKVTVKQLKEDYFKKIECFDSVEISGVEDRFNASLGTYHDLLKIIKDKDFLDNEENEDILEDIVLTLTLFEDREMIEERLKTYAHLFDDKVMKQLKRRRYTGWGRLSRKLINGIRDKQSGKTILDFLKSDGFANRNFMQLIHDDSLTFKEDIQKAQVSGQGDSLHEHIANLAGSPAIKKGILQTVKVVDELVKVMGRHKPENIVIEMARENQTTQKGQKNSRERMKRIEEGIKELGSQILKEHPVENTQLQNEKLYLYYLQNGRDMYVDQELDINRLSDYDVDHIVPQSFLKDDSIDNKVLTRSDKARGKSDNVPSEEVVKKMKNYWRQLLNAKLITQRKFDNLTKAERGGLSELDKAGFIKRQLVETRQITKHVAQILDSRMNTKYDENDKLIREVKVITLKSKLVSDFRKDFQFYKVREINNYHHAHDAYLNAVVGTALIKKYPKLESEFVYGDYKVYDVRKMIAKSEQEIGKATAKYFFYSNIMNFFKTEITLANGEIRKRPLIETNGETGEIVWDKGRDFATVRKVLSMPQVNIVKKTEVQTGGFSKESILPKRNSDKLIARKKDWDPKKYGGFDSPTVAYSVLVVAKVEKGKSKKLKSVKELLGITIMERSSFEKNPIDFLEAKGYKEVKKDLIIKLPKYSLFELENGRKRMLASAGELQKGNELALPSKYVNFLYLASHYEKLKGSPEDNEQKQLFVEQHKHYLDEIIEQISEFSKRVILADANLDKVLSAYNKHRDKPIREQAENIIHLFTLTNLGAPAAFKYFDTTIDRKRYTSTKEVLDATLIHQSITGLYETRIDLSQLGGDGGPAPGSSGGGGGTLGDQGSRGSDPLPEPRVTLTVEGIPTEFLVNTGAEHSVLTKPMGKMGSKRTVVAGATGSKVYPWTTKRLLKIGQKQVTHSFLVIPECPAPLLGRDLLTKLKAQIQFSTEGPQVTWEDRPAMCLVLNLEEEYRLHEKPVPPSIDPSWLQLFPMVWAEKAGMGLANQVPPVVVELKSDASPVAVRQYPMSKEAREGIRPHIQRFLDLGILVPCQSPWNTPLLPVKKPGTNDYRPVQDLREVNKRVQDIHPTVPNPYNLLSSLPPSHTWYSVLDLKDAFFCLKLHPNSQPLFAFEWRDPEKGNTGQLTWTRLPQGFKNSPTLFDEALHRDLASFRALNPQVVMLQYVDDLLVAAPTYRDCKEGTRRLLQELSKLGYRVSAKKAQLCREEVTYLGYLLKGGKRWLTPARKATVMKIPTPTTPRQVREFLGTAGFCRLWIPGFASLAAPLYPLTREKVPFTWTEAHQEAFGRIKEALLSAPALALPDLTKPFALYVDEKEGVARGVLTQTLGPWRRPVAYLSKKLDPVASGWPTCLKAIAAVALLLKDADKLTLGQNVLVIAPHNLESIVRQPPDRWMTNARMTHYQSLLLNERVSFAPPAILNPATLLPVESDDTPIHICSEILAEETGTRPDLRDQPLPGVPAWYTDGSSFIMDGRRQAGAAIVDNKRTVWASNLPEGTSAQKAELIALTQALRLAEGKSINIYTDSRYAFATAHVHGAIYKQRGLLTSAGKDIKNKEEILALLEAIHLPKRVAIIHCPGHQRGTDPVATGNRKADEAAKQAAQSTRILTETTKNAGKRTADGSEFEKRTADGSEFESPKKKAKVE

SEQ ID NO: 1605 - protein, 2218 aa, synthetic construct
MPAAKRVKLDGGDKKYSIGLDIGTNSVGWAVITDEYKVPSKKFKVLGNTDRHSIKKNLIGALLFDSGETAEATRLKRTARRRYTRRKNRICYLQEIFSNEMAKVDDSFFHRLEESFLVEEDKKHERHPIFGNIVDEVAYHEKYPTIYHLRKKLVDSTDKADLRLIYLALAHMIKFRGHFLIEGDLNPDNSDVDKLFIQLVQTYNQLFEENPINASGVDAKAILSARLSKSRRLENLIAQLPGEKKNGLFGNLIALSLGLTPNFKSNFDLAEDAKLQLSKDTYDDDLDNLLAQIGDQYADLFLAAKNLSDAILLSDILRVNTEITKAPLSASMIKRYDEHHQDLTLLKALVRQQLPEKYKEIFFDQSKNGYAGYIDGGASQEEFYKFIKPILEKMDGTEELLVKLNREDLLRKQRTFDNGSIPHQIHLGELHAILRRQEDFYPFLKDNREKIEKILTFRIPYYVGPLARGNSRFAWMTRKSEETITPWNFEEVVDKGASAQSFIERMTNFDKNLPNEKVLPKHSLLYEYFTVYNELTKVKYVTEGMRKPAFLSGEQKKAIVDLLFKTNRKVTVKQLKEDYFKKIECFDSVEISGVEDRFNASLGTYHDLLKIIKDKDFLDNEENEDILEDIVLTLTLFEDREMIEERLKTYAHLFDDKVMKQLKRRRYTGWGRLSRKLINGIRDKQSGKTILDFLKSDGFANRNFMQLIHDDSLTFKEDIQKAQVSGQGDSLHEHIANLAGSPAIKKGILQTVKVVDELVKVMGRHKPENIVIEMARENQTTQKGQKNSRERMKRIEEGIKELGSQILKEHPVENTQLQNEKLYLYYLQNGRDMYVDQELDINRLSDYDVDHIVPQSFLKDDSIDNKVLTRSDKARGKSDNVPSEEVVKKMKNYWRQLLNAKLITQRKFDNLTKAERGGLSELDKAGFIKRQLVETRQITKHVAQILDSRMNTKYDENDKLIREVKVITLKSKLVSDFRKDFQFYKVREINNYHHAHDAYLNAVVGTALIKKYPKLESEFVYGDYKVYDVRKMIAKSEQEIGKATAKYFFYSNIMNFFKTEITLANGEIRKRPLIETNGETGEIVWDKGRDFATVRKVLSMPQVNIVKKTEVQTGGFSKESILPKRNSDKLIARKKDWDPKKYGGFDSPTVAYSVLVVAKVEKGKSKKLKSVKELLGITIMERSSFEKNPIDFLEAKGYKEVKKDLIIKLPKYSLFELENGRKRMLASAGELQKGNELALPSKYVNFLYLASHYEKLKGSPEDNEQKQLFVEQHKHYLDEIIEQISEFSKRVILADANLDKVLSAYNKHRDKPIREQAENIIHLFTLTNLGAPAAFKYFDTTIDRKRYTSTKEVLDATLIHQSITGLYETRIDLSQLGGDGGPAPGGGEAAAKGGTLGDQGSRGSDPLPEPRVTLTVEGIPTEFLVNTGAEHSVLTKPMGKMGSKRTVVAGATGSKVYPWTTKRLLKIGQKQVTHSFLVIPECPAPLLGRDLLTKLKAQIQFSTEGPQVTWEDRPAMCLVLNLEEEYRLHEKPVPPSIDPSWLQLFPMVWAEKAGMGLANQVPPVVVELKSDASPVAVRQYPMSKEAREGIRPHIQRFLDLGILVPCQSPWNTPLLPVKKPGTNDYRPVQDLREVNKRVQDIHPTVPNPYNLLSSLPPSHTWYSVLDLKDAFFCLKLHPNSQPLFAFEWRDPEKGNTGQLTWTRLPQGFKNSPTLFDEALHRDLASFRALNPQVVMLQYVDDLLVAAPTYRDCKEGTRRLLQELSKLGYRVSAKKAQLCREEVTYLGYLLKGGKRWLTPARKATVMKIPTPTTPRQVREFLGTAGFCRLWIPGFASLAAPLYPLTREKVPFTWTEAHQEAFGRIKEALLSAPALALPDLTKPFALYVDEKEGVARGVLTQTLGPWRRPVAYLSKKLDPVASGWPTCLKAIAAVALLLKDADKLTLGQNVLVIAPHNLESIVRQPPDRWMTNARMTHYQSLLLNERVSFAPPAILNPATLLPVESDDTPIHICSEILAEETGTRPDLRDQPLPGVPAWYTDGSSFIMDGRRQAGAAIVDNKRTVWASNLPEGTSAQKAELIALTQALRLAEGKSINIYTDSRYAFATAHVHGAIYKQRGLLTSAGKDIKNKEEILALLEAIHLPKRVAIIHCPGHQRGTDPVATGNRKADEAAKQAAQSTRILTETTKNAGKRTADGSEFEKRTADGSEFESPKKKAKVE

SEQ ID NO: 1606 - protein, 2218 aa, synthetic construct
MPAAKRVKLDGGDKKYSIGLDIGTNSVGWAVITDEYKVPSKKFKVLGNTDRHSIKKNLIGALLFDSGETAEATRLKRTARRRYTRRKNRICYLQEIFSNEMAKVDDSFFHRLEESFLVEEDKKHERHPIFGNIVDEVAYHEKYPTIYHLRKKLVDSTDKADLRLIYLALAHMIKFRGHFLIEGDLNPDNSDVDKLFIQLVQTYNQLFEENPINASGVDAKAILSARLSKSRRLENLIAQLPGEKKNGLFGNLIALSLGLTPNFKSNFDLAEDAKLQLSKDTYDDDLDNLLAQIGDQYADLFLAAKNLSDAILLSDILRVNTEITKAPLSASMIKRYDEHHQDLTLLKALVRQQLPEKYKEIFFDQSKNGYAGYIDGGASQEEFYKFIKPILEKMDGTEELLVKLNREDLLRKQRTFDNGSIPHQIHLGELHAILRRQEDFYPFLKDNREKIEKILTFRIPYYVGPLARGNSRFAWMTRKSEETITPWNFEEVVDKGASAQSFIERMTNFDKNLPNEKVLPKHSLLYEYFTVYNELTKVKYVTEGMRKPAFLSGEQKKAIVDLLFKTNRKVTVKQLKEDYFKKIECFDSVEISGVEDRFNASLGTYHDLLKIIKDKDFLDNEENEDILEDIVLTLTLFEDREMIEERLKTYAHLFDDKVMKQLKRRRYTGWGRLSRKLINGIRDKQSGKTILDFLKSDGFANRNFMQLIHDDSLTFKEDIQKAQVSGQGDSLHEHIANLAGSPAIKKGILQTVKVVDELVKVMGRHKPENIVIEMARENQTTQKGQKNSRERMKRIEEGIKELGSQILKEHPVENTQLQNEKLYLYYLQNGRDMYVDQELDINRLSDYDVDHIVPQSFLKDDSIDNKVLTRSDKARGKSDNVPSEEVVKKMKNYWRQLLNAKLITQRKFDNLTKAERGGLSELDKAGFIKRQLVETRQITKHVAQILDSRMNTKYDENDKLIREVKVITLKSKLVSDFRKDFQFYKVREINNYHHAHDAYLNAVVGTALIKKYPKLESEFVYGDYKVYDVRKMIAKSEQEIGKATAKYFFYSNIMNFFKTEITLANGEIRKRPLIETNGETGEIVWDKGRDFATVRKVLSMPQVNIVKKTEVQTGGFSKESILPKRNSDKLIARKKDWDPKKYGGFDSPTVAYSVLVVAKVEKGKSKKLKSVKELLGITIMERSSFEKNPIDFLEAKGYKEVKKDLIIKLPKYSLFELENGRKRMLASAGELQKGNELALPSKYVNFLYLASHYEKLKGSPEDNEQKQLFVEQHKHYLDEIIEQISEFSKRVILADANLDKVLSAYNKHRDKPIREQAENIIHLFTLTNLGAPAAFKYFDTTIDRKRYTSTKEVLDATLIHQSITGLYETRIDLSQLGGDGGGGGGSSEAAAKGGTLGDQGSRGSDPLPEPRVTLTVEGIPTEFLVNTGAEHSVLTKPMGKMGSKRTVVAGATGSKVYPWTTKRLLKIGQKQVTHSFLVIPECPAPLLGRDLLTKLKAQIQFSTEGPQVTWEDRPAMCLVLNLEEEYRLHEKPVPPSIDPSWLQLFPMVWAEKAGMGLANQVPPVVVELKSDASPVAVRQYPMSKEAREGIRPHIQRFLDLGILVPCQSPWNTPLLPVKKPGTNDYRPVQDLREVNKRVQDIHPTVPNPYNLLSSLPPSHTWYSVLDLKDAFFCLKLHPNSQPLFAFEWRDPEKGNTGQLTWTRLPQGFKNSPTLFDEALHRDLASFRALNPQVVMLQYVDDLLVAAPTYRDCKEGTRRLLQELSKLGYRVSAKKAQLCREEVTYLGYLLKGGKRWLTPARKATVMKIPTPTTPRQVREFLGTAGFCRLWIPGFASLAAPLYPLTREKVPFTWTEAHQEAFGRIKEALLSAPALALPDLTKPFALYVDEKEGVARGVLTQTLGPWRRPVAYLSKKLDPVASGWPTCLKAIAAVALLLKDADKLTLGQNVLVIAPHNLESIVRQPPDRWMTNARMTHYQSLLLNERVSFAPPAILNPATLLPVESDDTPIHICSEILAEETGTRPDLRDQPLPGVPAWYTDGSSFIMDGRRQAGAAIVDNKRTVWASNLPEGTSAQKAELIALTQALRLAEGKSINIYTDSRYAFATAHVHGAIYKQRGLLTSAGKDIKNKEEILALLEAIHLPKRVAIIHCPGHQRGTDPVATGNRKADEAAKQAAQSTRILTETTKNAGKRTADGSEFEKRTADGSEFESPKKKAKVE

SEQ ID NO: 1607 - protein, 2213 aa, synthetic construct
MPAAKRVKLDGGDKKYSIGLDIGTNSVGWAVITDEYKVPSKKFKVLGNTDRHSIKKNLIGALLFDSGETAEATRLKRTARRRYTRRKNRICYLQEIFSNEMAKVDDSFFHRLEESFLVEEDKKHERHPIFGNIVDEVAYHEKYPTIYHLRKKLVDSTDKADLRLIYLALAHMIKFRGHFLIEGDLNPDNSDVDKLFIQLVQTYNQLFEENPINASGVDAKAILSARLSKSRRLENLIAQLPGEKKNGLFGNLIALSLGLTPNFKSNFDLAEDAKLQLSKDTYDDDLDNLLAQIGDQYADLFLAAKNLSDAILLSDILRVNTEITKAPLSASMIKRYDEHHQDLTLLKALVRQQLPEKYKEIFFDQSKNGYAGYIDGGASQEEFYKFIKPILEKMDGTEELLVKLNREDLLRKQRTFDNGSIPHQIHLGELHAILRRQEDFYPFLKDNREKIEKILTFRIPYYVGPLARGNSRFAWMTRKSEETITPWNFEEVVDKGASAQSFIERMTNFDKNLPNEKVLPKHSLLYEYFTVYNELTKVKYVTEGMRKPAFLSGEQKKAIVDLLFKTNRKVTVKQLKEDYFKKIECFDSVEISGVEDRFNASLGTYHDLLKIIKDKDFLDNEENEDILEDIVLTLTLFEDREMIEERLKTYAHLFDDKVMKQLKRRRYTGWGRLSRKLINGIRDKQSGKTILDFLKSDGFANRNFMQLIHDDSLTFKEDIQKAQVSGQGDSLHEHIANLAGSPAIKKGILQTVKVVDELVKVMGRHKPENIVIEMARENQTTQKGQKNSRERMKRIEEGIKELGSQILKEHPVENTQLQNEKLYLYYLQNGRDMYVDQELDINRLSDYDVDHIVPQSFLKDDSIDNKVLTRSDKARGKSDNVPSEEVVKKMKNYWRQLLNAKLITQRKFDNLTKAERGGLSELDKAGFIKRQLVETRQITKHVAQILDSRMNTKYDENDKLIREVKVITLKSKLVSDFRKDFQFYKVREINNYHHAHDAYLNAVVGTALIKKYPKLESEFVYGDYKVYDVRKMIAKSEQEIGKATAKYFFYSNIMNFFKTEITLANGEIRKRPLIETNGETGEIVWDKGRDFATVRKVLSMPQVNIVKKTEVQTGGFSKESILPKRNSDKLIARKKDWDPKKYGGFDSPTVAYSVLVVAKVEKGKSKKLKSVKELLGITIMERSSFEKNPIDFLEAKGYKEVKKDLIIKLPKYSLFELENGRKRMLASAGELQKGNELALPSKYVNFLYLASHYEKLKGSPEDNEQKQLFVEQHKHYLDEIIEQISEFSKRVILADANLDKVLSAYNKHRDKPIREQAENIIHLFTLTNLGAPAAFKYFDTTIDRKRYTSTKEVLDATLIHQSITGLYETRIDLSQLGGDGGGGSPAPGGTLGDQGSRGSDPLPEPRVTLTVEGIPTEFLVNTGAEHSVLTKPMGKMGSKRTVVAGATGSKVYPWTTKRLLKIGQKQVTHSFLVIPECPAPLLGRDLLTKLKAQIQFSTEGPQVTWEDRPAMCLVLNLEEEYRLHEKPVPPSIDPSWLQLFPMVWAEKAGMGLANQVPPVVVELKSDASPVAVRQYPMSKEAREGIRPHIQRFLDLGILVPCQSPWNTPLLPVKKPGTNDYRPVQDLREVNKRVQDIHPTVPNPYNLLSSLPPSHTWYSVLDLKDAFFCLKLHPNSQPLFAFEWRDPEKGNTGQLTWTRLPQGFKNSPTLFDEALHRDLASFRALNPQVVMLQYVDDLLVAAPTYRDCKEGTRRLLQELSKLGYRVSAKKAQLCREEVTYLGYLLKGGKRWLTPARKATVMKIPTPTTPRQVREFLGTAGFCRLWIPGFASLAAPLYPLTREKVPFTWTEAHQEAFGRIKEALLSAPALALPDLTKPFALYVDEKEGVARGVLTQTLGPWRRPVAYLSKKLDPVASGWPTCLKAIAAVALLLKDADKLTLGQNVLVIAPHNLESIVRQPPDRWMTNARMTHYQSLLLNERVSFAPPAILNPATLLPVESDDTPIHICSEILAEETGTRPDLRDQPLPGVPAWYTDGSSFIMDGRRQAGAAIVDNKRTVWASNLPEGTSAQKAELIALTQALRLAEGKSINIYTDSRYAFATAHVHGAIYKQRGLLTSAGKDIKNKEEILALLEAIHLPKRVAIIHCPGHQRGTDPVATGNRKADEAAKQAAQSTRILTETTKNAGKRTADGSEFEKRTADGSEFESPKKKAKVE

SEQ ID NO: 1608 - protein, 2216 aa, synthetic construct
MPAAKRVKLDGGDKKYSIGLDIGTNSVGWAVITDEYKVPSKKFKVLGNTDRHSIKKNLIGALLFDSGETAEATRLKRTARRRYTRRKNRICYLQEIFSNEMAKVDDSFFHRLEESFLVEEDKKHERHPIFGNIVDEVAYHEKYPTIYHLRKKLVDSTDKADLRLIYLALAHMIKFRGHFLIEGDLNPDNSDVDKLFIQLVQTYNQLFEENPINASGVDAKAILSARLSKSRRLENLIAQLPGEKKNGLFGNLIALSLGLTPNFKSNFDLAEDAKLQLSKDTYDDDLDNLLAQIGDQYADLFLAAKNLSDAILLSDILRVNTEITKAPLSASMIKRYDEHHQDLTLLKALVRQQLPEKYKEIFFDQSKNGYAGYIDGGASQEEFYKFIKPILEKMDGTEELLVKLNREDLLRKQRTFDNGSIPHQIHLGELHAILRRQEDFYPFLKDNREKIEKILTFRIPYYVGPLARGNSRFAWMTRKSEETITPWNFEEVVDKGASAQSFIERMTNFDKNLPNEKVLPKHSLLYEYFTVYNELTKVKYVTEGMRKPAFLSGEQKKAIVDLLFKTNRKVTVKQLKEDYFKKIECFDSVEISGVEDRFNASLGTYHDLLKIIKDKDFLDNEENEDILEDIVLTLTLFEDREMIEERLKTYAHLFDDKVMKQLKRRRYTGWGRLSRKLINGIRDKQSGKTILDFLKSDGFANRNFMQLIHDDSLTFKEDIQKAQVSGQGDSLHEHIANLAGSPAIKKGILQTVKVVDELVKVMGRHKPENIVIEMARENQTTQKGQKNSRERMKRIEEGIKELGSQILKEHPVENTQLQNEKLYLYYLQNGRDMYVDQELDINRLSDYDVDHIVPQSFLKDDSIDNKVLTRSDKARGKSDNVPSEEVVKKMKNYWRQLLNAKLITQRKFDNLTKAERGGLSELDKAGFIKRQLVETRQITKHVAQILDSRMNTKYDENDKLIREVKVITLKSKLVSDFRKDFQFYKVREINNYHHAHDAYLNAVVGTALIKKYPKLESEFVYGDYKVYDVRKMIAKSEQEIGKATAKYFFYSNIMNFFKTEITLANGEIRKRPLIETNGETGEIVWDKGRDFATVRKVLSMPQVNIVKKTEVQTGGFSKESILPKRNSDKLIARKKDWDPKKYGGFDSPTVAYSVLVVAKVEKGKSKKLKSVKELLGITIMERSSFEKNPIDFLEAKGYKEVKKDLIIKLPKYSLFELENGRKRMLASAGELQKGNELALPSKYVNFLYLASHYEKLKGSPEDNEQKQLFVEQHKHYLDEIIEQISEFSKRVILADANLDKVLSAYNKHRDKPIREQAENIIHLFTLTNLGAPAAFKYFDTTIDRKRYTSTKEVLDATLIHQSITGLYETRIDLSQLGGDGGGGSGGGGSSGGTLGDQGSRGSDPLPEPRVTLTVEGIPTEFLVNTGAEHSVLTKPMGKMGSKRTVVAGATGSKVYPWTTKRLLKIGQKQVTHSFLVIPECPAPLLGRDLLTKLKAQIQFSTEGPQVTWEDRPAMCLVLNLEEEYRLHEKPVPPSIDPSWLQLFPMVWAEKAGMGLANQVPPVVVELKSDASPVAVRQYPMSKEAREGIRPHIQRFLDLGILVPCQSPWNTPLLPVKKPGTNDYRPVQDLREVNKRVQDIHPTVPNPYNLLSSLPPSHTWYSVLDLKDAFFCLKLHPNSQPLFAFEWRDPEKGNTGQLTWTRLPQGFKNSPTLFDEALHRDLASFRALNPQVVMLQYVDDLLVAAPTYRDCKEGTRRLLQELSKLGYRVSAKKAQLCREEVTYLGYLLKGGKRWLTPARKATVMKIPTPTTPRQVREFLGTAGFCRLWIPGFASLAAPLYPLTREKVPFTWTEAHQEAFGRIKEALLSAPALALPDLTKPFALYVDEKEGVARGVLTQTLGPWRRPVAYLSKKLDPVASGWPTCLKAIAAVALLLKDADKLTLGQNVLVIAPHNLESIVRQPPDRWMTNARMTHYQSLLLNERVSFAPPAILNPATLLPVESDDTPIHICSEILAEETGTRPDLRDQPLPGVPAWYTDGSSFIMDGRRQAGAAIVDNKRTVWASNLPEGTSAQKAELIALTQALRLAEGKSINIYTDSRYAFATAHVHGAIYKQRGLLTSAGKDIKNKEEILALLEAIHLPKRVAIIHCPGHQRGTDPVATGNRKADEAAKQAAQSTRILTETTKNAGKRTADGSEFEKRTADGSEFESPKKKAKVE

SEQ ID NO: 1609 - protein, 2220 aa, synthetic construct
MPAAKRVKLDGGDKKYSIGLDIGTNSVGWAVITDEYKVPSKKFKVLGNTDRHSIKKNLIGALLFDSGETAEATRLKRTARRRYTRRKNRICYLQEIFSNEMAKVDDSFFHRLEESFLVEEDKKHERHPIFGNIVDEVAYHEKYPTIYHLRKKLVDSTDKADLRLIYLALAHMIKFRGHFLIEGDLNPDNSDVDKLFIQLVQTYNQLFEENPINASGVDAKAILSARLSKSRRLENLIAQLPGEKKNGLFGNLIALSLGLTPNFKSNFDLAEDAKLQLSKDTYDDDLDNLLAQIGDQYADLFLAAKNLSDAILLSDILRVNTEITKAPLSASMIKRYDEHHQDLTLLKALVRQQLPEKYKEIFFDQSKNGYAGYIDGGASQEEFYKFIKPILEKMDGTEELLVKLNREDLLRKQRTFDNGSIPHQIHLGELHAILRRQEDFYPFLKDNREKIEKILTFRIPYYVGPLARGNSRFAWMTRKSEETITPWNFEEVVDKGASAQSFIERMTNFDKNLPNEKVLPKHSLLYEYFTVYNELTKVKYVTEGMRKPAFLSGEQKKAIVDLLFKTNRKVTVKQLKEDYFKKIECFDSVEISGVEDRFNASLGTYHDLLKIIKDKDFLDNEENEDILEDIVLTLTLFEDREMIEERLKTYAHLFDDKVMKQLKRRRYTGWGRLSRKLINGIRDKQSGKTILDFLKSDGFANRNFMQLIHDDSLTFKEDIQKAQVSGQGDSLHEHIANLAGSPAIKKGILQTVKVVDELVKVMGRHKPENIVIEMARENQTTQKGQKNSRERMKRIEEGIKELGSQILKEHPVENTQLQNEKLYLYYLQNGRDMYVDQELDINRLSDYDVDHIVPQSFLKDDSIDNKVLTRSDKARGKSDNVPSEEVVKKMKNYWRQLLNAKLITQRKFDNLTKAERGGLSELDKAGFIKRQLVETRQITKHVAQILDSRMNTKYDENDKLIREVKVITLKSKLVSDFRKDFQFYKVREINNYHHAHDAYLNAVVGTALIKKYPKLESEFVYGDYKVYDVRKMIAKSEQEIGKATAKYFFYSNIMNFFKTEITLANGEIRKRPLIETNGETGEIVWDKGRDFATVRKVLSMPQVNIVKKTEVQTGGFSKESILPKRNSDKLIARKKDWDPKKYGGFDSPTVAYSVLVVAKVEKGKSKKLKSVKELLGITIMERSSFEKNPIDFLEAKGYKEVKKDLIIKLPKYSLFELENGRKRMLASAGELQKGNELALPSKYVNFLYLASHYEKLKGSPEDNEQKQLFVEQHKHYLDEIIEQISEFSKRVILADANLDKVLSAYNKHRDKPIREQAENIIHLFTLTNLGAPAAFKYFDTTIDRKRYTSTKEVLDATLIHQSITGLYETRIDLSQLGGDGGPAPAPAPAPAPAPGGTLGDQGSRGSDPLPEPRVTLTVEGIPTEFLVNTGAEHSVLTKPMGKMGSKRTVVAGATGSKVYPWTTKRLLKIGQKQVTHSFLVIPECPAPLLGRDLLTKLKAQIQFSTEGPQVTWEDRPAMCLVLNLEEEYRLHEKPVPPSIDPSWLQLFPMVWAEKAGMGLANQVPPVVVELKSDASPVAVRQYPMSKEAREGIRPHIQRFLDLGILVPCQSPWNTPLLPVKKPGTNDYRPVQDLREVNKRVQDIHPTVPNPYNLLSSLPPSHTWYSVLDLKDAFFCLKLHPNSQPLFAFEWRDPEKGNTGQLTWTRLPQGFKNSPTLFDEALHRDLASFRALNPQVVMLQYVDDLLVAAPTYRDCKEGTRRLLQELSKLGYRVSAKKAQLCREEVTYLGYLLKGGKRWLTPARKATVMKIPTPTTPRQVREFLGTAGFCRLWIPGFASLAAPLYPLTREKVPFTWTEAHQEAFGRIKEALLSAPALALPDLTKPFALYVDEKEGVARGVLTQTLGPWRRPVAYLSKKLDPVASGWPTCLKAIAAVALLLKDADKLTLGQNVLVIAPHNLESIVRQPPDRWMTNARMTHYQSLLLNERVSFAPPAILNPATLLPVESDDTPIHICSEILAEETGTRPDLRDQPLPGVPAWYTDGSSFIMDGRRQAGAAIVDNKRTVWASNLPEGTSAQKAELIALTQALRLAEGKSINIYTDSRYAFATAHVHGAIYKQRGLLTSAGKDIKNKEEILALLEAIHLPKRVAIIHCPGHQRGTDPVATGNRKADEAAKQAAQSTRILTETTKNAGKRTADGSEFEKRTADGSEFESPKKKAKVE

SEQ ID NO: 1610 - protein, 2127 aa, synthetic construct
MPAAKRVKLDGGDKKYSIGLDIGTNSVGWAVITDEYKVPSKKFKVLGNTDRHSIKKNLIGALLFDSGETAEATRLKRTARRRYTRRKNRICYLQEIFSNEMAKVDDSFFHRLEESFLVEEDKKHERHPIFGNIVDEVAYHEKYPTIYHLRKKLVDSTDKADLRLIYLALAHMIKFRGHFLIEGDLNPDNSDVDKLFIQLVQTYNQLFEENPINASGVDAKAILSARLSKSRRLENLIAQLPGEKKNGLFGNLIALSLGLTPNFKSNFDLAEDAKLQLSKDTYDDDLDNLLAQIGDQYADLFLAAKNLSDAILLSDILRVNTEITKAPLSASMIKRYDEHHQDLTLLKALVRQQLPEKYKEIFFDQSKNGYAGYIDGGASQEEFYKFIKPILEKMDGTEELLVKLNREDLLRKQRTFDNGSIPHQIHLGELHAILRRQEDFYPFLKDNREKIEKILTFRIPYYVGPLARGNSRFAWMTRKSEETITPWNFEEVVDKGASAQSFIERMTNFDKNLPNEKVLPKHSLLYEYFTVYNELTKVKYVTEGMRKPAFLSGEQKKAIVDLLFKTNRKVTVKQLKEDYFKKIECFDSVEISGVEDRFNASLGTYHDLLKIIKDKDFLDNEENEDILEDIVLTLTLFEDREMIEERLKTYAHLFDDKVMKQLKRRRYTGWGRLSRKLINGIRDKQSGKTILDFLKSDGFANRNFMQLIHDDSLTFKEDIQKAQVSGQGDSLHEHIANLAGSPAIKKGILQTVKVVDELVKVMGRHKPENIVIEMARENQTTQKGQKNSRERMKRIEEGIKELGSQILKEHPVENTQLQNEKLYLYYLQNGRDMYVDQELDINRLSDYDVDHIVPQSFLKDDSIDNKVLTRSDKARGKSDNVPSEEVVKKMKNYWRQLLNAKLITQRKFDNLTKAERGGLSELDKAGFIKRQLVETRQITKHVAQILDSRMNTKYDENDKLIREVKVITLKSKLVSDFRKDFQFYKVREINNYHHAHDAYLNAVVGTALIKKYPKLESEFVYGDYKVYDVRKMIAKSEQEIGKATAKYFFYSNIMNFFKTEITLANGEIRKRPLIETNGETGEIVWDKGRDFATVRKVLSMPQVNIVKKTEVQTGGFSKESILPKRNSDKLIARKKDWDPKKYGGFDSPTVAYSVLVVAKVEKGKSKKLKSVKELLGITIMERSSFEKNPIDFLEAKGYKEVKKDLIIKLPKYSLFELENGRKRMLASAGELQKGNELALPSKYVNFLYLASHYEKLKGSPEDNEQKQLFVEQHKHYLDEIIEQISEFSKRVILADANLDKVLSAYNKHRDKPIREQAENIIHLFTLTNLGAPAAFKYFDTTIDRKRYTSTKEVLDATLIHQSITGLYETRIDLSQLGGDGGEAAAKGGSPAPGGLLGRDLLTKLKAQIQFSTEGPQVTWEDRPAMCLVLNLEEEYRLHEKPVPPSIDPSWLQLFPMVWAEKAGMGLANQVPPVVVELKSDASPVAVRQYPMSKEAREGIRPHIQRFLDLGILVPCQSPWNTPLLPVKKPGTNDYRPVQDLREVNKRVQDIHPTVPNPYNLLSSLPPSHTWYSVLDLKDAFFCLKLHPNSQPLFAFEWRDPEKGNTGQLTWTRLPQGFKNSPTLFDEALHRDLASFRALNPQVVMLQYVDDLLVAAPTYRDCKEGTRRLLQELSKLGYRVSAKKAQLCREEVTYLGYLLKGGKRWLTPARKATVMKIPTPTTPRQVREFLGTAGFCRLWIPGFASLAAPLYPLTREKVPFTWTEAHQEAFGRIKEALLSAPALALPDLTKPFALYVDEKEGVARGVLTQTLGPWRRPVAYLSKKLDPVASGWPTCLKAIAAVALLLKDADKLTLGQNVLVIAPHNLESIVRQPPDRWMTNARMTHYQSLLLNERVSFAPPAILNPATLLPVESDDTPIHICSEILAEETGTRPDLRDQPLPGVPAWYTDGSSFIMDGRRQAGAAIVDNKRTVWASNLPEGTSAQKAELIALTQALRLAEGKSINIYTDSRYAFATAHVHGAIYKQRGLLTSAGKDIKNKEEILALLEAIHLPKRVAIIHCPGHQRGTDPVATGNRKADEAAKQAAQSTRILTETTKNAGKRTADGSEFEKRTADGSEFESPKKKAKVE

SEQ ID NO: 1611 - protein, 2125 aa, synthetic construct
MPAAKRVKLDGGDKKYSIGLDIGTNSVGWAVITDEYKVPSKKFKVLGNTDRHSIKKNLIGALLFDSGETAEATRLKRTARRRYTRRKNRICYLQEIFSNEMAKVDDSFFHRLEESFLVEEDKKHERHPIFGNIVDEVAYHEKYPTIYHLRKKLVDSTDKADLRLIYLALAHMIKFRGHFLIEGDLNPDNSDVDKLFIQLVQTYNQLFEENPINASGVDAKAILSARLSKSRRLENLIAQLPGEKKNGLFGNLIALSLGLTPNFKSNFDLAEDAKLQLSKDTYDDDLDNLLAQIGDQYADLFLAAKNLSDAILLSDILRVNTEITKAPLSASMIKRYDEHHQDLTLLKALVRQQLPEKYKEIFFDQSKNGYAGYIDGGASQEEFYKFIKPILEKMDGTEELLVKLNREDLLRKQRTFDNGSIPHQIHLGELHAILRRQEDFYPFLKDNREKIEKILTFRIPYYVGPLARGNSRFAWMTRKSEETITPWNFEEVVDKGASAQSFIERMTNFDKNLPNEKVLPKHSLLYEYFTVYNELTKVKYVTEGMRKPAFLSGEQKKAIVDLLFKTNRKVTVKQLKEDYFKKIECFDSVEISGVEDRFNASLGTYHDLLKIIKDKDFLDNEENEDILEDIVLTLTLFEDREMIEERLKTYAHLFDDKVMKQLKRRRYTGWGRLSRKLINGIRDKQSGKTILDFLKSDGFANRNFMQLIHDDSLTFKEDIQKAQVSGQGDSLHEHIANLAGSPAIKKGILQTVKVVDELVKVMGRHKPENIVIEMARENQTTQKGQKNSRERMKRIEEGIKELGSQILKEHPVENTQLQNEKLYLYYLQNGRDMYVDQELDINRLSDYDVDHIVPQSFLKDDSIDNKVLTRSDKARGKSDNVPSEEVVKKMKNYWRQLLNAKLITQRKFDNLTKAERGGLSELDKAGFIKRQLVETRQITKHVAQILDSRMNTKYDENDKLIREVKVITLKSKLVSDFRKDFQFYKVREINNYHHAHDAYLNAVVGTALIKKYPKLESEFVYGDYKVYDVRKMIAKSEQEIGKATAKYFFYSNIMNFFKTEITLANGEIRKRPLIETNGETGEIVWDKGRDFATVRKVLSMPQVNIVKKTEVQTGGFSKESILPKRNSDKLIARKKDWDPKKYGGFDSPTVAYSVLVVAKVEKGKSKKLKSVKELLGITIMERSSFEKNPIDFLEAKGYKEVKKDLIIKLPKYSLFELENGRKRMLASAGELQKGNELALPSKYVNFLYLASHYEKLKGSPEDNEQKQLFVEQHKHYLDEIIEQISEFSKRVILADANLDKVLSAYNKHRDKPIREQAENIIHLFTLTNLGAPAAFKYFDTTIDRKRYTSTKEVLDATLIHQSITGLYETRIDLSQLGGDGGGGGGGSGSSGGLLGRDLLTKLKAQIQFSTEGPQVTWEDRPAMCLVLNLEEEYRLHEKPVPPSIDPSWLQLFPMVWAEKAGMGLANQVPPVVVELKSDASPVAVRQYPMSKEAREGIRPHIQRFLDLGILVPCQSPWNTPLLPVKKPGTNDYRPVQDLREVNKRVQDIHPTVPNPYNLLSSLPPSHTWYSVLDLKDAFFCLKLHPNSQPLFAFEWRDPEKGNTGQLTWTRLPQGFKNSPTLFDEALHRDLASFRALNPQVVMLQYVDDLLVAAPTYRDCKEGTRRLLQELSKLGYRVSAKKAQLCREEVTYLGYLLKGGKRWLTPARKATVMKIPTPTTPRQVREFLGTAGFCRLWIPGFASLAAPLYPLTREKVPFTWTEAHQEAFGRIKEALLSAPALALPDLTKPFALYVDEKEGVARGVLTQTLGPWRRPVAYLSKKLDPVASGWPTCLKAIAAVALLLKDADKLTLGQNVLVIAPHNLESIVRQPPDRWMTNARMTHYQSLLLNERVSFAPPAILNPATLLPVESDDTPIHICSEILAEETGTRPDLRDQPLPGVPAWYTDGSSFIMDGRRQAGAAIVDNKRTVWASNLPEGTSAQKAELIALTQALRLAEGKSINIYTDSRYAFATAHVHGAIYKQRGLLTSAGKDIKNKEEILALLEAIHLPKRVAIIHCPGHQRGTDPVATGNRKADEAAKQAAQSTRILTETTKNAGKRTADGSEFEKRTADGSEFESPKKKAKVE

SEQ ID NO: 1612 - protein, 2127 aa, synthetic construct
MPAAKRVKLDGGDKKYSIGLDIGTNSVGWAVITDEYKVPSKKFKVLGNTDRHSIKKNLIGALLFDSGETAEATRLKRTARRRYTRRKNRICYLQEIFSNEMAKVDDSFFHRLEESFLVEEDKKHERHPIFGNIVDEVAYHEKYPTIYHLRKKLVDSTDKADLRLIYLALAHMIKFRGHFLIEGDLNPDNSDVDKLFIQLVQTYNQLFEENPINASGVDAKAILSARLSKSRRLENLIAQLPGEKKNGLFGNLIALSLGLTPNFKSNFDLAEDAKLQLSKDTYDDDLDNLLAQIGDQYADLFLAAKNLSDAILLSDILRVNTEITKAPLSASMIKRYDEHHQDLTLLKALVRQQLPEKYKEIFFDQSKNGYAGYIDGGASQEEFYKFIKPILEKMDGTEELLVKLNREDLLRKQRTFDNGSIPHQIHLGELHAILRRQEDFYPFLKDNREKIEKILTFRIPYYVGPLARGNSRFAWMTRKSEETITPWNFEEVVDKGASAQSFIERMTNFDKNLPNEKVLPKHSLLYEYFTVYNELTKVKYVTEGMRKPAFLSGEQKKAIVDLLFKTNRKVTVKQLKEDYFKKIECFDSVEISGVEDRFNASLGTYHDLLKIIKDKDFLDNEENEDILEDIVLTLTLFEDREMIEERLKTYAHLFDDKVMKQLKRRRYTGWGRLSRKLINGIRDKQSGKTILDFLKSDGFANRNFMQLIHDDSLTFKEDIQKAQVSGQGDSLHEHIANLAGSPAIKKGILQTVKVVDELVKVMGRHKPENIVIEMARENQTTQKGQKNSRERMKRIEEGIKELGSQILKEHPVENTQLQNEKLYLYYLQNGRDMYVDQELDINRLSDYDVDHIVPQSFLKDDSIDNKVLTRSDKARGKSDNVPSEEVVKKMKNYWRQLLNAKLITQRKFDNLTKAERGGLSELDKAGFIKRQLVETRQITKHVAQILDSRMNTKYDENDKLIREVKVITLKSKLVSDFRKDFQFYKVREINNYHHAHDAYLNAVVGTALIKKYPKLESEFVYGDYKVYDVRKMIAKSEQEIGKATAKYFFYSNIMNFFKTEITLANGEIRKRPLIETNGETGEIVWDKGRDFATVRKVLSMPQVNIVKKTEVQTGGFSKESILPKRNSDKLIARKKDWDPKKYGGFDSPTVAYSVLVVAKVEKGKSKKLKSVKELLGITIMERSSFEKNPIDFLEAKGYKEVKKDLIIKLPKYSLFELENGRKRMLASAGELQKGNELALPSKYVNFLYLASHYEKLKGSPEDNEQKQLFVEQHKHYLDEIIEQISEFSKRVILADANLDKVLSAYNKHRDKPIREQAENIIHLFTLTNLGAPAAFKYFDTTIDRKRYTSTKEVLDATLIHQSITGLYETRIDLSQLGGDGGEAAAKGGGPAPGGLLGRDLLTKLKAQIQFSTEGPQVTWEDRPAMCLVLNLEEEYRLHEKPVPPSIDPSWLQLFPMVWAEKAGMGLANQVPPVVVELKSDASPVAVRQYPMSKEAREGIRPHIQRFLDLGILVPCQSPWNTPLLPVKKPGTNDYRPVQDLREVNKRVQDIHPTVPNPYNLLSSLPPSHTWYSVLDLKDAFFCLKLHPNSQPLFAFEWRDPEKGNTGQLTWTRLPQGFKNSPTLFDEALHRDLASFRALNPQVVMLQYVDDLLVAAPTYRDCKEGTRRLLQELSKLGYRVSAKKAQLCREEVTYLGYLLKGGKRWLTPARKATVMKIPTPTTPRQVREFLGTAGFCRLWIPGFASLAAPLYPLTREKVPFTWTEAHQEAFGRIKEALLSAPALALPDLTKPFALYVDEKEGVARGVLTQTLGPWRRPVAYLSKKLDPVASGWPTCLKAIAAVALLLKDADKLTLGQNVLVIAPHNLESIVRQPPDRWMTNARMTHYQSLLLNERVSFAPPAILNPATLLPVESDDTPIHICSEILAEETGTRPDLRDQPLPGVPAWYTDGSSFIMDGRRQAGAAIVDNKRTVWASNLPEGTSAQKAELIALTQALRLAEGKSINIYTDSRYAFATAHVHGAIYKQRGLLTSAGKDIKNKEEILALLEAIHLPKRVAIIHCPGHQRGTDPVATGNRKADEAAKQAAQSTRILTETTKNAGKRTADGSEFEKRTADGSEFESPKKKAKVE

SEQ ID NO: 1613 - protein, 2127 aa, synthetic construct
MPAAKRVKLDGGDKKYSIGLDIGTNSVGWAVITDEYKVPSKKFKVLGNTDRHSIKKNLIGALLFDSGETAEATRLKRTARRRYTRRKNRICYLQEIFSNEMAKVDDSFFHRLEESFLVEEDKKHERHPIFGNIVDEVAYHEKYPTIYHLRKKLVDSTDKADLRLIYLALAHMIKFRGHFLIEGDLNPDNSDVDKLFIQLVQTYNQLFEENPINASGVDAKAILSARLSKSRRLENLIAQLPGEKKNGLFGNLIALSLGLTPNFKSNFDLAEDAKLQLSKDTYDDDLDNLLAQIGDQYADLFLAAKNLSDAILLSDILRVNTEITKAPLSASMIKRYDEHHQDLTLLKALVRQQLPEKYKEIFFDQSKNGYAGYIDGGASQEEFYKFIKPILEKMDGTEELLVKLNREDLLRKQRTFDNGSIPHQIHLGELHAILRRQEDFYPFLKDNREKIEKILTFRIPYYVGPLARGNSRFAWMTRKSEETITPWNFEEVVDKGASAQSFIERMTNFDKNLPNEKVLPKHSLLYEYFTVYNELTKVKYVTEGMRKPAFLSGEQKKAIVDLLFKTNRKVTVKQLKEDYFKKIECFDSVEISGVEDRFNASLGTYHDLLKIIKDKDFLDNEENEDILEDIVLTLTLFEDREMIEERLKTYAHLFDDKVMKQLKRRRYTGWGRLSRKLINGIRDKQSGKTILDFLKSDGFANRNFMQLIHDDSLTFKEDIQKAQVSGQGDSLHEHIANLAGSPAIKKGILQTVKVVDELVKVMGRHKPENIVIEMARENQTTQKGQKNSRERMKRIEEGIKELGSQILKEHPVENTQLQNEKLYLYYLQNGRDMYVDQELDINRLSDYDVDHIVPQSFLKDDSIDNKVLTRSDKARGKSDNVPSEEVVKKMKNYWRQLLNAKLITQRKFDNLTKAERGGLSELDKAGFIKRQLVETRQITKHVAQILDSRMNTKYDENDKLIREVKVITLKSKLVSDFRKDFQFYKVREINNYHHAHDAYLNAVVGTALIKKYPKLESEFVYGDYKVYDVRKMIAKSEQEIGKATAKYFFYSNIMNFFKTEITLANGEIRKRPLIETNGETGEIVWDKGRDFATVRKVLSMPQVNIVKKTEVQTGGFSKESILPKRNSDKLIARKKDWDPKKYGGFDSPTVAYSVLVVAKVEKGKSKKLKSVKELLGITIMERSSFEKNPIDFLEAKGYKEVKKDLIIKLPKYSLFELENGRKRMLASAGELQKGNELALPSKYVNFLYLASHYEKLKGSPEDNEQKQLFVEQHKHYLDEIIEQISEFSKRVILADANLDKVLSAYNKHRDKPIREQAENIIHLFTLTNLGAPAAFKYFDTTIDRKRYTSTKEVLDATLIHQSITGLYETRIDLSQLGGDGGEAAAKPAPGSSGGLLGRDLLTKLKAQIQFSTEGPQVTWEDRPAMCLVLNLEEEYRLHEKPVPPSIDPSWLQLFPMVWAEKAGMGLANQVPPVVVELKSDASPVAVRQYPMSKEAREGIRPHIQRFLDLGILVPCQSPWNTPLLPVKKPGTNDYRPVQDLREVNKRVQDIHPTVPNPYNLLSSLPPSHTWYSVLDLKDAFFCLKLHPNSQPLFAFEWRDPEKGNTGQLTWTRLPQGFKNSPTLFDEALHRDLASFRALNPQVVMLQYVDDLLVAAPTYRDCKEGTRRLLQELSKLGYRVSAKKAQLCREEVTYLGYLLKGGKRWLTPARKATVMKIPTPTTPRQVREFLGTAGFCRLWIPGFASLAAPLYPLTREKVPFTWTEAHQEAFGRIKEALLSAPALALPDLTKPFALYVDEKEGVARGVLTQTLGPWRRPVAYLSKKLDPVASGWPTCLKAIAAVALLLKDADKLTLGQNVLVIAPHNLESIVRQPPDRWMTNARMTHYQSLLLNERVSFAPPAILNPATLLPVESDDTPIHICSEILAEETGTRPDLRDQPLPGVPAWYTDGSSFIMDGRRQAGAAIVDNKRTVWASNLPEGTSAQKAELIALTQALRLAEGKSINIYTDSRYAFATAHVHGAIYKQRGLLTSAGKDIKNKEEILALLEAIHLPKRVAIIHCPGHQRGTDPVATGNRKADEAAKQAAQSTRILTETTKNAGKRTADGSEFEKRTADGSEFESPKKKAKVE

SEQ ID NO: 1614 - protein, 2127 aa, synthetic construct
MPAAKRVKLDGGDKKYSIGLDIGTNSVGWAVITDEYKVPSKKFKVLGNTDRHSIKKNLIGALLFDSGETAEATRLKRTARRRYTRRKNRICYLQEIFSNEMAKVDDSFFHRLEESFLVEEDKKHERHPIFGNIVDEVAYHEKYPTIYHLRKKLVDSTDKADLRLIYLALAHMIKFRGHFLIEGDLNPDNSDVDKLFIQLVQTYNQLFEENPINASGVDAKAILSARLSKSRRLENLIAQLPGEKKNGLFGNLIALSLGLTPNFKSNFDLAEDAKLQLSKDTYDDDLDNLLAQIGDQYADLFLAAKNLSDAILLSDILRVNTEITKAPLSASMIKRYDEHHQDLTLLKALVRQQLPEKYKEIFFDQSKNGYAGYIDGGASQEEFYKFIKPILEKMDGTEELLVKLNREDLLRKQRTFDNGSIPHQIHLGELHAILRRQEDFYPFLKDNREKIEKILTFRIPYYVGPLARGNSRFAWMTRKSEETITPWNFEEVVDKGASAQSFIERMTNFDKNLPNEKVLPKHSLLYEYFTVYNELTKVKYVTEGMRKPAFLSGEQKKAIVDLLFKTNRKVTVKQLKEDYFKKIECFDSVEISGVEDRFNASLGTYHDLLKIIKDKDFLDNEENEDILEDIVLTLTLFEDREMIEERLKTYAHLFDDKVMKQLKRRRYTGWGRLSRKLINGIRDKQSGKTILDFLKSDGFANRNFMQLIHDDSLTFKEDIQKAQVSGQGDSLHEHIANLAGSPAIKKGILQTVKVVDELVKVMGRHKPENIVIEMARENQTTQKGQKNSRERMKRIEEGIKELGSQILKEHPVENTQLQNEKLYLYYLQNGRDMYVDQELDINRLSDYDVDHIVPQSFLKDDSIDNKVLTRSDKARGKSDNVPSEEVVKKMKNYWRQLLNAKLITQRKFDNLTKAERGGLSELDKAGFIKRQLVETRQITKHVAQILDSRMNTKYDENDKLIREVKVITLKSKLVSDFRKDFQFYKVREINNYHHAHDAYLNAVVGTALIKKYPKLESEFVYGDYKVYDVRKMIAKSEQEIGKATAKYFFYSNIMNFFKTEITLANGEIRKRPLIETNGETGEIVWDKGRDFATVRKVLSMPQVNIVKKTEVQTGGFSKESILPKRNSDKLIARKKDWDPKKYGGFDSPTVAYSVLVVAKVEKGKSKKLKSVKELLGITIMERSSFEKNPIDFLEAKGYKEVKKDLIIKLPKYSLFELENGRKRMLASAGELQKGNELALPSKYVNFLYLASHYEKLKGSPEDNEQKQLFVEQHKHYLDEIIEQISEFSKRVILADANLDKVLSAYNKHRDKPIREQAENIIHLFTLTNLGAPAAFKYFDTTIDRKRYTSTKEVLDATLIHQSITGLYETRIDLSQLGGDGGPAPGGSEAAAKGGLLGRDLLTKLKAQIQFSTEGPQVTWEDRPAMCLVLNLEEEYRLHEKPVPPSIDPSWLQLFPMVWAEKAGMGLANQVPPVVVELKSDASPVAVRQYPMSKEAREGIRPHIQRFLDLGILVPCQSPWNTPLLPVKKPGTNDYRPVQDLREVNKRVQDIHPTVPNPYNLLSSLPPSHTWYSVLDLKDAFFCLKLHPNSQPLFAFEWRDPEKGNTGQLTWTRLPQGFKNSPTLFDEALHRDLASFRALNPQVVMLQYVDDLLVAAPTYRDCKEGTRRLLQELSKLGYRVSAKKAQLCREEVTYLGYLLKGGKRWLTPARKATVMKIPTPTTPRQVREFLGTAGFCRLWIPGFASLAAPLYPLTREKVPFTWTEAHQEAFGRIKEALLSAPALALPDLTKPFALYVDEKEGVARGVLTQTLGPWRRPVAYLSKKLDPVASGWPTCLKAIAAVALLLKDADKLTLGQNVLVIAPHNLESIVRQPPDRWMTNARMTHYQSLLLNERVSFAPPAILNPATLLPVESDDTPIHICSEILAEETGTRPDLRDQPLPGVPAWYTDGSSFIMDGRRQAGAAIVDNKRTVWASNLPEGTSAQKAELIALTQALRLAEGKSINIYTDSRYAFATAHVHGAIYKQRGLLTSAGKDIKNKEEILALLEAIHLPKRVAIIHCPGHQRGTDPVATGNRKADEAAKQAAQSTRILTETTKNAGKRTADGSEFEKRTADGSEFESPKKKAKVE

SEQ ID NO: 1615 - protein, 2134 aa, synthetic construct
MPAAKRVKLDGGDKKYSIGLDIGTNSVGWAVITDEYKVPSKKFKVLGNTDRHSIKKNLIGALLFDSGETAEATRLKRTARRRYTRRKNRICYLQEIFSNEMAKVDDSFFHRLEESFLVEEDKKHERHPIFGNIVDEVAYHEKYPTIYHLRKKLVDSTDKADLRLIYLALAHMIKFRGHFLIEGDLNPDNSDVDKLFIQLVQTYNQLFEENPINASGVDAKAILSARLSKSRRLENLIAQLPGEKKNGLFGNLIALSLGLTPNFKSNFDLAEDAKLQLSKDTYDDDLDNLLAQIGDQYADLFLAAKNLSDAILLSDILRVNTEITKAPLSASMIKRYDEHHQDLTLLKALVRQQLPEKYKEIFFDQSKNGYAGYIDGGASQEEFYKFIKPILEKMDGTEELLVKLNREDLLRKQRTFDNGSIPHQIHLGELHAILRRQEDFYPFLKDNREKIEKILTFRIPYYVGPLARGNSRFAWMTRKSEETITPWNFEEVVDKGASAQSFIERMTNFDKNLPNEKVLPKHSLLYEYFTVYNELTKVKYVTEGMRKPAFLSGEQKKAIVDLLFKTNRKVTVKQLKEDYFKKIECFDSVEISGVEDRFNASLGTYHDLLKIIKDKDFLDNEENEDILEDIVLTLTLFEDREMIEERLKTYAHLFDDKVMKQLKRRRYTGWGRLSRKLINGIRDKQSGKTILDFLKSDGFANRNFMQLIHDDSLTFKEDIQKAQVSGQGDSLHEHIANLAGSPAIKKGILQTVKVVDELVKVMGRHKPENIVIEMARENQTTQKGQKNSRERMKRIEEGIKELGSQILKEHPVENTQLQNEKLYLYYLQNGRDMYVDQELDINRLSDYDVDHIVPQSFLKDDSIDNKVLTRSDKARGKSDNVPSEEVVKKMKNYWRQLLNAKLITQRKFDNLTKAERGGLSELDKAGFIKRQLVETRQITKHVAQILDSRMNTKYDENDKLIREVKVITLKSKLVSDFRKDFQFYKVREINNYHHAHDAYLNAVVGTALIKKYPKLESEFVYGDYKVYDVRKMIAKSEQEIGKATAKYFFYSNIMNFFKTEITLANGEIRKRPLIETNGETGEIVWDKGRDFATVRKVLSMPQVNIVKKTEVQTGGFSKESILPKRNSDKLIARKKDWDPKKYGGFDSPTVAYSVLVVAKVEKGKSKKLKSVKELLGITIMERSSFEKNPIDFLEAKGYKEVKKDLIIKLPKYSLFELENGRKRMLASAGELQKGNELALPSKYVNFLYLASHYEKLKGSPEDNEQKQLFVEQHKHYLDEIIEQISEFSKRVILADANLDKVLSAYNKHRDKPIREQAENIIHLFTLTNLGAPAAFKYFDTTIDRKRYTSTKEVLDATLIHQSITGLYETRIDLSQLGGDGGGSSGSSGSSGSSGSSGSSGGLLGRDLLTKLKAQIQFSTEGPQVTWEDRPAMCLVLNLEEEYRLHEKPVPPSIDPSWLQLFPMVWAEKAGMGLANQVPPVVVELKSDASPVAVRQYPMSKEAREGIRPHIQRFLDLGILVPCQSPWNTPLLPVKKPGTNDYRPVQDLREVNKRVQDIHPTVPNPYNLLSSLPPSHTWYSVLDLKDAFFCLKLHPNSQPLFAFEWRDPEKGNTGQLTWTRLPQGFKNSPTLFDEALHRDLASFRALNPQVVMLQYVDDLLVAAPTYRDCKEGTRRLLQELSKLGYRVSAKKAQLCREEVTYLGYLLKGGKRWLTPARKATVMKIPTPTTPRQVREFLGTAGFCRLWIPGFASLAAPLYPLTREKVPFTWTEAHQEAFGRIKEALLSAPALALPDLTKPFALYVDEKEGVARGVLTQTLGPWRRPVAYLSKKLDPVASGWPTCLKAIAAVALLLKDADKLTLGQNVLVIAPHNLESIVRQPPDRWMTNARMTHYQSLLLNERVSFAPPAILNPATLLPVESDDTPIHICSEILAEETGTRPDLRDQPLPGVPAWYTDGSSFIMDGRRQAGAAIVDNKRTVWASNLPEGTSAQKAELIALTQALRLAEGKSINIYTDSRYAFATAHVHGAIYKQRGLLTSAGKDIKNKEEILALLEAIHLPKRVAIIHCPGHQRGTDPVATGNRKADEAAKQAAQSTRILTETTKNAGKRTADGSEFEKRTADGSEFESPKKKAKVE

SEQ ID NO: 1616 - protein, 2123 aa, synthetic construct
MPAAKRVKLDGGDKKYSIGLDIGTNSVGWAVITDEYKVPSKKFKVLGNTDRHSIKKNLIGALLFDSGETAEATRLKRTARRRYTRRKNRICYLQEIFSNEMAKVDDSFFHRLEESFLVEEDKKHERHPIFGNIVDEVAYHEKYPTIYHLRKKLVDSTDKADLRLIYLALAHMIKFRGHFLIEGDLNPDNSDVDKLFIQLVQTYNQLFEENPINASGVDAKAILSARLSKSRRLENLIAQLPGEKKNGLFGNLIALSLGLTPNFKSNFDLAEDAKLQLSKDTYDDDLDNLLAQIGDQYADLFLAAKNLSDAILLSDILRVNTEITKAPLSASMIKRYDEHHQDLTLLKALVRQQLPEKYKEIFFDQSKNGYAGYIDGGASQEEFYKFIKPILEKMDGTEELLVKLNREDLLRKQRTFDNGSIPHQIHLGELHAILRRQEDFYPFLKDNREKIEKILTFRIPYYVGPLARGNSRFAWMTRKSEETITPWNFEEVVDKGASAQSFIERMTNFDKNLPNEKVLPKHSLLYEYFTVYNELTKVKYVTEGMRKPAFLSGEQKKAIVDLLFKTNRKVTVKQLKEDYFKKIECFDSVEISGVEDRFNASLGTYHDLLKIIKDKDFLDNEENEDILEDIVLTLTLFEDREMIEERLKTYAHLFDDKVMKQLKRRRYTGWGRLSRKLINGIRDKQSGKTILDFLKSDGFANRNFMQLIHDDSLTFKEDIQKAQVSGQGDSLHEHIANLAGSPAIKKGILQTVKVVDELVKVMGRHKPENIVIEMARENQTTQKGQKNSRERMKRIEEGIKELGSQILKEHPVENTQLQNEKLYLYYLQNGRDMYVDQELDINRLSDYDVDHIVPQSFLKDDSIDNKVLTRSDKARGKSDNVPSEEVVKKMKNYWRQLLNAKLITQRKFDNLTKAERGGLSELDKAGFIKRQLVETRQITKHVAQILDSRMNTKYDENDKLIREVKVITLKSKLVSDFRKDFQFYKVREINNYHHAHDAYLNAVVGTALIKKYPKLESEFVYGDYKVYDVRKMIAKSEQEIGKATAKYFFYSNIMNFFKTEITLANGEIRKRPLIETNGETGEIVWDKGRDFATVRKVLSMPQVNIVKKTEVQTGGFSKESILPKRNSDKLIARKKDWDPKKYGGFDSPTVAYSVLVVAKVEKGKSKKLKSVKELLGITIMERSSFEKNPIDFLEAKGYKEVKKDLIIKLPKYSLFELENGRKRMLASAGELQKGNELALPSKYVNFLYLASHYEKLKGSPEDNEQKQLFVEQHKHYLDEIIEQISEFSKRVILADANLDKVLSAYNKHRDKPIREQAENIIHLFTLTNLGAPAAFKYFDTTIDRKRYTSTKEVLDATLIHQSITGLYETRIDLSQLGGDGGPAPAPAPGGLLGRDLLTKLKAQIQFSTEGPQVTWEDRPAMCLVLNLEEEYRLHEKPVPPSIDPSWLQLFPMVWAEKAGMGLANQVPPVVVELKSDASPVAVRQYPMSKEAREGIRPHIQRFLDLGILVPCQSPWNTPLLPVKKPGTNDYRPVQDLREVNKRVQDIHPTVPNPYNLLSSLPPSHTWYSVLDLKDAFFCLKLHPNSQPLFAFEWRDPEKGNTGQLTWTRLPQGFKNSPTLFNEALHRDLASFRALNPQVVMLQYVDDLLVAAPTYRDCKEGTRRLLQELSKLGYRVSAKKAQLCREEVTYLGYLLKGGKRWLTPARKATVMKIPTPTTPRQVREFLGTAGFCRLWIPGFASLAAPLYPLTRPKVPFTWTEAHQEAFGRIKEALLSAPALALPDLTKPFALYVDEKEGVARGVLTQTLGPWRRPVAYLSKKLDPVASGWPTCLKAIAAVALLLKDADKLTLGQNVLVIAPHNLESIVRQPPDRWMTNARMTHYQSLLLNERVSFAPPAILNPATLLPVESDDTPIHICSEILAEETGTRPDLRDQPLPGVPAWYTDGSSFIMDGRRQAGAAIVDNKRTVWASNLPEGTSAQKAELIALTQALRLAEGKSINIYTDSRYAFATAHVHGAIYKQRGWLTSAGKDIKNKEEILALLEAIHLPKRVAIIHCPGHQRGTDPVATGNRKADEAAKQAAQSTRILTETTKNAGKRTADGSEFEKRTADGSEFESPKKKAKVE

SEQ ID NO: 1617 - protein, 2131 aa, synthetic construct
MPAAKRVKLDGGDKKYSIGLDIGTNSVGWAVITDEYKVPSKKFKVLGNTDRHSIKKNLIGALLFDSGETAEATRLKRTARRRYTRRKNRICYLQEIFSNEMAKVDDSFFHRLEESFLVEEDKKHERHPIFGNIVDEVAYHEKYPTIYHLRKKLVDSTDKADLRLIYLALAHMIKFRGHFLIEGDLNPDNSDVDKLFIQLVQTYNQLFEENPINASGVDAKAILSARLSKSRRLENLIAQLPGEKKNGLFGNLIALSLGLTPNFKSNFDLAEDAKLQLSKDTYDDDLDNLLAQIGDQYADLFLAAKNLSDAILLSDILRVNTEITKAPLSASMIKRYDEHHQDLTLLKALVRQQLPEKYKEIFFDQSKNGYAGYIDGGASQEEFYKFIKPILEKMDGTEELLVKLNREDLLRKQRTFDNGSIPHQIHLGELHAILRRQEDFYPFLKDNREKIEKILTFRIPYYVGPLARGNSRFAWMTRKSEETITPWNFEEVVDKGASAQSFIERMTNFDKNLPNEKVLPKHSLLYEYFTVYNELTKVKYVTEGMRKPAFLSGEQKKAIVDLLFKTNRKVTVKQLKEDYFKKIECFDSVEISGVEDRFNASLGTYHDLLKIIKDKDFLDNEENEDILEDIVLTLTLFEDREMIEERLKTYAHLFDDKVMKQLKRRRYTGWGRLSRKLINGIRDKQSGKTILDFLKSDGFANRNFMQLIHDDSLTFKEDIQKAQVSGQGDSLHEHIANLAGSPAIKKGILQTVKVVDELVKVMGRHKPENIVIEMARENQTTQKGQKNSRERMKRIEEGIKELGSQILKEHPVENTQLQNEKLYLYYLQNGRDMYVDQELDINRLSDYDVDHIVPQSFLKDDSIDNKVLTRSDKARGKSDNVPSEEVVKKMKNYWRQLLNAKLITQRKFDNLTKAERGGLSELDKAGFIKRQLVETRQITKHVAQILDSRMNTKYDENDKLIREVKVITLKSKLVSDFRKDFQFYKVREINNYHHAHDAYLNAVVGTALIKKYPKLESEFVYGDYKVYDVRKMIAKSEQEIGKATAKYFFYSNIMNFFKTEITLANGEIRKRPLIETNGETGEIVWDKGRDFATVRKVLSMPQVNIVKKTEVQTGGFSKESILPKRNSDKLIARKKDWDPKKYGGFDSPTVAYSVLVVAKVEKGKSKKLKSVKELLGITIMERSSFEKNPIDFLEAKGYKEVKKDLIIKLPKYSLFELENGRKRMLASAGELQKGNELALPSKYVNFLYLASHYEKLKGSPEDNEQKQLFVEQHKHYLDEIIEQISEFSKRVILADANLDKVLSAYNKHRDKPIREQAENIIHLFTLTNLGAPAAFKYFDTTIDRKRYTSTKEVLDATLIHQSITGLYETRIDLSQLGGDGGGSSGSSGSSGSSGSSGGLLGRDLLTKLKAQIQFSTEGPQVTWEDRPAMCLVLNLEEEYRLHEKPVPPSIDPSWLQLFPMVWAEKAGMGLANQVPPVVVELKSDASPVAVRQYPMSKEAREGIRPHIQRFLDLGILVPCQSPWNTPLLPVKKPGTNDYRPVQDLREVNKRVQDIHPTVPNPYNLLSSLPPSHTWYSVLDLKDAFFCLKLHPNSQPLFAFEWRDPEKGNTGQLTWTRLPQGFKNSPTLFNEALHRDLASFRALNPQVVMLQYVDDLLVAAPTYRDCKEGTRRLLQELSKLGYRVSAKKAQLCREEVTYLGYLLKGGKRWLTPARKATVMKIPTPTTPRQVREFLGTAGFCRLWIPGFASLAAPLYPLTRPKVPFTWTEAHQEAFGRIKEALLSAPALALPDLTKPFALYVDEKEGVARGVLTQTLGPWRRPVAYLSKKLDPVASGWPTCLKAIAAVALLLKDADKLTLGQNVLVIAPHNLESIVRQPPDRWMTNARMTHYQSLLLNERVSFAPPAILNPATLLPVESDDTPIHICSEILAEETGTRPDLRDQPLPGVPAWYTDGSSFIMDGRRQAGAAIVDNKRTVWASNLPEGTSAQKAELIALTQALRLAEGKSINIYTDSRYAFATAHVHGAIYKQRGWLTSAGKDIKNKEEILALLEAIHLPKRVAIIHCPGHQRGTDPVATGNRKADEAAKQAAQSTRILTETTKNAGKRTADGSEFEKRTADGSEFESPKKKAKVE

SEQ ID NO: 1618 - protein, 2127 aa, synthetic construct
MPAAKRVKLDGGDKKYSIGLDIGTNSVGWAVITDEYKVPSKKFKVLGNTDRHSIKKNLIGALLFDSGETAEATRLKRTARRRYTRRKNRICYLQEIFSNEMAKVDDSFFHRLEESFLVEEDKKHERHPIFGNIVDEVAYHEKYPTIYHLRKKLVDSTDKADLRLIYLALAHMIKFRGHFLIEGDLNPDNSDVDKLFIQLVQTYNQLFEENPINASGVDAKAILSARLSKSRRLENLIAQLPGEKKNGLFGNLIALSLGLTPNFKSNFDLAEDAKLQLSKDTYDDDLDNLLAQIGDQYADLFLAAKNLSDAILLSDILRVNTEITKAPLSASMIKRYDEHHQDLTLLKALVRQQLPEKYKEIFFDQSKNGYAGYIDGGASQEEFYKFIKPILEKMDGTEELLVKLNREDLLRKQRTFDNGSIPHQIHLGELHAILRRQEDFYPFLKDNREKIEKILTFRIPYYVGPLARGNSRFAWMTRKSEETITPWNFEEVVDKGASAQSFIERMTNFDKNLPNEKVLPKHSLLYEYFTVYNELTKVKYVTEGMRKPAFLSGEQKKAIVDLLFKTNRKVTVKQLKEDYFKKIECFDSVEISGVEDRFNASLGTYHDLLKIIKDKDFLDNEENEDILEDIVLTLTLFEDREMIEERLKTYAHLFDDKVMKQLKRRRYTGWGRLSRKLINGIRDKQSGKTILDFLKSDGFANRNFMQLIHDDSLTFKEDIQKAQVSGQGDSLHEHIANLAGSPAIKKGILQTVKVVDELVKVMGRHKPENIVIEMARENQTTQKGQKNSRERMKRIEEGIKELGSQILKEHPVENTQLQNEKLYLYYLQNGRDMYVDQELDINRLSDYDVDHIVPQSFLKDDSIDNKVLTRSDKARGKSDNVPSEEVVKKMKNYWRQLLNAKLITQRKFDNLTKAERGGLSELDKAGFIKRQLVETRQITKHVAQILDSRMNTKYDENDKLIREVKVITLKSKLVSDFRKDFQFYKVREINNYHHAHDAYLNAVVGTALIKKYPKLESEFVYGDYKVYDVRKMIAKSEQEIGKATAKYFFYSNIMNFFKTEITLANGEIRKRPLIETNGETGEIVWDKGRDFATVRKVLSMPQVNIVKKTEVQTGGFSKESILPKRNSDKLIARKKDWDPKKYGGFDSPTVAYSVLVVAKVEKGKSKKLKSVKELLGITIMERSSFEKNPIDFLEAKGYKEVKKDLIIKLPKYSLFELENGRKRMLASAGELQKGNELALPSKYVNFLYLASHYEKLKGSPEDNEQKQLFVEQHKHYLDEIIEQISEFSKRVILADANLDKVLSAYNKHRDKPIREQAENIIHLFTLTNLGAPAAFKYFDTTIDRKRYTSTKEVLDATLIHQSITGLYETRIDLSQLGGDGGEAAAKPAPGSSGGLLGRDLLTKLKAQIQFSTEGPQVTWEDRPAMCLVLNLEEEYRLHEKPVPPSIDPSWLQLFPMVWAEKAGMGLANQVPPVVVELKSDASPVAVRQYPMSKEAREGIRPHIQRFLDLGILVPCQSPWNTPLLPVKKPGTNDYRPVQDLREVNKRVQDIHPTVPNPYNLLSSLPPSHTWYSVLDLKDAFFCLKLHPNSQPLFAFEWRDPEKGNTGQLTWTRLPQGFKNSPTLFNEALHRDLASFRALNPQVVMLQYVDDLLVAAPTYRDCKEGTRRLLQELSKLGYRVSAKKAQLCREEVTYLGYLLKGGKRWLTPARKATVMKIPTPTTPRQVREFLGTAGFCRLWIPGFASLAAPLYPLTRPKVPFTWTEAHQEAFGRIKEALLSAPALALPDLTKPFALYVDEKEGVARGVLTQTLGPWRRPVAYLSKKLDPVASGWPTCLKAIAAVALLLKDADKLTLGQNVLVIAPHNLESIVRQPPDRWMTNARMTHYQSLLLNERVSFAPPAILNPATLLPVESDDTPIHICSEILAEETGTRPDLRDQPLPGVPAWYTDGSSFIMDGRRQAGAAIVDNKRTVWASNLPEGTSAQKAELIALTQALRLAEGKSINIYTDSRYAFATAHVHGAIYKQRGWLTSAGKDIKNKEEILALLEAIHLPKRVAIIHCPGHQRGTDPVATGNRKADEAAKQAAQSTRILTETTKNAGKRTADGSEFEKRTADGSEFESPKKKAKVE

SEQ ID NO: 1619 - protein, 2127 aa, synthetic construct
MPAAKRVKLDGGDKKYSIGLDIGTNSVGWAVITDEYKVPSKKFKVLGNTDRHSIKKNLIGALLFDSGETAEATRLKRTARRRYTRRKNRICYLQEIFSNEMAKVDDSFFHRLEESFLVEEDKKHERHPIFGNIVDEVAYHEKYPTIYHLRKKLVDSTDKADLRLIYLALAHMIKFRGHFLIEGDLNPDNSDVDKLFIQLVQTYNQLFEENPINASGVDAKAILSARLSKSRRLENLIAQLPGEKKNGLFGNLIALSLGLTPNFKSNFDLAEDAKLQLSKDTYDDDLDNLLAQIGDQYADLFLAAKNLSDAILLSDILRVNTEITKAPLSASMIKRYDEHHQDLTLLKALVRQQLPEKYKEIFFDQSKNGYAGYIDGGASQEEFYKFIKPILEKMDGTEELLVKLNREDLLRKQRTFDNGSIPHQIHLGELHAILRRQEDFYPFLKDNREKIEKILTFRIPYYVGPLARGNSRFAWMTRKSEETITPWNFEEVVDKGASAQSFIERMTNFDKNLPNEKVLPKHSLLYEYFTVYNELTKVKYVTEGMRKPAFLSGEQKKAIVDLLFKTNRKVTVKQLKEDYFKKIECFDSVEISGVEDRFNASLGTYHDLLKIIKDKDFLDNEENEDILEDIVLTLTLFEDREMIEERLKTYAHLFDDKVMKQLKRRRYTGWGRLSRKLINGIRDKQSGKTILDFLKSDGFANRNFMQLIHDDSLTFKEDIQKAQVSGQGDSLHEHIANLAGSPAIKKGILQTVKVVDELVKVMGRHKPENIVIEMARENQTTQKGQKNSRERMKRIEEGIKELGSQILKEHPVENTQLQNEKLYLYYLQNGRDMYVDQELDINRLSDYDVDHIVPQSFLKDDSIDNKVLTRSDKARGKSDNVPSEEVVKKMKNYWRQLLNAKLITQRKFDNLTKAERGGLSELDKAGFIKRQLVETRQITKHVAQILDSRMNTKYDENDKLIREVKVITLKSKLVSDFRKDFQFYKVREINNYHHAHDAYLNAVVGTALIKKYPKLESEFVYGDYKVYDVRKMIAKSEQEIGKATAKYFFYSNIMNFFKTEITLANGEIRKRPLIETNGETGEIVWDKGRDFATVRKVLSMPQVNIVKKTEVQTGGFSKESILPKRNSDKLIARKKDWDPKKYGGFDSPTVAYSVLVVAKVEKGKSKKLKSVKELLGITIMERSSFEKNPIDFLEAKGYKEVKKDLIIKLPKYSLFELENGRKRMLASAGELQKGNELALPSKYVNFLYLASHYEKLKGSPEDNEQKQLFVEQHKHYLDEIIEQISEFSKRVILADANLDKVLSAYNKHRDKPIREQAENIIHLFTLTNLGAPAAFKYFDTTIDRKRYTSTKEVLDATLIHQSITGLYETRIDLSQLGGDGGPAPAPAPAPAPGGLLGRDLLTKLKAQIQFSTEGPQVTWEDRPAMCLVLNLEEEYRLHEKPVPPSIDPSWLQLFPMVWAEKAGMGLANQVPPVVVELKSDASPVAVRQYPMSKEAREGIRPHIQRFLDLGILVPCQSPWNTPLLPVKKPGTNDYRPVQDLREVNKRVQDIHPTVPNPYNLLSSLPPSHTWYSVLDLKDAFFCLKLHPNSQPLFAFEWRDPEKGNTGQLTWTRLPQGFKNSPTLFNEALHRDLASFRALNPQVVMLQYVDDLLVAAPTYRDCKEGTRRLLQELSKLGYRVSAKKAQLCREEVTYLGYLLKGGKRWLTPARKATVMKIPTPTTPRQVREFLGTAGFCRLWIPGFASLAAPLYPLTRPKVPFTWTEAHQEAFGRIKEALLSAPALALPDLTKPFALYVDEKEGVARGVLTQTLGPWRRPVAYLSKKLDPVASGWPTCLKAIAAVALLLKDADKLTLGQNVLVIAPHNLESIVRQPPDRWMTNARMTHYQSLLLNERVSFAPPAILNPATLLPVESDDTPIHICSEILAEETGTRPDLRDQPLPGVPAWYTDGSSFIMDGRRQAGAAIVDNKRTVWASNLPEGTSAQKAELIALTQALRLAEGKSINIYTDSRYAFATAHVHGAIYKQRGWLTSAGKDIKNKEEILALLEAIHLPKRVAIIHCPGHQRGTDPVATGNRKADEAAKQAAQSTRILTETTKNAGKRTADGSEFEKRTADGSEFESPKKKAKVE

SEQ ID NO: 1620 - protein, 2127 aa, synthetic construct
MPAAKRVKLDGGDKKYSIGLDIGTNSVGWAVITDEYKVPSKKFKVLGNTDRHSIKKNLIGALLFDSGETAEATRLKRTARRRYTRRKNRICYLQEIFSNEMAKVDDSFFHRLEESFLVEEDKKHERHPIFGNIVDEVAYHEKYPTIYHLRKKLVDSTDKADLRLIYLALAHMIKFRGHFLIEGDLNPDNSDVDKLFIQLVQTYNQLFEENPINASGVDAKAILSARLSKSRRLENLIAQLPGEKKNGLFGNLIALSLGLTPNFKSNFDLAEDAKLQLSKDTYDDDLDNLLAQIGDQYADLFLAAKNLSDAILLSDILRVNTEITKAPLSASMIKRYDEHHQDLTLLKALVRQQLPEKYKEIFFDQSKNGYAGYIDGGASQEEFYKFIKPILEKMDGTEELLVKLNREDLLRKQRTFDNGSIPHQIHLGELHAILRRQEDFYPFLKDNREKIEKILTFRIPYYVGPLARGNSRFAWMTRKSEETITPWNFEEVVDKGASAQSFIERMTNFDKNLPNEKVLPKHSLLYEYFTVYNELTKVKYVTEGMRKPAFLSGEQKKAIVDLLFKTNRKVTVKQLKEDYFKKIECFDSVEISGVEDRFNASLGTYHDLLKIIKDKDFLDNEENEDILEDIVLTLTLFEDREMIEERLKTYAHLFDDKVMKQLKRRRYTGWGRLSRKLINGIRDKQSGKTILDFLKSDGFANRNFMQLIHDDSLTFKEDIQKAQVSGQGDSLHEHIANLAGSPAIKKGILQTVKVVDELVKVMGRHKPENIVIEMARENQTTQKGQKNSRERMKRIEEGIKELGSQILKEHPVENTQLQNEKLYLYYLQNGRDMYVDQELDINRLSDYDVDHIVPQSFLKDDSIDNKVLTRSDKARGKSDNVPSEEVVKKMKNYWRQLLNAKLITQRKFDNLTKAERGGLSELDKAGFIKRQLVETRQITKHVAQILDSRMNTKYDENDKLIREVKVITLKSKLVSDFRKDFQFYKVREINNYHHAHDAYLNAVVGTALIKKYPKLESEFVYGDYKVYDVRKMIAKSEQEIGKATAKYFFYSNIMNFFKTEITLANGEIRKRPLIETNGETGEIVWDKGRDFATVRKVLSMPQVNIVKKTEVQTGGFSKESILPKRNSDKLIARKKDWDPKKYGGFDSPTVAYSVLVVAKVEKGKSKKLKSVKELLGITIMERSSFEKNPIDFLEAKGYKEVKKDLIIKLPKYSLFELENGRKRMLASAGELQKGNELALPSKYVNFLYLASHYEKLKGSPEDNEQKQLFVEQHKHYLDEIIEQISEFSKRVILADANLDKVLSAYNKHRDKPIREQAENIIHLFTLTNLGAPAAFKYFDTTIDRKRYTSTKEVLDATLIHQSITGLYETRIDLSQLGGDGGGGSPAPEAAAKGGLLGRDLLTKLKAQIQFSTEGPQVTWEDRPAMCLVLNLEEEYRLHEKPVPPSIDPSWLQLFPMVWAEKAGMGLANQVPPVVVELKSDASPVAVRQYPMSKEAREGIRPHIQRFLDLGILVPCQSPWNTPLLPVKKPGTNDYRPVQDLREVNKRVQDIHPTVPNPYNLLSSLPPSHTWYSVLDLKDAFFCLKLHPNSQPLFAFEWRDPEKGNTGQLTWTRLPQGFKNSPTLFNEALHRDLASFRALNPQVVMLQYVDDLLVAAPTYRDCKEGTRRLLQELSKLGYRVSAKKAQLCREEVTYLGYLLKGGKRWLTPARKATVMKIPTPTTPRQVREFLGTAGFCRLWIPGFASLAAPLYPLTRPKVPFTWTEAHQEAFGRIKEALLSAPALALPDLTKPFALYVDEKEGVARGVLTQTLGPWRRPVAYLSKKLDPVASGWPTCLKAIAAVALLLKDADKLTLGQNVLVIAPHNLESIVRQPPDRWMTNARMTHYQSLLLNERVSFAPPAILNPATLLPVESDDTPIHICSEILAEETGTRPDLRDQPLPGVPAWYTDGSSFIMDGRRQAGAAIVDNKRTVWASNLPEGTSAQKAELIALTQALRLAEGKSINIYTDSRYAFATAHVHGAIYKQRGWLTSAGKDIKNKEEILALLEAIHLPKRVAIIHCPGHQRGTDPVATGNRKADEAAKQAAQSTRILTETTKNAGKRTADGSEFEKRTADGSEFESPKKKAKVE

SEQ ID NO: 1621 - protein, 2146 aa, synthetic construct
MPAAKRVKLDGGDKKYSIGLDIGTNSVGWAVITDEYKVPSKKFKVLGNTDRHSIKKNLIGALLFDSGETAEATRLKRTARRRYTRRKNRICYLQEIFSNEMAKVDDSFFHRLEESFLVEEDKKHERHPIFGNIVDEVAYHEKYPTIYHLRKKLVDSTDKADLRLIYLALAHMIKFRGHFLIEGDLNPDNSDVDKLFIQLVQTYNQLFEENPINASGVDAKAILSARLSKSRRLENLIAQLPGEKKNGLFGNLIALSLGLTPNFKSNFDLAEDAKLQLSKDTYDDDLDNLLAQIGDQYADLFLAAKNLSDAILLSDILRVNTEITKAPLSASMIKRYDEHHQDLTLLKALVRQQLPEKYKEIFFDQSKNGYAGYIDGGASQEEFYKFIKPILEKMDGTEELLVKLNREDLLRKQRTFDNGSIPHQIHLGELHAILRRQEDFYPFLKDNREKIEKILTFRIPYYVGPLARGNSRFAWMTRKSEETITPWNFEEVVDKGASAQSFIERMTNFDKNLPNEKVLPKHSLLYEYFTVYNELTKVKYVTEGMRKPAFLSGEQKKAIVDLLFKTNRKVTVKQLKEDYFKKIECFDSVEISGVEDRFNASLGTYHDLLKIIKDKDFLDNEENEDILEDIVLTLTLFEDREMIEERLKTYAHLFDDKVMKQLKRRRYTGWGRLSRKLINGIRDKQSGKTILDFLKSDGFANRNFMQLIHDDSLTFKEDIQKAQVSGQGDSLHEHIANLAGSPAIKKGILQTVKVVDELVKVMGRHKPENIVIEMARENQTTQKGQKNSRERMKRIEEGIKELGSQILKEHPVENTQLQNEKLYLYYLQNGRDMYVDQELDINRLSDYDVDHIVPQSFLKDDSIDNKVLTRSDKARGKSDNVPSEEVVKKMKNYWRQLLNAKLITQRKFDNLTKAERGGLSELDKAGFIKRQLVETRQITKHVAQILDSRMNTKYDENDKLIREVKVITLKSKLVSDFRKDFQFYKVREINNYHHAHDAYLNAVVGTALIKKYPKLESEFVYGDYKVYDVRKMIAKSEQEIGKATAKYFFYSNIMNFFKTEITLANGEIRKRPLIETNGETGEIVWDKGRDFATVRKVLSMPQVNIVKKTEVQTGGFSKESILPKRNSDKLIARKKDWDPKKYGGFDSPTVAYSVLVVAKVEKGKSKKLKSVKELLGITIMERSSFEKNPIDFLEAKGYKEVKKDLIIKLPKYSLFELENGRKRMLASAGELQKGNELALPSKYVNFLYLASHYEKLKGSPEDNEQKQLFVEQHKHYLDEIIEQISEFSKRVILADANLDKVLSAYNKHRDKPIREQAENIIHLFTLTNLGAPAAFKYFDTTIDRKRYTSTKEVLDATLIHQSITGLYETRIDLSQLGGDGGEAAAKEAAAKEAAAKEAAAKEAAAKEAAAKGGLLGRDLLTKLKAQIQFSTEGPQVTWEDRPAMCLVLNLEEEYRLHEKPVPPSIDPSWLQLFPMVWAEKAGMGLANQVPPVVVELKSDASPVAVRQYPMSKEAREGIRPHIQRFLDLGILVPCQSPWNTPLLPVKKPGTNDYRPVQDLREVNKRVQDIHPTVPNPYNLLSSLPPSHTWYSVLDLKDAFFCLKLHPNSQPLFAFEWRDPEKGNTGQLTWTRLPQGFKNSPTLFNEALHRDLASFRALNPQVVMLQYVDDLLVAAPTYRDCKEGTRRLLQELSKLGYRVSAKKAQLCREEVTYLGYLLKGGKRWLTPARKATVMKIPTPTTPRQVREFLGTAGFCRLWIPGFASLAAPLYPLTRPKVPFTWTEAHQEAFGRIKEALLSAPALALPDLTKPFALYVDEKEGVARGVLTQTLGPWRRPVAYLSKKLDPVASGWPTCLKAIAAVALLLKDADKLTLGQNVLVIAPHNLESIVRQPPDRWMTNARMTHYQSLLLNERVSFAPPAILNPATLLPVESDDTPIHICSEILAEETGTRPDLRDQPLPGVPAWYTDGSSFIMDGRRQAGAAIVDNKRTVWASNLPEGTSAQKAELIALTQALRLAEGKSINIYTDSRYAFATAHVHGAIYKQRGWLTSAGKDIKNKEEILALLEAIHLPKRVAIIHCPGHQRGTDPVATGNRKADEAAKQAAQSTRILTETTKNAGKRTADGSEFEKRTADGSEFESPKKKAKVE

SEQ ID NO: 1622 - protein, 2162 aa, synthetic construct
MPAAKRVKLDGGDKKYSIGLDIGTNSVGWAVITDEYKVPSKKFKVLGNTDRHSIKKNLIGALLFDSGETAEATRLKRTARRRYTRRKNRICYLQEIFSNEMAKVDDSFFHRLEESFLVEEDKKHERHPIFGNIVDEVAYHEKYPTIYHLRKKLVDSTDKADLRLIYLALAHMIKFRGHFLIEGDLNPDNSDVDKLFIQLVQTYNQLFEENPINASGVDAKAILSARLSKSRRLENLIAQLPGEKKNGLFGNLIALSLGLTPNFKSNFDLAEDAKLQLSKDTYDDDLDNLLAQIGDQYADLFLAAKNLSDAILLSDILRVNTEITKAPLSASMIKRYDEHHQDLTLLKALVRQQLPEKYKEIFFDQSKNGYAGYIDGGASQEEFYKFIKPILEKMDGTEELLVKLNREDLLRKQRTFDNGSIPHQIHLGELHAILRRQEDFYPFLKDNREKIEKILTFRIPYYVGPLARGNSRFAWMTRKSEETITPWNFEEVVDKGASAQSFIERMTNFDKNLPNEKVLPKHSLLYEYFTVYNELTKVKYVTEGMRKPAFLSGEQKKAIVDLLFKTNRKVTVKQLKEDYFKKIECFDSVEISGVEDRFNASLGTYHDLLKIIKDKDFLDNEENEDILEDIVLTLTLFEDREMIEERLKTYAHLFDDKVMKQLKRRRYTGWGRLSRKLINGIRDKQSGKTILDFLKSDGFANRNFMQLIHDDSLTFKEDIQKAQVSGQGDSLHEHIANLAGSPAIKKGILQTVKVVDELVKVMGRHKPENIVIEMARENQTTQKGQKNSRERMKRIEEGIKELGSQILKEHPVENTQLQNEKLYLYYLQNGRDMYVDQELDINRLSDYDVDHIVPQSFLKDDSIDNKVLTRSDKARGKSDNVPSEEVVKKMKNYWRQLLNAKLITQRKFDNLTKAERGGLSELDKAGFIKRQLVETRQITKHVAQILDSRMNTKYDENDKLIREVKVITLKSKLVSDFRKDFQFYKVREINNYHHAHDAYLNAVVGTALIKKYPKLESEFVYGDYKVYDVRKMIAKSEQEIGKATAKYFFYSNIMNFFKTEITLANGEIRKRPLIETNGETGEIVWDKGRDFATVRKVLSMPQVNIVKKTEVQTGGFSKESILPKRNSDKLIARKKDWDPKKYGGFDSPTVAYSVLVVAKVEKGKSKKLKSVKELLGITIMERSSFEKNPIDFLEAKGYKEVKKDLIIKLPKYSLFELENGRKRMLASAGELQKGNELALPSKYVNFLYLASHYEKLKGSPEDNEQKQLFVEQHKHYLDEIIEQISEFSKRVILADANLDKVLSAYNKHRDKPIREQAENIIHLFTLTNLGAPAAFKYFDTTIDRKRYTSTKEVLDATLIHQSITGLYETRIDLSQLGGDGGAEAAAKEAAAKEAAAKEAAAKALEAEAAAKEAAAKEAAAKEAAAKAGGLLGRDLLTKLKAQIQFSTEGPQVTWEDRPAMCLVLNLEEEYRLHEKPVPPSIDPSWLQLFPMVWAEKAGMGLANQVPPVVVELKSDASPVAVRQYPMSKEAREGIRPHIQRFLDLGILVPCQSPWNTPLLPVKKPGTNDYRPVQDLREVNKRVQDIHPTVPNPYNLLSSLPPSHTWYSVLDLKDAFFCLKLHPNSQPLFAFEWRDPEKGNTGQLTWTRLPQGFKNSPTLFNEALHRDLASFRALNPQVVMLQYVDDLLVAAPTYRDCKEGTRRLLQELSKLGYRVSAKKAQLCREEVTYLGYLLKGGKRWLTPARKATVMKIPTPTTPRQVREFLGTAGFCRLWIPGFASLAAPLYPLTRPKVPFTWTEAHQEAFGRIKEALLSAPALALPDLTKPFALYVDEKEGVARGVLTQTLGPWRRPVAYLSKKLDPVASGWPTCLKAIAAVALLLKDADKLTLGQNVLVIAPHNLESIVRQPPDRWMTNARMTHYQSLLLNERVSFAPPAILNPATLLPVESDDTPIHICSEILAEETGTRPDLRDQPLPGVPAWYTDGSSFIMDGRRQAGAAIVDNKRTVWASNLPEGTSAQKAELIALTQALRLAEGKSINIYTDSRYAFATAHVHGAIYKQRGWLTSAGKDIKNKEEILALLEAIHLPKRVAIIHCPGHQRGTDPVATGNRKADEAAKQAAQSTRILTETTKNAGKRTADGSEFEKRTADGSEFESPKKKAKVE

SEQ ID NO: 1623 - protein, 2127 aa, synthetic construct
MPAAKRVKLDGGDKKYSIGLDIGTNSVGWAVITDEYKVPSKKFKVLGNTDRHSIKKNLIGALLFDSGETAEATRLKRTARRRYTRRKNRICYLQEIFSNEMAKVDDSFFHRLEESFLVEEDKKHERHPIFGNIVDEVAYHEKYPTIYHLRKKLVDSTDKADLRLIYLALAHMIKFRGHFLIEGDLNPDNSDVDKLFIQLVQTYNQLFEENPINASGVDAKAILSARLSKSRRLENLIAQLPGEKKNGLFGNLIALSLGLTPNFKSNFDLAEDAKLQLSKDTYDDDLDNLLAQIGDQYADLFLAAKNLSDAILLSDILRVNTEITKAPLSASMIKRYDEHHQDLTLLKALVRQQLPEKYKEIFFDQSKNGYAGYIDGGASQEEFYKFIKPILEKMDGTEELLVKLNREDLLRKQRTFDNGSIPHQIHLGELHAILRRQEDFYPFLKDNREKIEKILTFRIPYYVGPLARGNSRFAWMTRKSEETITPWNFEEVVDKGASAQSFIERMTNFDKNLPNEKVLPKHSLLYEYFTVYNELTKVKYVTEGMRKPAFLSGEQKKAIVDLLFKTNRKVTVKQLKEDYFKKIECFDSVEISGVEDRFNASLGTYHDLLKIIKDKDFLDNEENEDILEDIVLTLTLFEDREMIEERLKTYAHLFDDKVMKQLKRRRYTGWGRLSRKLINGIRDKQSGKTILDFLKSDGFANRNFMQLIHDDSLTFKEDIQKAQVSGQGDSLHEHIANLAGSPAIKKGILQTVKVVDELVKVMGRHKPENIVIEMARENQTTQKGQKNSRERMKRIEEGIKELGSQILKEHPVENTQLQNEKLYLYYLQNGRDMYVDQELDINRLSDYDVDHIVPQSFLKDDSIDNKVLTRSDKARGKSDNVPSEEVVKKMKNYWRQLLNAKLITQRKFDNLTKAERGGLSELDKAGFIKRQLVETRQITKHVAQILDSRMNTKYDENDKLIREVKVITLKSKLVSDFRKDFQFYKVREINNYHHAHDAYLNAVVGTALIKKYPKLESEFVYGDYKVYDVRKMIAKSEQEIGKATAKYFFYSNIMNFFKTEITLANGEIRKRPLIETNGETGEIVWDKGRDFATVRKVLSMPQVNIVKKTEVQTGGFSKESILPKRNSDKLIARKKDWDPKKYGGFDSPTVAYSVLVVAKVEKGKSKKLKSVKELLGITIMERSSFEKNPIDFLEAKGYKEVKKDLIIKLPKYSLFELENGRKRMLASAGELQKGNELALPSKYVNFLYLASHYEKLKGSPEDNEQKQLFVEQHKHYLDEIIEQISEFSKRVILADANLDKVLSAYNKHRDKPIREQAENIIHLFTLTNLGAPAAFKYFDTTIDRKRYTSTKEVLDATLIHQSITGLYETRIDLSQLGGDGGGSSEAAAKGGSGGLLGRDLLTKLKAQIQFSTEGPQVTWEDRPAMCLVLNLEEEYRLHEKPVPPSIDPSWLQLFPMVWAEKAGMGLANQVPPVVVELKSDASPVAVRQYPMSKEAREGIRPHIQRFLDLGILVPCQSPWNTPLLPVKKPGTNDYRPVQDLREVNKRVQDIHPTVPNPYNLLSSLPPSHTWYSVLDLKDAFFCLKLHPNSQPLFAFEWRDPEKGNTGQLTWTRLPQGFKNSPTLFNEALHRDLASFRALNPQVVMLQYVDDLLVAAPTYRDCKEGTRRLLQELSKLGYRVSAKKAQLCREEVTYLGYLLKGGKRWLTPARKATVMKIPTPTTPRQVREFLGTAGFCRLWIPGFASLAAPLYPLTRPKVPFTWTEAHQEAFGRIKEALLSAPALALPDLTKPFALYVDEKEGVARGVLTQTLGPWRRPVAYLSKKLDPVASGWPTCLKAIAAVALLLKDADKLTLGQNVLVIAPHNLESIVRQPPDRWMTNARMTHYQSLLLNERVSFAPPAILNPATLLPVESDDTPIHICSEILAEETGTRPDLRDQPLPGVPAWYTDGSSFIMDGRRQAGAAIVDNKRTVWASNLPEGTSAQKAELIALTQALRLAEGKSINIYTDSRYAFATAHVHGAIYKQRGWLTSAGKDIKNKEEILALLEAIHLPKRVAIIHCPGHQRGTDPVATGNRKADEAAKQAAQSTRILTETTKNAGKRTADGSEFEKRTADGSEFESPKKKAKVE

SEQ ID NO: 1624 - protein, 2127 aa, synthetic construct
MPAAKRVKLDGGDKKYSIGLDIGTNSVGWAVITDEYKVPSKKFKVLGNTDRHSIKKNLIGALLFDSGETAEATRLKRTARRRYTRRKNRICYLQEIFSNEMAKVDDSFFHRLEESFLVEEDKKHERHPIFGNIVDEVAYHEKYPTIYHLRKKLVDSTDKADLRLIYLALAHMIKFRGHFLIEGDLNPDNSDVDKLFIQLVQTYNQLFEENPINASGVDAKAILSARLSKSRRLENLIAQLPGEKKNGLFGNLIALSLGLTPNFKSNFDLAEDAKLQLSKDTYDDDLDNLLAQIGDQYADLFLAAKNLSDAILLSDILRVNTEITKAPLSASMIKRYDEHHQDLTLLKALVRQQLPEKYKEIFFDQSKNGYAGYIDGGASQEEFYKFIKPILEKMDGTEELLVKLNREDLLRKQRTFDNGSIPHQIHLGELHAILRRQEDFYPFLKDNREKIEKILTFRIPYYVGPLARGNSRFAWMTRKSEETITPWNFEEVVDKGASAQSFIERMTNFDKNLPNEKVLPKHSLLYEYFTVYNELTKVKYVTEGMRKPAFLSGEQKKAIVDLLFKTNRKVTVKQLKEDYFKKIECFDSVEISGVEDRFNASLGTYHDLLKIIKDKDFLDNEENEDILEDIVLTLTLFEDREMIEERLKTYAHLFDDKVMKQLKRRRYTGWGRLSRKLINGIRDKQSGKTILDFLKSDGFANRNFMQLIHDDSLTFKEDIQKAQVSGQGDSLHEHIANLAGSPAIKKGILQTVKVVDELVKVMGRHKPENIVIEMARENQTTQKGQKNSRERMKRIEEGIKELGSQILKEHPVENTQLQNEKLYLYYLQNGRDMYVDQELDINRLSDYDVDHIVPQSFLKDDSIDNKVLTRSDKARGKSDNVPSEEVVKKMKNYWRQLLNAKLITQRKFDNLTKAERGGLSELDKAGFIKRQLVETRQITKHVAQILDSRMNTKYDENDKLIREVKVITLKSKLVSDFRKDFQFYKVREINNYHHAHDAYLNAVVGTALIKKYPKLESEFVYGDYKVYDVRKMIAKSEQEIGKATAKYFFYSNIMNFFKTEITLANGEIRKRPLIETNGETGEIVWDKGRDFATVRKVLSMPQVNIVKKTEVQTGGFSKESILPKRNSDKLIARKKDWDPKKYGGFDSPTVAYSVLVVAKVEKGKSKKLKSVKELLGITIMERSSFEKNPIDFLEAKGYKEVKKDLIIKLPKYSLFELENGRKRMLASAGELQKGNELALPSKYVNFLYLASHYEKLKGSPEDNEQKQLFVEQHKHYLDEIIEQISEFSKRVILADANLDKVLSAYNKHRDKPIREQAENIIHLFTLTNLGAPAAFKYFDTTIDRKRYTSTKEVLDATLIHQSITGLYETRIDLSQLGGDGGEAAAKGSSPAPGGLLGRDLLTKLKAQIQFSTEGPQVTWEDRPAMCLVLNLEEEYRLHEKPVPPSIDPSWLQLFPMVWAEKAGMGLANQVPPVVVELKSDASPVAVRQYPMSKEAREGIRPHIQRFLDLGILVPCQSPWNTPLLPVKKPGTNDYRPVQDLREVNKRVQDIHPTVPNPYNLLSSLPPSHTWYSVLDLKDAFFCLKLHPNSQPLFAFEWRDPEKGNTGQLTWTRLPQGFKNSPTLFNEALHRDLASFRALNPQVVMLQYVDDLLVAAPTYRDCKEGTRRLLQELSKLGYRVSAKKAQLCREEVTYLGYLLKGGKRWLTPARKATVMKIPTPTTPRQVREFLGTAGFCRLWIPGFASLAAPLYPLTRPKVPFTWTEAHQEAFGRIKEALLSAPALALPDLTKPFALYVDEKEGVARGVLTQTLGPWRRPVAYLSKKLDPVASGWPTCLKAIAAVALLLKDADKLTLGQNVLVIAPHNLESIVRQPPDRWMTNARMTHYQSLLLNERVSFAPPAILNPATLLPVESDDTPIHICSEILAEETGTRPDLRDQPLPGVPAWYTDGSSFIMDGRRQAGAAIVDNKRTVWASNLPEGTSAQKAELIALTQALRLAEGKSINIYTDSRYAFATAHVHGAIYKQRGWLTSAGKDIKNKEEILALLEAIHLPKRVAIIHCPGHQRGTDPVATGNRKADEAAKQAAQSTRILTETTKNAGKRTADGSEFEKRTADGSEFESPKKKAKVE

SEQ ID NO: 1625 - protein, 2122 aa, synthetic construct
MPAAKRVKLDGGDKKYSIGLDIGTNSVGWAVITDEYKVPSKKFKVLGNTDRHSIKKNLIGALLFDSGETAEATRLKRTARRRYTRRKNRICYLQEIFSNEMAKVDDSFFHRLEESFLVEEDKKHERHPIFGNIVDEVAYHEKYPTIYHLRKKLVDSTDKADLRLIYLALAHMIKFRGHFLIEGDLNPDNSDVDKLFIQLVQTYNQLFEENPINASGVDAKAILSARLSKSRRLENLIAQLPGEKKNGLFGNLIALSLGLTPNFKSNFDLAEDAKLQLSKDTYDDDLDNLLAQIGDQYADLFLAAKNLSDAILLSDILRVNTEITKAPLSASMIKRYDEHHQDLTLLKALVRQQLPEKYKEIFFDQSKNGYAGYIDGGASQEEFYKFIKPILEKMDGTEELLVKLNREDLLRKQRTFDNGSIPHQIHLGELHAILRRQEDFYPFLKDNREKIEKILTFRIPYYVGPLARGNSRFAWMTRKSEETITPWNFEEVVDKGASAQSFIERMTNFDKNLPNEKVLPKHSLLYEYFTVYNELTKVKYVTEGMRKPAFLSGEQKKAIVDLLFKTNRKVTVKQLKEDYFKKIECFDSVEISGVEDRFNASLGTYHDLLKIIKDKDFLDNEENEDILEDIVLTLTLFEDREMIEERLKTYAHLFDDKVMKQLKRRRYTGWGRLSRKLINGIRDKQSGKTILDFLKSDGFANRNFMQLIHDDSLTFKEDIQKAQVSGQGDSLHEHIANLAGSPAIKKGILQTVKVVDELVKVMGRHKPENIVIEMARENQTTQKGQKNSRERMKRIEEGIKELGSQILKEHPVENTQLQNEKLYLYYLQNGRDMYVDQELDINRLSDYDVDHIVPQSFLKDDSIDNKVLTRSDKARGKSDNVPSEEVVKKMKNYWRQLLNAKLITQRKFDNLTKAERGGLSELDKAGFIKRQLVETRQITKHVAQILDSRMNTKYDENDKLIREVKVITLKSKLVSDFRKDFQFYKVREINNYHHAHDAYLNAVVGTALIKKYPKLESEFVYGDYKVYDVRKMIAKSEQEIGKATAKYFFYSNIMNFFKTEITLANGEIRKRPLIETNGETGEIVWDKGRDFATVRKVLSMPQVNIVKKTEVQTGGFSKESILPKRNSDKLIARKKDWDPKKYGGFDSPTVAYSVLVVAKVEKGKSKKLKSVKELLGITIMERSSFEKNPIDFLEAKGYKEVKKDLIIKLPKYSLFELENGRKRMLASAGELQKGNELALPSKYVNFLYLASHYEKLKGSPEDNEQKQLFVEQHKHYLDEIIEQISEFSKRVILADANLDKVLSAYNKHRDKPIREQAENIIHLFTLTNLGAPAAFKYFDTTIDRKRYTSTKEVLDATLIHQSITGLYETRIDLSQLGGDGGGSSGSSGGLLGRDLLTKLKAQIQFSTEGPQVTWEDRPAMCLVLNLEEEYRLHEKPVPPSIDPSWLQLFPMVWAEKAGMGLANQVPPVVVELKSDASPVAVRQYPMSKEAREGIRPHIQRFLDLGILVPCQSPWNTPLLPVKKPGTNDYRPVQDLREVNKRVQDIHPTVPNPYNLLSSLPPSHTWYSVLDLKDAFFCLKLHPNSQPLFAFEWRDPEKGNTGQLTWTRLPQGFKNSPTLFNEALHRDLASFRALNPQVVMLQYVDDLLVAAPTYRDCKEGTRRLLQELSKLGYRVSAKKAQLCREEVTYLGYLLKGGKRWLTPARKATVMKIPTPTTPRQVREFLGTAGFCRLWIPGFASLAAPLYPLTRPKVPFTWTEAHQEAFGRIKEALLSAPALALPDLTKPFALYVDEKEGVARGVLTQTLGPWRRPVAYLSKKLDPVASGWPTCLKAIAAVALLLKDADKLTLGQNVLVIAPHNLESIVRQPPDRWMTNARMTHYQSLLLNERVSFAPPAILNPATLLPVESDDTPIHICSEILAEETGTRPDLRDQPLPGVPAWYTDGSSFIMDGRRQAGAAIVDNKRTVWASNLPEGTSAQKAELIALTQALRLAEGKSINIYTDSRYAFATAHVHGAIYKQRGWLTSAGKDIKNKEEILALLEAIHLPKRVAIIHCPGHQRGTDPVATGNRKADEAAKQAAQSTRILTETTKNAGKRTADGSEFEKRTADGSEFESPKKKAKVE

SEQ ID NO: 1626 - protein, 2122 aa, synthetic construct
MPAAKRVKLDGGDKKYSIGLDIGTNSVGWAVITDEYKVPSKKFKVLGNTDRHSIKKNLIGALLFDSGETAEATRLKRTARRRYTRRKNRICYLQEIFSNEMAKVDDSFFHRLEESFLVEEDKKHERHPIFGNIVDEVAYHEKYPTIYHLRKKLVDSTDKADLRLIYLALAHMIKFRGHFLIEGDLNPDNSDVDKLFIQLVQTYNQLFEENPINASGVDAKAILSARLSKSRRLENLIAQLPGEKKNGLFGNLIALSLGLTPNFKSNFDLAEDAKLQLSKDTYDDDLDNLLAQIGDQYADLFLAAKNLSDAILLSDILRVNTEITKAPLSASMIKRYDEHHQDLTLLKALVRQQLPEKYKEIFFDQSKNGYAGYIDGGASQEEFYKFIKPILEKMDGTEELLVKLNREDLLRKQRTFDNGSIPHQIHLGELHAILRRQEDFYPFLKDNREKIEKILTFRIPYYVGPLARGNSRFAWMTRKSEETITPWNFEEVVDKGASAQSFIERMTNFDKNLPNEKVLPKHSLLYEYFTVYNELTKVKYVTEGMRKPAFLSGEQKKAIVDLLFKTNRKVTVKQLKEDYFKKIECFDSVEISGVEDRFNASLGTYHDLLKIIKDKDFLDNEENEDILEDIVLTLTLFEDREMIEERLKTYAHLFDDKVMKQLKRRRYTGWGRLSRKLINGIRDKQSGKTILDFLKSDGFANRNFMQLIHDDSLTFKEDIQKAQVSGQGDSLHEHIANLAGSPAIKKGILQTVKVVDELVKVMGRHKPENIVIEMARENQTTQKGQKNSRERMKRIEEGIKELGSQILKEHPVENTQLQNEKLYLYYLQNGRDMYVDQELDINRLSDYDVDHIVPQSFLKDDSIDNKVLTRSDKARGKSDNVPSEEVVKKMKNYWRQLLNAKLITQRKFDNLTKAERGGLSELDKAGFIKRQLVETRQITKHVAQILDSRMNTKYDENDKLIREVKVITLKSKLVSDFRKDFQFYKVREINNYHHAHDAYLNAVVGTALIKKYPKLESEFVYGDYKVYDVRKMIAKSEQEIGKATAKYFFYSNIMNFFKTEITLANGEIRKRPLIETNGETGEIVWDKGRDFATVRKVLSMPQVNIVKKTEVQTGGFSKESILPKRNSDKLIARKKDWDPKKYGGFDSPTVAYSVLVVAKVEKGKSKKLKSVKELLGITIMERSSFEKNPIDFLEAKGYKEVKKDLIIKLPKYSLFELENGRKRMLASAGELQKGNELALPSKYVNFLYLASHYEKLKGSPEDNEQKQLFVEQHKHYLDEIIEQISEFSKRVILADANLDKVLSAYNKHRDKPIREQAENIIHLFTLTNLGAPAAFKYFDTTIDRKRYTSTKEVLDATLIHQSITGLYETRIDLSQLGGDGGGGSGGGGGLLGRDLLTKLKAQIQFSTEGPQVTWEDRPAMCLVLNLEEEYRLHEKPVPPSIDPSWLQLFPMVWAEKAGMGLANQVPPVVVELKSDASPVAVRQYPMSKEAREGIRPHIQRFLDLGILVPCQSPWNTPLLPVKKPGTNDYRPVQDLREVNKRVQDIHPTVPNPYNLLSSLPPSHTWYSVLDLKDAFFCLKLHPNSQPLFAFEWRDPEKGNTGQLTWTRLPQGFKNSPTLFNEALHRDLASFRALNPQVVMLQYVDDLLVAAPTYRDCKEGTRRLLQELSKLGYRVSAKKAQLCREEVTYLGYLLKGGKRWLTPARKATVMKIPTPTTPRQVREFLGTAGFCRLWIPGFASLAAPLYPLTRPKVPFTWTEAHQEAFGRIKEALLSAPALALPDLTKPFALYVDEKEGVARGVLTQTLGPWRRPVAYLSKKLDPVASGWPTCLKAIAAVALLLKDADKLTLGQNVLVIAPHNLESIVRQPPDRWMTNARMTHYQSLLLNERVSFAPPAILNPATLLPVESDDTPIHICSEILAEETGTRPDLRDQPLPGVPAWYTDGSSFIMDGRRQAGAAIVDNKRTVWASNLPEGTSAQKAELIALTQALRLAEGKSINIYTDSRYAFATAHVHGAIYKQRGWLTSAGKDIKNKEEILALLEAIHLPKRVAIIHCPGHQRGTDPVATGNRKADEAAKQAAQSTRILTETTKNAGKRTADGSEFEKRTADGSEFESPKKKAKVE

SEQ ID NO: 1627 - protein, 2122 aa, synthetic construct
MPAAKRVKLDGGDKKYSIGLDIGTNSVGWAVITDEYKVPSKKFKVLGNTDRHSIKKNLIGALLFDSGETAEATRLKRTARRRYTRRKNRICYLQEIFSNEMAKVDDSFFHRLEESFLVEEDKKHERHPIFGNIVDEVAYHEKYPTIYHLRKKLVDSTDKADLRLIYLALAHMIKFRGHFLIEGDLNPDNSDVDKLFIQLVQTYNQLFEENPINASGVDAKAILSARLSKSRRLENLIAQLPGEKKNGLFGNLIALSLGLTPNFKSNFDLAEDAKLQLSKDTYDDDLDNLLAQIGDQYADLFLAAKNLSDAILLSDILRVNTEITKAPLSASMIKRYDEHHQDLTLLKALVRQQLPEKYKEIFFDQSKNGYAGYIDGGASQEEFYKFIKPILEKMDGTEELLVKLNREDLLRKQRTFDNGSIPHQIHLGELHAILRRQEDFYPFLKDNREKIEKILTFRIPYYVGPLARGNSRFAWMTRKSEETITPWNFEEVVDKGASAQSFIERMTNFDKNLPNEKVLPKHSLLYEYFTVYNELTKVKYVTEGMRKPAFLSGEQKKAIVDLLFKTNRKVTVKQLKEDYFKKIECFDSVEISGVEDRFNASLGTYHDLLKIIKDKDFLDNEENEDILEDIVLTLTLFEDREMIEERLKTYAHLFDDKVMKQLKRRRYTGWGRLSRKLINGIRDKQSGKTILDFLKSDGFANRNFMQLIHDDSLTFKEDIQKAQVSGQGDSLHEHIANLAGSPAIKKGILQTVKVVDELVKVMGRHKPENIVIEMARENQTTQKGQKNSRERMKRIEEGIKELGSQILKEHPVENTQLQNEKLYLYYLQNGRDMYVDQELDINRLSDYDVDHIVPQSFLKDDSIDNKVLTRSDKARGKSDNVPSEEVVKKMKNYWRQLLNAKLITQRKFDNLTKAERGGLSELDKAGFIKRQLVETRQITKHVAQILDSRMNTKYDENDKLIREVKVITLKSKLVSDFRKDFQFYKVREINNYHHAHDAYLNAVVGTALIKKYPKLESEFVYGDYKVYDVRKMIAKSEQEIGKATAKYFFYSNIMNFFKTEITLANGEIRKRPLIETNGETGEIVWDKGRDFATVRKVLSMPQVNIVKKTEVQTGGFSKESILPKRNSDKLIARKKDWDPKKYGGFDSPTVAYSVLVVAKVEKGKSKKLKSVKELLGITIMERSSFEKNPIDFLEAKGYKEVKKDLIIKLPKYSLFELENGRKRMLASAGELQKGNELALPSKYVNFLYLASHYEKLKGSPEDNEQKQLFVEQHKHYLDEIIEQISEFSKRVILADANLDKVLSAYNKHRDKPIREQAENIIHLFTLTNLGAPAAFKYFDTTIDRKRYTSTKEVLDATLIHQSITGLYETRIDLSQLGGDGGPAPGSSGGLLGRDLLTKLKAQIQFSTEGPQVTWEDRPAMCLVLNLEEEYRLHEKPVPPSIDPSWLQLFPMVWAEKAGMGLANQVPPVVVELKSDASPVAVRQYPMSKEAREGIRPHIQRFLDLGILVPCQSPWNTPLLPVKKPGTNDYRPVQDLREVNKRVQDIHPTVPNPYNLLSSLPPSHTWYSVLDLKDAFFCLKLHPNSQPLFAFEWRDPEKGNTGQLTWTRLPQGFKNSPTLFNEALHRDLASFRALNPQVVMLQYVDDLLVAAPTYRDCKEGTRRLLQELSKLGYRVSAKKAQLCREEVTYLGYLLKGGKRWLTPARKATVMKIPTPTTPRQVREFLGTAGFCRLWIPGFASLAAPLYPLTRPKVPFTWTEAHQEAFGRIKEALLSAPALALPDLTKPFALYVDEKEGVARGVLTQTLGPWRRPVAYLSKKLDPVASGWPTCLKAIAAVALLLKDADKLTLGQNVLVIAPHNLESIVRQPPDRWMTNARMTHYQSLLLNERVSFAPPAILNPATLLPVESDDTPIHICSEILAEETGTRPDLRDQPLPGVPAWYTDGSSFIMDGRRQAGAAIVDNKRTVWASNLPEGTSAQKAELIALTQALRLAEGKSINIYTDSRYAFATAHVHGAIYKQRGWLTSAGKDIKNKEEILALLEAIHLPKRVAIIHCPGHQRGTDPVATGNRKADEAAKQAAQSTRILTETTKNAGKRTADGSEFEKRTADGSEFESPKKKAKVE

SEQ ID NO: 1628 - protein, 2122 aa, synthetic construct
MPAAKRVKLDGGDKKYSIGLDIGTNSVGWAVITDEYKVPSKKFKVLGNTDRHSIKKNLIGALLFDSGETAEATRLKRTARRRYTRRKNRICYLQEIFSNEMAKVDDSFFHRLEESFLVEEDKKHERHPIFGNIVDEVAYHEKYPTIYHLRKKLVDSTDKADLRLIYLALAHMIKFRGHFLIEGDLNPDNSDVDKLFIQLVQTYNQLFEENPINASGVDAKAILSARLSKSRRLENLIAQLPGEKKNGLFGNLIALSLGLTPNFKSNFDLAEDAKLQLSKDTYDDDLDNLLAQIGDQYADLFLAAKNLSDAILLSDILRVNTEITKAPLSASMIKRYDEHHQDLTLLKALVRQQLPEKYKEIFFDQSKNGYAGYIDGGASQEEFYKFIKPILEKMDGTEELLVKLNREDLLRKQRTFDNGSIPHQIHLGELHAILRRQEDFYPFLKDNREKIEKILTFRIPYYVGPLARGNSRFAWMTRKSEETITPWNFEEVVDKGASAQSFIERMTNFDKNLPNEKVLPKHSLLYEYFTVYNELTKVKYVTEGMRKPAFLSGEQKKAIVDLLFKTNRKVTVKQLKEDYFKKIECFDSVEISGVEDRFNASLGTYHDLLKIIKDKDFLDNEENEDILEDIVLTLTLFEDREMIEERLKTYAHLFDDKVMKQLKRRRYTGWGRLSRKLINGIRDKQSGKTILDFLKSDGFANRNFMQLIHDDSLTFKEDIQKAQVSGQGDSLHEHIANLAGSPAIKKGILQTVKVVDELVKVMGRHKPENIVIEMARENQTTQKGQKNSRERMKRIEEGIKELGSQILKEHPVENTQLQNEKLYLYYLQNGRDMYVDQELDINRLSDYDVDHIVPQSFLKDDSIDNKVLTRSDKARGKSDNVPSEEVVKKMKNYWRQLLNAKLITQRKFDNLTKAERGGLSELDKAGFIKRQLVETRQITKHVAQILDSRMNTKYDENDKLIREVKVITLKSKLVSDFRKDFQFYKVREINNYHHAHDAYLNAVVGTALIKKYPKLESEFVYGDYKVYDVRKMIAKSEQEIGKATAKYFFYSNIMNFFKTEITLANGEIRKRPLIETNGETGEIVWDKGRDFATVRKVLSMPQVNIVKKTEVQTGGFSKESILPKRNSDKLIARKKDWDPKKYGGFDSPTVAYSVLVVAKVEKGKSKKLKSVKELLGITIMERSSFEKNPIDFLEAKGYKEVKKDLIIKLPKYSLFELENGRKRMLASAGELQKGNELALPSKYVNFLYLASHYEKLKGSPEDNEQKQLFVEQHKHYLDEIIEQISEFSKRVILADANLDKVLSAYNKHRDKPIREQAENIIHLFTLTNLGAPAAFKYFDTTIDRKRYTSTKEVLDATLIHQSITGLYETRIDLSQLGGDGGGGGGGGGGLLGRDLLTKLKAQIQFSTEGPQVTWEDRPAMCLVLNLEEEYRLHEKPVPPSIDPSWLQLFPMVWAEKAGMGLANQVPPVVVELKSDASPVAVRQYPMSKEAREGIRPHIQRFLDLGILVPCQSPWNTPLLPVKKPGTNDYRPVQDLREVNKRVQDIHPTVPNPYNLLSSLPPSHTWYSVLDLKDAFFCLKLHPNSQPLFAFEWRDPEKGNTGQLTWTRLPQGFKNSPTLFNEALHRDLASFRALNPQVVMLQYVDDLLVAAPTYRDCKEGTRRLLQELSKLGYRVSAKKAQLCREEVTYLGYLLKGGKRWLTPARKATVMKIPTPTTPRQVREFLGTAGFCRLWIPGFASLAAPLYPLTRPKVPFTWTEAHQEAFGRIKEALLSAPALALPDLTKPFALYVDEKEGVARGVLTQTLGPWRRPVAYLSKKLDPVASGWPTCLKAIAAVALLLKDADKLTLGQNVLVIAPHNLESIVRQPPDRWMTNARMTHYQSLLLNERVSFAPPAILNPATLLPVESDDTPIHICSEILAEETGTRPDLRDQPLPGVPAWYTDGSSFIMDGRRQAGAAIVDNKRTVWASNLPEGTSAQKAELIALTQALRLAEGKSINIYTDSRYAFATAHVHGAIYKQRGWLTSAGKDIKNKEEILALLEAIHLPKRVAIIHCPGHQRGTDPVATGNRKADEAAKQAAQSTRILTETTKNAGKRTADGSEFEKRTADGSEFESPKKKAKVE

SEQ ID NO: 1629 - protein, 2124 aa, synthetic construct
MPAAKRVKLDGGDKKYSIGLDIGTNSVGWAVITDEYKVPSKKFKVLGNTDRHSIKKNLIGALLFDSGETAEATRLKRTARRRYTRRKNRICYLQEIFSNEMAKVDDSFFHRLEESFLVEEDKKHERHPIFGNIVDEVAYHEKYPTIYHLRKKLVDSTDKADLRLIYLALAHMIKFRGHFLIEGDLNPDNSDVDKLFIQLVQTYNQLFEENPINASGVDAKAILSARLSKSRRLENLIAQLPGEKKNGLFGNLIALSLGLTPNFKSNFDLAEDAKLQLSKDTYDDDLDNLLAQIGDQYADLFLAAKNLSDAILLSDILRVNTEITKAPLSASMIKRYDEHHQDLTLLKALVRQQLPEKYKEIFFDQSKNGYAGYIDGGASQEEFYKFIKPILEKMDGTEELLVKLNREDLLRKQRTFDNGSIPHQIHLGELHAILRRQEDFYPFLKDNREKIEKILTFRIPYYVGPLARGNSRFAWMTRKSEETITPWNFEEVVDKGASAQSFIERMTNFDKNLPNEKVLPKHSLLYEYFTVYNELTKVKYVTEGMRKPAFLSGEQKKAIVDLLFKTNRKVTVKQLKEDYFKKIECFDSVEISGVEDRFNASLGTYHDLLKIIKDKDFLDNEENEDILEDIVLTLTLFEDREMIEERLKTYAHLFDDKVMKQLKRRRYTGWGRLSRKLINGIRDKQSGKTILDFLKSDGFANRNFMQLIHDDSLTFKEDIQKAQVSGQGDSLHEHIANLAGSPAIKKGILQTVKVVDELVKVMGRHKPENIVIEMARENQTTQKGQKNSRERMKRIEEGIKELGSQILKEHPVENTQLQNEKLYLYYLQNGRDMYVDQELDINRLSDYDVDHIVPQSFLKDDSIDNKVLTRSDKARGKSDNVPSEEVVKKMKNYWRQLLNAKLITQRKFDNLTKAERGGLSELDKAGFIKRQLVETRQITKHVAQILDSRMNTKYDENDKLIREVKVITLKSKLVSDFRKDFQFYKVREINNYHHAHDAYLNAVVGTALIKKYPKLESEFVYGDYKVYDVRKMIAKSEQEIGKATAKYFFYSNIMNFFKTEITLANGEIRKRPLIETNGETGEIVWDKGRDFATVRKVLSMPQVNIVKKTEVQTGGFSKESILPKRNSDKLIARKKDWDPKKYGGFDSPTVAYSVLVVAKVEKGKSKKLKSVKELLGITIMERSSFEKNPIDFLEAKGYKEVKKDLIIKLPKYSLFELENGRKRMLASAGELQKGNELALPSKYVNFLYLASHYEKLKGSPEDNEQKQLFVEQHKHYLDEIIEQISEFSKRVILADANLDKVLSAYNKHRDKPIREQAENIIHLFTLTNLGAPAAFKYFDTTIDRKRYTSTKEVLDATLIHQSITGLYETRIDLSQLGGDGGGGGEAAAKGGLLGRDLLTKLKAQIQFSTEGPQVTWEDRPAMCLVLNLEEEYRLHEKPVPPSIDPSWLQLFPMVWAEKAGMGLANQVPPVVVELKSDASPVAVRQYPMSKEAREGIRPHIQRFLDLGILVPCQSPWNTPLLPVKKPGTNDYRPVQDLREVNKRVQDIHPTVPNPYNLLSSLPPSHTWYSVLDLKDAFFCLKLHPNSQPLFAFEWRDPEKGNTGQLTWTRLPQGFKNSPTLFNEALHRDLASFRALNPQVVMLQYVDDLLVAAPTYRDCKEGTRRLLQELSKLGYRVSAKKAQLCREEVTYLGYLLKGGKRWLTPARKATVMKIPTPTTPRQVREFLGTAGFCRLWIPGFASLAAPLYPLTRPKVPFTWTEAHQEAFGRIKEALLSAPALALPDLTKPFALYVDEKEGVARGVLTQTLGPWRRPVAYLSKKLDPVASGWPTCLKAIAAVALLLKDADKLTLGQNVLVIAPHNLESIVRQPPDRWMTNARMTHYQSLLLNERVSFAPPAILNPATLLPVESDDTPIHICSEILAEETGTRPDLRDQPLPGVPAWYTDGSSFIMDGRRQAGAAIVDNKRTVWASNLPEGTSAQKAELIALTQALRLAEGKSINIYTDSRYAFATAHVHGAIYKQRGWLTSAGKDIKNKEEILALLEAIHLPKRVAIIHCPGHQRGTDPVATGNRKADEAAKQAAQSTRILTETTKNAGKRTADGSEFEKRTADGSEFESPKKKAKVE

SEQ ID NO: 1630 - protein, 2124 aa, synthetic construct
MPAAKRVKLDGGDKKYSIGLDIGTNSVGWAVITDEYKVPSKKFKVLGNTDRHSIKKNLIGALLFDSGETAEATRLKRTARRRYTRRKNRICYLQEIFSNEMAKVDDSFFHRLEESFLVEEDKKHERHPIFGNIVDEVAYHEKYPTIYHLRKKLVDSTDKADLRLIYLALAHMIKFRGHFLIEGDLNPDNSDVDKLFIQLVQTYNQLFEENPINASGVDAKAILSARLSKSRRLENLIAQLPGEKKNGLFGNLIALSLGLTPNFKSNFDLAEDAKLQLSKDTYDDDLDNLLAQIGDQYADLFLAAKNLSDAILLSDILRVNTEITKAPLSASMIKRYDEHHQDLTLLKALVRQQLPEKYKEIFFDQSKNGYAGYIDGGASQEEFYKFIKPILEKMDGTEELLVKLNREDLLRKQRTFDNGSIPHQIHLGELHAILRRQEDFYPFLKDNREKIEKILTFRIPYYVGPLARGNSRFAWMTRKSEETITPWNFEEVVDKGASAQSFIERMTNFDKNLPNEKVLPKHSLLYEYFTVYNELTKVKYVTEGMRKPAFLSGEQKKAIVDLLFKTNRKVTVKQLKEDYFKKIECFDSVEISGVEDRFNASLGTYHDLLKIIKDKDFLDNEENEDILEDIVLTLTLFEDREMIEERLKTYAHLFDDKVMKQLKRRRYTGWGRLSRKLINGIRDKQSGKTILDFLKSDGFANRNFMQLIHDDSLTFKEDIQKAQVSGQGDSLHEHIANLAGSPAIKKGILQTVKVVDELVKVMGRHKPENIVIEMARENQTTQKGQKNSRERMKRIEEGIKELGSQILKEHPVENTQLQNEKLYLYYLQNGRDMYVDQELDINRLSDYDVDHIVPQSFLKDDSIDNKVLTRSDKARGKSDNVPSEEVVKKMKNYWRQLLNAKLITQRKFDNLTKAERGGLSELDKAGFIKRQLVETRQITKHVAQILDSRMNTKYDENDKLIREVKVITLKSKLVSDFRKDFQFYKVREINNYHHAHDAYLNAVVGTALIKKYPKLESEFVYGDYKVYDVRKMIAKSEQEIGKATAKYFFYSNIMNFFKTEITLANGEIRKRPLIETNGETGEIVWDKGRDFATVRKVLSMPQVNIVKKTEVQTGGFSKESILPKRNSDKLIARKKDWDPKKYGGFDSPTVAYSVLVVAKVEKGKSKKLKSVKELLGITIMERSSFEKNPIDFLEAKGYKEVKKDLIIKLPKYSLFELENGRKRMLASAGELQKGNELALPSKYVNFLYLASHYEKLKGSPEDNEQKQLFVEQHKHYLDEIIEQISEFSKRVILADANLDKVLSAYNKHRDKPIREQAENIIHLFTLTNLGAPAAFKYFDTTIDRKRYTSTKEVLDATLIHQSITGLYETRIDLSQLGGDGGEAAAKGSSGGLLGRDLLTKLKAQIQFSTEGPQVTWEDRPAMCLVLNLEEEYRLHEKPVPPSIDPSWLQLFPMVWAEKAGMGLANQVPPVVVELKSDASPVAVRQYPMSKEAREGIRPHIQRFLDLGILVPCQSPWNTPLLPVKKPGTNDYRPVQDLREVNKRVQDIHPTVPNPYNLLSSLPPSHTWYSVLDLKDAFFCLKLHPNSQPLFAFEWRDPEKGNTGQLTWTRLPQGFKNSPTLFNEALHRDLASFRALNPQVVMLQYVDDLLVAAPTYRDCKEGTRRLLQELSKLGYRVSAKKAQLCREEVTYLGYLLKGGKRWLTPARKATVMKIPTPTTPRQVREFLGTAGFCRLWIPGFASLAAPLYPLTRPKVPFTWTEAHQEAFGRIKEALLSAPALALPDLTKPFALYVDEKEGVARGVLTQTLGPWRRPVAYLSKKLDPVASGWPTCLKAIAAVALLLKDADKLTLGQNVLVIAPHNLESIVRQPPDRWMTNARMTHYQSLLLNERVSFAPPAILNPATLLPVESDDTPIHICSEILAEETGTRPDLRDQPLPGVPAWYTDGSSFIMDGRRQAGAAIVDNKRTVWASNLPEGTSAQKAELIALTQALRLAEGKSINIYTDSRYAFATAHVHGAIYKQRGWLTSAGKDIKNKEEILALLEAIHLPKRVAIIHCPGHQRGTDPVATGNRKADEAAKQAAQSTRILTETTKNAGKRTADGSEFEKRTADGSEFESPKKKAKVE

SEQ ID NO: 1631 - protein, 2119 aa, synthetic construct
MPAAKRVKLDGGDKKYSIGLDIGTNSVGWAVITDEYKVPSKKFKVLGNTDRHSIKKNLIGALLFDSGETAEATRLKRTARRRYTRRKNRICYLQEIFSNEMAKVDDSFFHRLEESFLVEEDKKHERHPIFGNIVDEVAYHEKYPTIYHLRKKLVDSTDKADLRLIYLALAHMIKFRGHFLIEGDLNPDNSDVDKLFIQLVQTYNQLFEENPINASGVDAKAILSARLSKSRRLENLIAQLPGEKKNGLFGNLIALSLGLTPNFKSNFDLAEDAKLQLSKDTYDDDLDNLLAQIGDQYADLFLAAKNLSDAILLSDILRVNTEITKAPLSASMIKRYDEHHQDLTLLKALVRQQLPEKYKEIFFDQSKNGYAGYIDGGASQEEFYKFIKPILEKMDGTEELLVKLNREDLLRKQRTFDNGSIPHQIHLGELHAILRRQEDFYPFLKDNREKIEKILTFRIPYYVGPLARGNSRFAWMTRKSEETITPWNFEEVVDKGASAQSFIERMTNFDKNLPNEKVLPKHSLLYEYFTVYNELTKVKYVTEGMRKPAFLSGEQKKAIVDLLFKTNRKVTVKQLKEDYFKKIECFDSVEISGVEDRFNASLGTYHDLLKIIKDKDFLDNEENEDILEDIVLTLTLFEDREMIEERLKTYAHLFDDKVMKQLKRRRYTGWGRLSRKLINGIRDKQSGKTILDFLKSDGFANRNFMQLIHDDSLTFKEDIQKAQVSGQGDSLHEHIANLAGSPAIKKGILQTVKVVDELVKVMGRHKPENIVIEMARENQTTQKGQKNSRERMKRIEEGIKELGSQILKEHPVENTQLQNEKLYLYYLQNGRDMYVDQELDINRLSDYDVDHIVPQSFLKDDSIDNKVLTRSDKARGKSDNVPSEEVVKKMKNYWRQLLNAKLITQRKFDNLTKAERGGLSELDKAGFIKRQLVETRQITKHVAQILDSRMNTKYDENDKLIREVKVITLKSKLVSDFRKDFQFYKVREINNYHHAHDAYLNAVVGTALIKKYPKLESEFVYGDYKVYDVRKMIAKSEQEIGKATAKYFFYSNIMNFFKTEITLANGEIRKRPLIETNGETGEIVWDKGRDFATVRKVLSMPQVNIVKKTEVQTGGFSKESILPKRNSDKLIARKKDWDPKKYGGFDSPTVAYSVLVVAKVEKGKSKKLKSVKELLGITIMERSSFEKNPIDFLEAKGYKEVKKDLIIKLPKYSLFELENGRKRMLASAGELQKGNELALPSKYVNFLYLASHYEKLKGSPEDNEQKQLFVEQHKHYLDEIIEQISEFSKRVILADANLDKVLSAYNKHRDKPIREQAENIIHLFTLTNLGAPAAFKYFDTTIDRKRYTSTKEVLDATLIHQSITGLYETRIDLSQLGGDGGPAPGGLLGRDLLTKLKAQIQFSTEGPQVTWEDRPAMCLVLNLEEEYRLHEKPVPPSIDPSWLQLFPMVWAEKAGMGLANQVPPVVVELKSDASPVAVRQYPMSKEAREGIRPHIQRFLDLGILVPCQSPWNTPLLPVKKPGTNDYRPVQDLREVNKRVQDIHPTVPNPYNLLSSLPPSHTWYSVLDLKDAFFCLKLHPNSQPLFAFEWRDPEKGNTGQLTWTRLPQGFKNSPTLFNEALHRDLASFRALNPQVVMLQYVDDLLVAAPTYRDCKEGTRRLLQELSKLGYRVSAKKAQLCREEVTYLGYLLKGGKRWLTPARKATVMKIPTPTTPRQVREFLGTAGFCRLWIPGFASLAAPLYPLTRPKVPFTWTEAHQEAFGRIKEALLSAPALALPDLTKPFALYVDEKEGVARGVLTQTLGPWRRPVAYLSKKLDPVASGWPTCLKAIAAVALLLKDADKLTLGQNVLVIAPHNLESIVRQPPDRWMTNARMTHYQSLLLNERVSFAPPAILNPATLLPVESDDTPIHICSEILAEETGTRPDLRDQPLPGVPAWYTDGSSFIMDGRRQAGAAIVDNKRTVWASNLPEGTSAQKAELIALTQALRLAEGKSINIYTDSRYAFATAHVHGAIYKQRGWLTSAGKDIKNKEEILALLEAIHLPKRVAIIHCPGHQRGTDPVATGNRKADEAAKQAAQSTRILTETTKNAGKRTADGSEFEKRTADGSEFESPKKKAKVE

SEQ ID NO: 1632 - protein, 2141 aa, synthetic construct
MPAAKRVKLDGGDKKYSIGLDIGTNSVGWAVITDEYKVPSKKFKVLGNTDRHSIKKNLIGALLFDSGETAEATRLKRTARRRYTRRKNRICYLQEIFSNEMAKVDDSFFHRLEESFLVEEDKKHERHPIFGNIVDEVAYHEKYPTIYHLRKKLVDSTDKADLRLIYLALAHMIKFRGHFLIEGDLNPDNSDVDKLFIQLVQTYNQLFEENPINASGVDAKAILSARLSKSRRLENLIAQLPGEKKNGLFGNLIALSLGLTPNFKSNFDLAEDAKLQLSKDTYDDDLDNLLAQIGDQYADLFLAAKNLSDAILLSDILRVNTEITKAPLSASMIKRYDEHHQDLTLLKALVRQQLPEKYKEIFFDQSKNGYAGYIDGGASQEEFYKFIKPILEKMDGTEELLVKLNREDLLRKQRTFDNGSIPHQIHLGELHAILRRQEDFYPFLKDNREKIEKILTFRIPYYVGPLARGNSRFAWMTRKSEETITPWNFEEVVDKGASAQSFIERMTNFDKNLPNEKVLPKHSLLYEYFTVYNELTKVKYVTEGMRKPAFLSGEQKKAIVDLLFKTNRKVTVKQLKEDYFKKIECFDSVEISGVEDRFNASLGTYHDLLKIIKDKDFLDNEENEDILEDIVLTLTLFEDREMIEERLKTYAHLFDDKVMKQLKRRRYTGWGRLSRKLINGIRDKQSGKTILDFLKSDGFANRNFMQLIHDDSLTFKEDIQKAQVSGQGDSLHEHIANLAGSPAIKKGILQTVKVVDELVKVMGRHKPENIVIEMARENQTTQKGQKNSRERMKRIEEGIKELGSQILKEHPVENTQLQNEKLYLYYLQNGRDMYVDQELDINRLSDYDVDHIVPQSFLKDDSIDNKVLTRSDKARGKSDNVPSEEVVKKMKNYWRQLLNAKLITQRKFDNLTKAERGGLSELDKAGFIKRQLVETRQITKHVAQILDSRMNTKYDENDKLIREVKVITLKSKLVSDFRKDFQFYKVREINNYHHAHDAYLNAVVGTALIKKYPKLESEFVYGDYKVYDVRKMIAKSEQEIGKATAKYFFYSNIMNFFKTEITLANGEIRKRPLIETNGETGEIVWDKGRDFATVRKVLSMPQVNIVKKTEVQTGGFSKESILPKRNSDKLIARKKDWDPKKYGGFDSPTVAYSVLVVAKVEKGKSKKLKSVKELLGITIMERSSFEKNPIDFLEAKGYKEVKKDLIIKLPKYSLFELENGRKRMLASAGELQKGNELALPSKYVNFLYLASHYEKLKGSPEDNEQKQLFVEQHKHYLDEIIEQISEFSKRVILADANLDKVLSAYNKHRDKPIREQAENIIHLFTLTNLGAPAAFKYFDTTIDRKRYTSTKEVLDATLIHQSITGLYETRIDLSQLGGDGGEAAAKEAAAKEAAAKEAAAKEAAAKGGLLGRDLLTKLKAQIQFSTEGPQVTWEDRPAMCLVLNLEEEYRLHEKPVPPSIDPSWLQLFPMVWAEKAGMGLANQVPPVVVELKSDASPVAVRQYPMSKEAREGIRPHIQRFLDLGILVPCQSPWNTPLLPVKKPGTNDYRPVQDLREVNKRVQDIHPTVPNPYNLLSSLPPSHTWYSVLDLKDAFFCLKLHPNSQPLFAFEWRDPEKGNTGQLTWTRLPQGFKNSPTLFNEALHRDLASFRALNPQVVMLQYVDDLLVAAPTYRDCKEGTRRLLQELSKLGYRVSAKKAQLCREEVTYLGYLLKGGKRWLTPARKATVMKIPTPTTPRQVREFLGTAGFCRLWIPGFASLAAPLYPLTRPKVPFTWTEAHQEAFGRIKEALLSAPALALPDLTKPFALYVDEKEGVARGVLTQTLGPWRRPVAYLSKKLDPVASGWPTCLKAIAAVALLLKDADKLTLGQNVLVIAPHNLESIVRQPPDRWMTNARMTHYQSLLLNERVSFAPPAILNPATLLPVESDDTPIHICSEILAEETGTRPDLRDQPLPGVPAWYTDGSSFIMDGRRQAGAAIVDNKRTVWASNLPEGTSAQKAELIALTQALRLAEGKSINIYTDSRYAFATAHVHGAIYKQRGWLTSAGKDIKNKEEILALLEAIHLPKRVAIIHCPGHQRGTDPVATGNRKADEAAKQAAQSTRILTETTKNAGKRTADGSEFEKRTADGSEFESPKKKAKVE

SEQ ID NO: 1633 - protein, 2122 aa, synthetic construct
MPAAKRVKLDGGDKKYSIGLDIGTNSVGWAVITDEYKVPSKKFKVLGNTDRHSIKKNLIGALLFDSGETAEATRLKRTARRRYTRRKNRICYLQEIFSNEMAKVDDSFFHRLEESFLVEEDKKHERHPIFGNIVDEVAYHEKYPTIYHLRKKLVDSTDKADLRLIYLALAHMIKFRGHFLIEGDLNPDNSDVDKLFIQLVQTYNQLFEENPINASGVDAKAILSARLSKSRRLENLIAQLPGEKKNGLFGNLIALSLGLTPNFKSNFDLAEDAKLQLSKDTYDDDLDNLLAQIGDQYADLFLAAKNLSDAILLSDILRVNTEITKAPLSASMIKRYDEHHQDLTLLKALVRQQLPEKYKEIFFDQSKNGYAGYIDGGASQEEFYKFIKPILEKMDGTEELLVKLNREDLLRKQRTFDNGSIPHQIHLGELHAILRRQEDFYPFLKDNREKIEKILTFRIPYYVGPLARGNSRFAWMTRKSEETITPWNFEEVVDKGASAQSFIERMTNFDKNLPNEKVLPKHSLLYEYFTVYNELTKVKYVTEGMRKPAFLSGEQKKAIVDLLFKTNRKVTVKQLKEDYFKKIECFDSVEISGVEDRFNASLGTYHDLLKIIKDKDFLDNEENEDILEDIVLTLTLFEDREMIEERLKTYAHLFDDKVMKQLKRRRYTGWGRLSRKLINGIRDKQSGKTILDFLKSDGFANRNFMQLIHDDSLTFKEDIQKAQVSGQGDSLHEHIANLAGSPAIKKGILQTVKVVDELVKVMGRHKPENIVIEMARENQTTQKGQKNSRERMKRIEEGIKELGSQILKEHPVENTQLQNEKLYLYYLQNGRDMYVDQELDINRLSDYDVDHIVPQSFLKDDSIDNKVLTRSDKARGKSDNVPSEEVVKKMKNYWRQLLNAKLITQRKFDNLTKAERGGLSELDKAGFIKRQLVETRQITKHVAQILDSRMNTKYDENDKLIREVKVITLKSKLVSDFRKDFQFYKVREINNYHHAHDAYLNAVVGTALIKKYPKLESEFVYGDYKVYDVRKMIAKSEQEIGKATAKYFFYSNIMNFFKTEITLANGEIRKRPLIETNGETGEIVWDKGRDFATVRKVLSMPQVNIVKKTEVQTGGFSKESILPKRNSDKLIARKKDWDPKKYGGFDSPTVAYSVLVVAKVEKGKSKKLKSVKELLGITIMERSSFEKNPIDFLEAKGYKEVKKDLIIKLPKYSLFELENGRKRMLASAGELQKGNELALPSKYVNFLYLASHYEKLKGSPEDNEQKQLFVEQHKHYLDEIIEQISEFSKRVILADANLDKVLSAYNKHRDKPIREQAENIIHLFTLTNLGAPAAFKYFDTTIDRKRYTSTKEVLDATLIHQSITGLYETRIDLSQLGGDGGGGGPAPGGLLGRDLLTKLKAQIQFSTEGPQVTWEDRPAMCLVLNLEEEYRLHEKPVPPSIDPSWLQLFPMVWAEKAGMGLANQVPPVVVELKSDASPVAVRQYPMSKEAREGIRPHIQRFLDLGILVPCQSPWNTPLLPVKKPGTNDYRPVQDLREVNKRVQDIHPTVPNPYNLLSSLPPSHTWYSVLDLKDAFFCLKLHPNSQPLFAFEWRDPEKGNTGQLTWTRLPQGFKNSPTLFNEALHRDLASFRALNPQVVMLQYVDDLLVAAPTYRDCKEGTRRLLQELSKLGYRVSAKKAQLCREEVTYLGYLLKGGKRWLTPARKATVMKIPTPTTPRQVREFLGTAGFCRLWIPGFASLAAPLYPLTRPKVPFTWTEAHQEAFGRIKEALLSAPALALPDLTKPFALYVDEKEGVARGVLTQTLGPWRRPVAYLSKKLDPVASGWPTCLKAIAAVALLLKDADKLTLGQNVLVIAPHNLESIVRQPPDRWMTNARMTHYQSLLLNERVSFAPPAILNPATLLPVESDDTPIHICSEILAEETGTRPDLRDQPLPGVPAWYTDGSSFIMDGRRQAGAAIVDNKRTVWASNLPEGTSAQKAELIALTQALRLAEGKSINIYTDSRYAFATAHVHGAIYKQRGWLTSAGKDIKNKEEILALLEAIHLPKRVAIIHCPGHQRGTDPVATGNRKADEAAKQAAQSTRILTETTKNAGKRTADGSEFEKRTADGSEFESPKKKAKVE

SEQ ID NO: 1634 - protein, 2127 aa, synthetic construct
MPAAKRVKLDGGDKKYSIGLDIGTNSVGWAVITDEYKVPSKKFKVLGNTDRHSIKKNLIGALLFDSGETAEATRLKRTARRRYTRRKNRICYLQEIFSNEMAKVDDSFFHRLEESFLVEEDKKHERHPIFGNIVDEVAYHEKYPTIYHLRKKLVDSTDKADLRLIYLALAHMIKFRGHFLIEGDLNPDNSDVDKLFIQLVQTYNQLFEENPINASGVDAKAILSARLSKSRRLENLIAQLPGEKKNGLFGNLIALSLGLTPNFKSNFDLAEDAKLQLSKDTYDDDLDNLLAQIGDQYADLFLAAKNLSDAILLSDILRVNTEITKAPLSASMIKRYDEHHQDLTLLKALVRQQLPEKYKEIFFDQSKNGYAGYIDGGASQEEFYKFIKPILEKMDGTEELLVKLNREDLLRKQRTFDNGSIPHQIHLGELHAILRRQEDFYPFLKDNREKIEKILTFRIPYYVGPLARGNSRFAWMTRKSEETITPWNFEEVVDKGASAQSFIERMTNFDKNLPNEKVLPKHSLLYEYFTVYNELTKVKYVTEGMRKPAFLSGEQKKAIVDLLFKTNRKVTVKQLKEDYFKKIECFDSVEISGVEDRFNASLGTYHDLLKIIKDKDFLDNEENEDILEDIVLTLTLFEDREMIEERLKTYAHLFDDKVMKQLKRRRYTGWGRLSRKLINGIRDKQSGKTILDFLKSDGFANRNFMQLIHDDSLTFKEDIQKAQVSGQGDSLHEHIANLAGSPAIKKGILQTVKVVDELVKVMGRHKPENIVIEMARENQTTQKGQKNSRERMKRIEEGIKELGSQILKEHPVENTQLQNEKLYLYYLQNGRDMYVDQELDINRLSDYDVDHIVPQSFLKDDSIDNKVLTRSDKARGKSDNVPSEEVVKKMKNYWRQLLNAKLITQRKFDNLTKAERGGLSELDKAGFIKRQLVETRQITKHVAQILDSRMNTKYDENDKLIREVKVITLKSKLVSDFRKDFQFYKVREINNYHHAHDAYLNAVVGTALIKKYPKLESEFVYGDYKVYDVRKMIAKSEQEIGKATAKYFFYSNIMNFFKTEITLANGEIRKRPLIETNGETGEIVWDKGRDFATVRKVLSMPQVNIVKKTEVQTGGFSKESILPKRNSDKLIARKKDWDPKKYGGFDSPTVAYSVLVVAKVEKGKSKKLKSVKELLGITIMERSSFEKNPIDFLEAKGYKEVKKDLIIKLPKYSLFELENGRKRMLASAGELQKGNELALPSKYVNFLYLASHYEKLKGSPEDNEQKQLFVEQHKHYLDEIIEQISEFSKRVILADANLDKVLSAYNKHRDKPIREQAENIIHLFTLTNLGAPAAFKYFDTTIDRKRYTSTKEVLDATLIHQSITGLYETRIDLSQLGGDGGGSSEAAAKGGGGGLLGRDLLTKLKAQIQFSTEGPQVTWEDRPAMCLVLNLEEEYRLHEKPVPPSIDPSWLQLFPMVWAEKAGMGLANQVPPVVVELKSDASPVAVRQYPMSKEAREGIRPHIQRFLDLGILVPCQSPWNTPLLPVKKPGTNDYRPVQDLREVNKRVQDIHPTVPNPYNLLSSLPPSHTWYSVLDLKDAFFCLKLHPNSQPLFAFEWRDPEKGNTGQLTWTRLPQGFKNSPTLFNEALHRDLASFRALNPQVVMLQYVDDLLVAAPTYRDCKEGTRRLLQELSKLGYRVSAKKAQLCREEVTYLGYLLKGGKRWLTPARKATVMKIPTPTTPRQVREFLGTAGFCRLWIPGFASLAAPLYPLTRPKVPFTWTEAHQEAFGRIKEALLSAPALALPDLTKPFALYVDEKEGVARGVLTQTLGPWRRPVAYLSKKLDPVASGWPTCLKAIAAVALLLKDADKLTLGQNVLVIAPHNLESIVRQPPDRWMTNARMTHYQSLLLNERVSFAPPAILNPATLLPVESDDTPIHICSEILAEETGTRPDLRDQPLPGVPAWYTDGSSFIMDGRRQAGAAIVDNKRTVWASNLPEGTSAQKAELIALTQALRLAEGKSINIYTDSRYAFATAHVHGAIYKQRGWLTSAGKDIKNKEEILALLEAIHLPKRVAIIHCPGHQRGTDPVATGNRKADEAAKQAAQSTRILTETTKNAGKRTADGSEFEKRTADGSEFESPKKKAKVE

SEQ ID NO: 1635 - protein, 2131 aa, synthetic construct
MPAAKRVKLDGGDKKYSIGLDIGTNSVGWAVITDEYKVPSKKFKVLGNTDRHSIKKNLIGALLFDSGETAEATRLKRTARRRYTRRKNRICYLQEIFSNEMAKVDDSFFHRLEESFLVEEDKKHERHPIFGNIVDEVAYHEKYPTIYHLRKKLVDSTDKADLRLIYLALAHMIKFRGHFLIEGDLNPDNSDVDKLFIQLVQTYNQLFEENPINASGVDAKAILSARLSKSRRLENLIAQLPGEKKNGLFGNLIALSLGLTPNFKSNFDLAEDAKLQLSKDTYDDDLDNLLAQIGDQYADLFLAAKNLSDAILLSDILRVNTEITKAPLSASMIKRYDEHHQDLTLLKALVRQQLPEKYKEIFFDQSKNGYAGYIDGGASQEEFYKFIKPILEKMDGTEELLVKLNREDLLRKQRTFDNGSIPHQIHLGELHAILRRQEDFYPFLKDNREKIEKILTFRIPYYVGPLARGNSRFAWMTRKSEETITPWNFEEVVDKGASAQSFIERMTNFDKNLPNEKVLPKHSLLYEYFTVYNELTKVKYVTEGMRKPAFLSGEQKKAIVDLLFKTNRKVTVKQLKEDYFKKIECFDSVEISGVEDRFNASLGTYHDLLKIIKDKDFLDNEENEDILEDIVLTLTLFEDREMIEERLKTYAHLFDDKVMKQLKRRRYTGWGRLSRKLINGIRDKQSGKTILDFLKSDGFANRNFMQLIHDDSLTFKEDIQKAQVSGQGDSLHEHIANLAGSPAIKKGILQTVKVVDELVKVMGRHKPENIVIEMARENQTTQKGQKNSRERMKRIEEGIKELGSQILKEHPVENTQLQNEKLYLYYLQNGRDMYVDQELDINRLSDYDVDHIVPQSFLKDDSIDNKVLTRSDKARGKSDNVPSEEVVKKMKNYWRQLLNAKLITQRKFDNLTKAERGGLSELDKAGFIKRQLVETRQITKHVAQILDSRMNTKYDENDKLIREVKVITLKSKLVSDFRKDFQFYKVREINNYHHAHDAYLNAVVGTALIKKYPKLESEFVYGDYKVYDVRKMIAKSEQEIGKATAKYFFYSNIMNFFKTEITLANGEIRKRPLIETNGETGEIVWDKGRDFATVRKVLSMPQVNIVKKTEVQTGGFSKESILPKRNSDKLIARKKDWDPKKYGGFDSPTVAYSVLVVAKVEKGKSKKLKSVKELLGITIMERSSFEKNPIDFLEAKGYKEVKKDLIIKLPKYSLFELENGRKRMLASAGELQKGNELALPSKYVNFLYLASHYEKLKGSPEDNEQKQLFVEQHKHYLDEIIEQISEFSKRVILADANLDKVLSAYNKHRDKPIREQAENIIHLFTLTNLGAPAAFKYFDTTIDRKRYTSTKEVLDATLIHQSITGLYETRIDLSQLGGDGGGGGGSEAAAKGGGGSGGLLGRDLLTKLKAQIQFSTEGPQVTWEDRPAMCLVLNLEEEYRLHEKPVPPSIDPSWLQLFPMVWAEKAGMGLANQVPPVVVELKSDASPVAVRQYPMSKEAREGIRPHIQRFLDLGILVPCQSPWNTPLLPVKKPGTNDYRPVQDLREVNKRVQDIHPTVPNPYNLLSSLPPSHTWYSVLDLKDAFFCLKLHPNSQPLFAFEWRDPEKGNTGQLTWTRLPQGFKNSPTLFNEALHRDLASFRALNPQVVMLQYVDDLLVAAPTYRDCKEGTRRLLQELSKLGYRVSAKKAQLCREEVTYLGYLLKGGKRWLTPARKATVMKIPTPTTPRQVREFLGTAGFCRLWIPGFASLAAPLYPLTRPKVPFTWTEAHQEAFGRIKEALLSAPALALPDLTKPFALYVDEKEGVARGVLTQTLGPWRRPVAYLSKKLDPVASGWPTCLKAIAAVALLLKDADKLTLGQNVLVIAPHNLESIVRQPPDRWMTNARMTHYQSLLLNERVSFAPPAILNPATLLPVESDDTPIHICSEILAEETGTRPDLRDQPLPGVPAWYTDGSSFIMDGRRQAGAAIVDNKRTVWASNLPEGTSAQKAELIALTQALRLAEGKSINIYTDSRYAFATAHVHGAIYKQRGWLTSAGKDIKNKEEILALLEAIHLPKRVAIIHCPGHQRGTDPVATGNRKADEAAKQAAQSTRILTETTKNAGKRTADGSEFEKRTADGSEFESPKKKAKVE

SEQ ID NO: 1636 - protein, 2122 aa, synthetic construct
MPAAKRVKLDGGDKKYSIGLDIGTNSVGWAVITDEYKVPSKKFKVLGNTDRHSIKKNLIGALLFDSGETAEATRLKRTARRRYTRRKNRICYLQEIFSNEMAKVDDSFFHRLEESFLVEEDKKHERHPIFGNIVDEVAYHEKYPTIYHLRKKLVDSTDKADLRLIYLALAHMIKFRGHFLIEGDLNPDNSDVDKLFIQLVQTYNQLFEENPINASGVDAKAILSARLSKSRRLENLIAQLPGEKKNGLFGNLIALSLGLTPNFKSNFDLAEDAKLQLSKDTYDDDLDNLLAQIGDQYADLFLAAKNLSDAILLSDILRVNTEITKAPLSASMIKRYDEHHQDLTLLKALVRQQLPEKYKEIFFDQSKNGYAGYIDGGASQEEFYKFIKPILEKMDGTEELLVKLNREDLLRKQRTFDNGSIPHQIHLGELHAILRRQEDFYPFLKDNREKIEKILTFRIPYYVGPLARGNSRFAWMTRKSEETITPWNFEEVVDKGASAQSFIERMTNFDKNLPNEKVLPKHSLLYEYFTVYNELTKVKYVTEGMRKPAFLSGEQKKAIVDLLFKTNRKVTVKQLKEDYFKKIECFDSVEISGVEDRFNASLGTYHDLLKIIKDKDFLDNEENEDILEDIVLTLTLFEDREMIEERLKTYAHLFDDKVMKQLKRRRYTGWGRLSRKLINGIRDKQSGKTILDFLKSDGFANRNFMQLIHDDSLTFKEDIQKAQVSGQGDSLHEHIANLAGSPAIKKGILQTVKVVDELVKVMGRHKPENIVIEMARENQTTQKGQKNSRERMKRIEEGIKELGSQILKEHPVENTQLQNEKLYLYYLQNGRDMYVDQELDINRLSDYDVDHIVPQSFLKDDSIDNKVLTRSDKARGKSDNVPSEEVVKKMKNYWRQLLNAKLITQRKFDNLTKAERGGLSELDKAGFIKRQLVETRQITKHVAQILDSRMNTKYDENDKLIREVKVITLKSKLVSDFRKDFQFYKVREINNYHHAHDAYLNAVVGTALIKKYPKLESEFVYGDYKVYDVRKMIAKSEQEIGKATAKYFFYSNIMNFFKTEITLANGEIRKRPLIETNGETGEIVWDKGRDFATVRKVLSMPQVNIVKKTEVQTGGFSKESILPKRNSDKLIARKKDWDPKKYGGFDSPTVAYSVLVVAKVEKGKSKKLKSVKELLGITIMERSSFEKNPIDFLEAKGYKEVKKDLIIKLPKYSLFELENGRKRMLASAGELQKGNELALPSKYVNFLYLASHYEKLKGSPEDNEQKQLFVEQHKHYLDEIIEQISEFSKRVILADANLDKVLSAYNKHRDKPIREQAENIIHLFTLTNLGAPAAFKYFDTTIDRKRYTSTKEVLDATLIHQSITGLYETRIDLSQLGGDGGPAPGGSGGLLGRDLLTKLKAQIQFSTEGPQVTWEDRPAMCLVLNLEEEYRLHEKPVPPSIDPSWLQLFPMVWAEKAGMGLANQVPPVVVELKSDASPVAVRQYPMSKEAREGIRPHIQRFLDLGILVPCQSPWNTPLLPVKKPGTNDYRPVQDLREVNKRVQDIHPTVPNPYNLLSSLPPSHTWYSVLDLKDAFFCLKLHPNSQPLFAFEWRDPEKGNTGQLTWTRLPQGFKNSPTLFNEALHRDLASFRALNPQVVMLQYVDDLLVAAPTYRDCKEGTRRLLQELSKLGYRVSAKKAQLCREEVTYLGYLLKGGKRWLTPARKATVMKIPTPTTPRQVREFLGTAGFCRLWIPGFASLAAPLYPLTRPKVPFTWTEAHQEAFGRIKEALLSAPALALPDLTKPFALYVDEKEGVARGVLTQTLGPWRRPVAYLSKKLDPVASGWPTCLKAIAAVALLLKDADKLTLGQNVLVIAPHNLESIVRQPPDRWMTNARMTHYQSLLLNERVSFAPPAILNPATLLPVESDDTPIHICSEILAEETGTRPDLRDQPLPGVPAWYTDGSSFIMDGRRQAGAAIVDNKRTVWASNLPEGTSAQKAELIALTQALRLAEGKSINIYTDSRYAFATAHVHGAIYKQRGWLTSAGKDIKNKEEILALLEAIHLPKRVAIIHCPGHQRGTDPVATGNRKADEAAKQAAQSTRILTETTKNAGKRTADGSEFEKRTADGSEFESPKKKAKVE

SEQ ID NO: 1637 - protein, 2122 aa, synthetic construct
MPAAKRVKLDGGDKKYSIGLDIGTNSVGWAVITDEYKVPSKKFKVLGNTDRHSIKKNLIGALLFDSGETAEATRLKRTARRRYTRRKNRICYLQEIFSNEMAKVDDSFFHRLEESFLVEEDKKHERHPIFGNIVDEVAYHEKYPTIYHLRKKLVDSTDKADLRLIYLALAHMIKFRGHFLIEGDLNPDNSDVDKLFIQLVQTYNQLFEENPINASGVDAKAILSARLSKSRRLENLIAQLPGEKKNGLFGNLIALSLGLTPNFKSNFDLAEDAKLQLSKDTYDDDLDNLLAQIGDQYADLFLAAKNLSDAILLSDILRVNTEITKAPLSASMIKRYDEHHQDLTLLKALVRQQLPEKYKEIFFDQSKNGYAGYIDGGASQEEFYKFIKPILEKMDGTEELLVKLNREDLLRKQRTFDNGSIPHQIHLGELHAILRRQEDFYPFLKDNREKIEKILTFRIPYYVGPLARGNSRFAWMTRKSEETITPWNFEEVVDKGASAQSFIERMTNFDKNLPNEKVLPKHSLLYEYFTVYNELTKVKYVTEGMRKPAFLSGEQKKAIVDLLFKTNRKVTVKQLKEDYFKKIECFDSVEISGVEDRFNASLGTYHDLLKIIKDKDFLDNEENEDILEDIVLTLTLFEDREMIEERLKTYAHLFDDKVMKQLKRRRYTGWGRLSRKLINGIRDKQSGKTILDFLKSDGFANRNFMQLIHDDSLTFKEDIQKAQVSGQGDSLHEHIANLAGSPAIKKGILQTVKVVDELVKVMGRHKPENIVIEMARENQTTQKGQKNSRERMKRIEEGIKELGSQILKEHPVENTQLQNEKLYLYYLQNGRDMYVDQELDINRLSDYDVDHIVPQSFLKDDSIDNKVLTRSDKARGKSDNVPSEEVVKKMKNYWRQLLNAKLITQRKFDNLTKAERGGLSELDKAGFIKRQLVETRQITKHVAQILDSRMNTKYDENDKLIREVKVITLKSKLVSDFRKDFQFYKVREINNYHHAHDAYLNAVVGTALIKKYPKLESEFVYGDYKVYDVRKMIAKSEQEIGKATAKYFFYSNIMNFFKTEITLANGEIRKRPLIETNGETGEIVWDKGRDFATVRKVLSMPQVNIVKKTEVQTGGFSKESILPKRNSDKLIARKKDWDPKKYGGFDSPTVAYSVLVVAKVEKGKSKKLKSVKELLGITIMERSSFEKNPIDFLEAKGYKEVKKDLIIKLPKYSLFELENGRKRMLASAGELQKGNELALPSKYVNFLYLASHYEKLKGSPEDNEQKQLFVEQHKHYLDEIIEQISEFSKRVILADANLDKVLSAYNKHRDKPIREQAENIIHLFTLTNLGAPAAFKYFDTTIDRKRYTSTKEVLDATLIHQSITGLYETRIDLSQLGGDGGGGSGSSGGLLGRDLLTKLKAQIQFSTEGPQVTWEDRPAMCLVLNLEEEYRLHEKPVPPSIDPSWLQLFPMVWAEKAGMGLANQVPPVVVELKSDASPVAVRQYPMSKEAREGIRPHIQRFLDLGILVPCQSPWNTPLLPVKKPGTNDYRPVQDLREVNKRVQDIHPTVPNPYNLLSSLPPSHTWYSVLDLKDAFFCLKLHPNSQPLFAFEWRDPEKGNTGQLTWTRLPQGFKNSPTLFNEALHRDLASFRALNPQVVMLQYVDDLLVAAPTYRDCKEGTRRLLQELSKLGYRVSAKKAQLCREEVTYLGYLLKGGKRWLTPARKATVMKIPTPTTPRQVREFLGTAGFCRLWIPGFASLAAPLYPLTRPKVPFTWTEAHQEAFGRIKEALLSAPALALPDLTKPFALYVDEKEGVARGVLTQTLGPWRRPVAYLSKKLDPVASGWPTCLKAIAAVALLLKDADKLTLGQNVLVIAPHNLESIVRQPPDRWMTNARMTHYQSLLLNERVSFAPPAILNPATLLPVESDDTPIHICSEILAEETGTRPDLRDQPLPGVPAWYTDGSSFIMDGRRQAGAAIVDNKRTVWASNLPEGTSAQKAELIALTQALRLAEGKSINIYTDSRYAFATAHVHGAIYKQRGWLTSAGKDIKNKEEILALLEAIHLPKRVAIIHCPGHQRGTDPVATGNRKADEAAKQAAQSTRILTETTKNAGKRTADGSEFEKRTADGSEFESPKKKAKVE

SEQ ID NO: 1638 - protein, 2131 aa, synthetic construct
MPAAKRVKLDGGDKKYSIGLDIGTNSVGWAVITDEYKVPSKKFKVLGNTDRHSIKKNLIGALLFDSGETAEATRLKRTARRRYTRRKNRICYLQEIFSNEMAKVDDSFFHRLEESFLVEEDKKHERHPIFGNIVDEVAYHEKYPTIYHLRKKLVDSTDKADLRLIYLALAHMIKFRGHFLIEGDLNPDNSDVDKLFIQLVQTYNQLFEENPINASGVDAKAILSARLSKSRRLENLIAQLPGEKKNGLFGNLIALSLGLTPNFKSNFDLAEDAKLQLSKDTYDDDLDNLLAQIGDQYADLFLAAKNLSDAILLSDILRVNTEITKAPLSASMIKRYDEHHQDLTLLKALVRQQLPEKYKEIFFDQSKNGYAGYIDGGASQEEFYKFIKPILEKMDGTEELLVKLNREDLLRKQRTFDNGSIPHQIHLGELHAILRRQEDFYPFLKDNREKIEKILTFRIPYYVGPLARGNSRFAWMTRKSEETITPWNFEEVVDKGASAQSFIERMTNFDKNLPNEKVLPKHSLLYEYFTVYNELTKVKYVTEGMRKPAFLSGEQKKAIVDLLFKTNRKVTVKQLKEDYFKKIECFDSVEISGVEDRFNASLGTYHDLLKIIKDKDFLDNEENEDILEDIVLTLTLFEDREMIEERLKTYAHLFDDKVMKQLKRRRYTGWGRLSRKLINGIRDKQSGKTILDFLKSDGFANRNFMQLIHDDSLTFKEDIQKAQVSGQGDSLHEHIANLAGSPAIKKGILQTVKVVDELVKVMGRHKPENIVIEMARENQTTQKGQKNSRERMKRIEEGIKELGSQILKEHPVENTQLQNEKLYLYYLQNGRDMYVDQELDINRLSDYDVDHIVPQSFLKDDSIDNKVLTRSDKARGKSDNVPSEEVVKKMKNYWRQLLNAKLITQRKFDNLTKAERGGLSELDKAGFIKRQLVETRQITKHVAQILDSRMNTKYDENDKLIREVKVITLKSKLVSDFRKDFQFYKVREINNYHHAHDAYLNAVVGTALIKKYPKLESEFVYGDYKVYDVRKMIAKSEQEIGKATAKYFFYSNIMNFFKTEITLANGEIRKRPLIETNGETGEIVWDKGRDFATVRKVLSMPQVNIVKKTEVQTGGFSKESILPKRNSDKLIARKKDWDPKKYGGFDSPTVAYSVLVVAKVEKGKSKKLKSVKELLGITIMERSSFEKNPIDFLEAKGYKEVKKDLIIKLPKYSLFELENGRKRMLASAGELQKGNELALPSKYVNFLYLASHYEKLKGSPEDNEQKQLFVEQHKHYLDEIIEQISEFSKRVILADANLDKVLSAYNKHRDKPIREQAENIIHLFTLTNLGAPAAFKYFDTTIDRKRYTSTKEVLDATLIHQSITGLYETRIDLSQLGGDGGEAAAKGGGGSEAAAKGGLLGRDLLTKLKAQIQFSTEGPQVTWEDRPAMCLVLNLEEEYRLHEKPVPPSIDPSWLQLFPMVWAEKAGMGLANQVPPVVVELKSDASPVAVRQYPMSKEAREGIRPHIQRFLDLGILVPCQSPWNTPLLPVKKPGTNDYRPVQDLREVNKRVQDIHPTVPNPYNLLSSLPPSHTWYSVLDLKDAFFCLKLHPNSQPLFAFEWRDPEKGNTGQLTWTRLPQGFKNSPTLFNEALHRDLASFRALNPQVVMLQYVDDLLVAAPTYRDCKEGTRRLLQELSKLGYRVSAKKAQLCREEVTYLGYLLKGGKRWLTPARKATVMKIPTPTTPRQVREFLGTAGFCRLWIPGFASLAAPLYPLTRPKVPFTWTEAHQEAFGRIKEALLSAPALALPDLTKPFALYVDEKEGVARGVLTQTLGPWRRPVAYLSKKLDPVASGWPTCLKAIAAVALLLKDADKLTLGQNVLVIAPHNLESIVRQPPDRWMTNARMTHYQSLLLNERVSFAPPAILNPATLLPVESDDTPIHICSEILAEETGTRPDLRDQPLPGVPAWYTDGSSFIMDGRRQAGAAIVDNKRTVWASNLPEGTSAQKAELIALTQALRLAEGKSINIYTDSRYAFATAHVHGAIYKQRGWLTSAGKDIKNKEEILALLEAIHLPKRVAIIHCPGHQRGTDPVATGNRKADEAAKQAAQSTRILTETTKNAGKRTADGSEFEKRTADGSEFESPKKKAKVE

SEQ ID NO: 1639 - protein, 2127 aa, synthetic construct
MPAAKRVKLDGGDKKYSIGLDIGTNSVGWAVITDEYKVPSKKFKVLGNTDRHSIKKNLIGALLFDSGETAEATRLKRTARRRYTRRKNRICYLQEIFSNEMAKVDDSFFHRLEESFLVEEDKKHERHPIFGNIVDEVAYHEKYPTIYHLRKKLVDSTDKADLRLIYLALAHMIKFRGHFLIEGDLNPDNSDVDKLFIQLVQTYNQLFEENPINASGVDAKAILSARLSKSRRLENLIAQLPGEKKNGLFGNLIALSLGLTPNFKSNFDLAEDAKLQLSKDTYDDDLDNLLAQIGDQYADLFLAAKNLSDAILLSDILRVNTEITKAPLSASMIKRYDEHHQDLTLLKALVRQQLPEKYKEIFFDQSKNGYAGYIDGGASQEEFYKFIKPILEKMDGTEELLVKLNREDLLRKQRTFDNGSIPHQIHLGELHAILRRQEDFYPFLKDNREKIEKILTFRIPYYVGPLARGNSRFAWMTRKSEETITPWNFEEVVDKGASAQSFIERMTNFDKNLPNEKVLPKHSLLYEYFTVYNELTKVKYVTEGMRKPAFLSGEQKKAIVDLLFKTNRKVTVKQLKEDYFKKIECFDSVEISGVEDRFNASLGTYHDLLKIIKDKDFLDNEENEDILEDIVLTLTLFEDREMIEERLKTYAHLFDDKVMKQLKRRRYTGWGRLSRKLINGIRDKQSGKTILDFLKSDGFANRNFMQLIHDDSLTFKEDIQKAQVSGQGDSLHEHIANLAGSPAIKKGILQTVKVVDELVKVMGRHKPENIVIEMARENQTTQKGQKNSRERMKRIEEGIKELGSQILKEHPVENTQLQNEKLYLYYLQNGRDMYVDQELDINRLSDYDVDHIVPQSFLKDDSIDNKVLTRSDKARGKSDNVPSEEVVKKMKNYWRQLLNAKLITQRKFDNLTKAERGGLSELDKAGFIKRQLVETRQITKHVAQILDSRMNTKYDENDKLIREVKVITLKSKLVSDFRKDFQFYKVREINNYHHAHDAYLNAVVGTALIKKYPKLESEFVYGDYKVYDVRKMIAKSEQEIGKATAKYFFYSNIMNFFKTEITLANGEIRKRPLIETNGETGEIVWDKGRDFATVRKVLSMPQVNIVKKTEVQTGGFSKESILPKRNSDKLIARKKDWDPKKYGGFDSPTVAYSVLVVAKVEKGKSKKLKSVKELLGITIMERSSFEKNPIDFLEAKGYKEVKKDLIIKLPKYSLFELENGRKRMLASAGELQKGNELALPSKYVNFLYLASHYEKLKGSPEDNEQKQLFVEQHKHYLDEIIEQISEFSKRVILADANLDKVLSAYNKHRDKPIREQAENIIHLFTLTNLGAPAAFKYFDTTIDRKRYTSTKEVLDATLIHQSITGLYETRIDLSQLGGDGGGGGGSSEAAAKGGLLGRDLLTKLKAQIQFSTEGPQVTWEDRPAMCLVLNLEEEYRLHEKPVPPSIDPSWLQLFPMVWAEKAGMGLANQVPPVVVELKSDASPVAVRQYPMSKEAREGIRPHIQRFLDLGILVPCQSPWNTPLLPVKKPGTNDYRPVQDLREVNKRVQDIHPTVPNPYNLLSSLPPSHTWYSVLDLKDAFFCLKLHPNSQPLFAFEWRDPEKGNTGQLTWTRLPQGFKNSPTLFNEALHRDLASFRALNPQVVMLQYVDDLLVAAPTYRDCKEGTRRLLQELSKLGYRVSAKKAQLCREEVTYLGYLLKGGKRWLTPARKATVMKIPTPTTPRQVREFLGTAGFCRLWIPGFASLAAPLYPLTRPKVPFTWTEAHQEAFGRIKEALLSAPALALPDLTKPFALYVDEKEGVARGVLTQTLGPWRRPVAYLSKKLDPVASGWPTCLKAIAAVALLLKDADKLTLGQNVLVIAPHNLESIVRQPPDRWMTNARMTHYQSLLLNERVSFAPPAILNPATLLPVESDDTPIHICSEILAEETGTRPDLRDQPLPGVPAWYTDGSSFIMDGRRQAGAAIVDNKRTVWASNLPEGTSAQKAELIALTQALRLAEGKSINIYTDSRYAFATAHVHGAIYKQRGWLTSAGKDIKNKEEILALLEAIHLPKRVAIIHCPGHQRGTDPVATGNRKADEAAKQAAQSTRILTETTKNAGKRTADGSEFEKRTADGSEFESPKKKAKVE

SEQ ID NO: 1640 - protein, 2127 aa, synthetic construct
MPAAKRVKLDGGDKKYSIGLDIGTNSVGWAVITDEYKVPSKKFKVLGNTDRHSIKKNLIGALLFDSGETAEATRLKRTARRRYTRRKNRICYLQEIFSNEMAKVDDSFFHRLEESFLVEEDKKHERHPIFGNIVDEVAYHEKYPTIYHLRKKLVDSTDKADLRLIYLALAHMIKFRGHFLIEGDLNPDNSDVDKLFIQLVQTYNQLFEENPINASGVDAKAILSARLSKSRRLENLIAQLPGEKKNGLFGNLIALSLGLTPNFKSNFDLAEDAKLQLSKDTYDDDLDNLLAQIGDQYADLFLAAKNLSDAILLSDILRVNTEITKAPLSASMIKRYDEHHQDLTLLKALVRQQLPEKYKEIFFDQSKNGYAGYIDGGASQEEFYKFIKPILEKMDGTEELLVKLNREDLLRKQRTFDNGSIPHQIHLGELHAILRRQEDFYPFLKDNREKIEKILTFRIPYYVGPLARGNSRFAWMTRKSEETITPWNFEEVVDKGASAQSFIERMTNFDKNLPNEKVLPKHSLLYEYFTVYNELTKVKYVTEGMRKPAFLSGEQKKAIVDLLFKTNRKVTVKQLKEDYFKKIECFDSVEISGVEDRFNASLGTYHDLLKIIKDKDFLDNEENEDILEDIVLTLTLFEDREMIEERLKTYAHLFDDKVMKQLKRRRYTGWGRLSRKLINGIRDKQSGKTILDFLKSDGFANRNFMQLIHDDSLTFKEDIQKAQVSGQGDSLHEHIANLAGSPAIKKGILQTVKVVDELVKVMGRHKPENIVIEMARENQTTQKGQKNSRERMKRIEEGIKELGSQILKEHPVENTQLQNEKLYLYYLQNGRDMYVDQELDINRLSDYDVDHIVPQSFLKDDSIDNKVLTRSDKARGKSDNVPSEEVVKKMKNYWRQLLNAKLITQRKFDNLTKAERGGLSELDKAGFIKRQLVETRQITKHVAQILDSRMNTKYDENDKLIREVKVITLKSKLVSDFRKDFQFYKVREINNYHHAHDAYLNAVVGTALIKKYPKLESEFVYGDYKVYDVRKMIAKSEQEIGKATAKYFFYSNIMNFFKTEITLANGEIRKRPLIETNGETGEIVWDKGRDFATVRKVLSMPQVNIVKKTEVQTGGFSKESILPKRNSDKLIARKKDWDPKKYGGFDSPTVAYSVLVVAKVEKGKSKKLKSVKELLGITIMERSSFEKNPIDFLEAKGYKEVKKDLIIKLPKYSLFELENGRKRMLASAGELQKGNELALPSKYVNFLYLASHYEKLKGSPEDNEQKQLFVEQHKHYLDEIIEQISEFSKRVILADANLDKVLSAYNKHRDKPIREQAENIIHLFTLTNLGAPAAFKYFDTTIDRKRYTSTKEVLDATLIHQSITGLYETRIDLSQLGGDGGPAPGGSEAAAKGGLLGRDLLTKLKAQIQFSTEGPQVTWEDRPAMCLVLNLEEEYRLHEKPVPPSIDPSWLQLFPMVWAEKAGMGLANQVPPVVVELKSDASPVAVRQYPMSKEAREGIRPHIQRFLDLGILVPCQSPWNTPLLPVKKPGTNDYRPVQDLREVNKRVQDIHPTVPNPYNLLSSLPPSHTWYSVLDLKDAFFCLKLHPNSQPLFAFEWRDPEKGNTGQLTWTRLPQGFKNSPTLFNEALHRDLASFRALNPQVVMLQYVDDLLVAAPTYRDCKEGTRRLLQELSKLGYRVSAKKAQLCREEVTYLGYLLKGGKRWLTPARKATVMKIPTPTTPRQVREFLGTAGFCRLWIPGFASLAAPLYPLTRPKVPFTWTEAHQEAFGRIKEALLSAPALALPDLTKPFALYVDEKEGVARGVLTQTLGPWRRPVAYLSKKLDPVASGWPTCLKAIAAVALLLKDADKLTLGQNVLVIAPHNLESIVRQPPDRWMTNARMTHYQSLLLNERVSFAPPAILNPATLLPVESDDTPIHICSEILAEETGTRPDLRDQPLPGVPAWYTDGSSFIMDGRRQAGAAIVDNKRTVWASNLPEGTSAQKAELIALTQALRLAEGKSINIYTDSRYAFATAHVHGAIYKQRGWLTSAGKDIKNKEEILALLEAIHLPKRVAIIHCPGHQRGTDPVATGNRKADEAAKQAAQSTRILTETTKNAGKRTADGSEFEKRTADGSEFESPKKKAKVE

SEQ ID NO: 1641 - protein, 2127 aa, synthetic construct
MPAAKRVKLDGGDKKYSIGLDIGTNSVGWAVITDEYKVPSKKFKVLGNTDRHSIKKNLIGALLFDSGETAEATRLKRTARRRYTRRKNRICYLQEIFSNEMAKVDDSFFHRLEESFLVEEDKKHERHPIFGNIVDEVAYHEKYPTIYHLRKKLVDSTDKADLRLIYLALAHMIKFRGHFLIEGDLNPDNSDVDKLFIQLVQTYNQLFEENPINASGVDAKAILSARLSKSRRLENLIAQLPGEKKNGLFGNLIALSLGLTPNFKSNFDLAEDAKLQLSKDTYDDDLDNLLAQIGDQYADLFLAAKNLSDAILLSDILRVNTEITKAPLSASMIKRYDEHHQDLTLLKALVRQQLPEKYKEIFFDQSKNGYAGYIDGGASQEEFYKFIKPILEKMDGTEELLVKLNREDLLRKQRTFDNGSIPHQIHLGELHAILRRQEDFYPFLKDNREKIEKILTFRIPYYVGPLARGNSRFAWMTRKSEETITPWNFEEVVDKGASAQSFIERMTNFDKNLPNEKVLPKHSLLYEYFTVYNELTKVKYVTEGMRKPAFLSGEQKKAIVDLLFKTNRKVTVKQLKEDYFKKIECFDSVEISGVEDRFNASLGTYHDLLKIIKDKDFLDNEENEDILEDIVLTLTLFEDREMIEERLKTYAHLFDDKVMKQLKRRRYTGWGRLSRKLINGIRDKQSGKTILDFLKSDGFANRNFMQLIHDDSLTFKEDIQKAQVSGQGDSLHEHIANLAGSPAIKKGILQTVKVVDELVKVMGRHKPENIVIEMARENQTTQKGQKNSRERMKRIEEGIKELGSQILKEHPVENTQLQNEKLYLYYLQNGRDMYVDQELDINRLSDYDVDHIVPQSFLKDDSIDNKVLTRSDKARGKSDNVPSEEVVKKMKNYWRQLLNAKLITQRKFDNLTKAERGGLSELDKAGFIKRQLVETRQITKHVAQILDSRMNTKYDENDKLIREVKVITLKSKLVSDFRKDFQFYKVREINNYHHAHDAYLNAVVGTALIKKYPKLESEFVYGDYKVYDVRKMIAKSEQEIGKATAKYFFYSNIMNFFKTEITLANGEIRKRPLIETNGETGEIVWDKGRDFATVRKVLSMPQVNIVKKTEVQTGGFSKESILPKRNSDKLIARKKDWDPKKYGGFDSPTVAYSVLVVAKVEKGKSKKLKSVKELLGITIMERSSFEKNPIDFLEAKGYKEVKKDLIIKLPKYSLFELENGRKRMLASAGELQKGNELALPSKYVNFLYLASHYEKLKGSPEDNEQKQLFVEQHKHYLDEIIEQISEFSKRVILADANLDKVLSAYNKHRDKPIREQAENIIHLFTLTNLGAPAAFKYFDTTIDRKRYTSTKEVLDATLIHQSITGLYETRIDLSQLGGDGGPAPEAAAKGGSGGLLGRDLLTKLKAQIQFSTEGPQVTWEDRPAMCLVLNLEEEYRLHEKPVPPSIDPSWLQLFPMVWAEKAGMGLANQVPPVVVELKSDASPVAVRQYPMSKEAREGIRPHIQRFLDLGILVPCQSPWNTPLLPVKKPGTNDYRPVQDLREVNKRVQDIHPTVPNPYNLLSSLPPSHTWYSVLDLKDAFFCLKLHPNSQPLFAFEWRDPEKGNTGQLTWTRLPQGFKNSPTLFNEALHRDLASFRALNPQVVMLQYVDDLLVAAPTYRDCKEGTRRLLQELSKLGYRVSAKKAQLCREEVTYLGYLLKGGKRWLTPARKATVMKIPTPTTPRQVREFLGTAGFCRLWIPGFASLAAPLYPLTRPKVPFTWTEAHQEAFGRIKEALLSAPALALPDLTKPFALYVDEKEGVARGVLTQTLGPWRRPVAYLSKKLDPVASGWPTCLKAIAAVALLLKDADKLTLGQNVLVIAPHNLESIVRQPPDRWMTNARMTHYQSLLLNERVSFAPPAILNPATLLPVESDDTPIHICSEILAEETGTRPDLRDQPLPGVPAWYTDGSSFIMDGRRQAGAAIVDNKRTVWASNLPEGTSAQKAELIALTQALRLAEGKSINIYTDSRYAFATAHVHGAIYKQRGWLTSAGKDIKNKEEILALLEAIHLPKRVAIIHCPGHQRGTDPVATGNRKADEAAKQAAQSTRILTETTKNAGKRTADGSEFEKRTADGSEFESPKKKAKVE

SEQ ID NO: 1642 - protein, 2122 aa, synthetic construct
MPAAKRVKLDGGDKKYSIGLDIGTNSVGWAVITDEYKVPSKKFKVLGNTDRHSIKKNLIGALLFDSGETAEATRLKRTARRRYTRRKNRICYLQEIFSNEMAKVDDSFFHRLEESFLVEEDKKHERHPIFGNIVDEVAYHEKYPTIYHLRKKLVDSTDKADLRLIYLALAHMIKFRGHFLIEGDLNPDNSDVDKLFIQLVQTYNQLFEENPINASGVDAKAILSARLSKSRRLENLIAQLPGEKKNGLFGNLIALSLGLTPNFKSNFDLAEDAKLQLSKDTYDDDLDNLLAQIGDQYADLFLAAKNLSDAILLSDILRVNTEITKAPLSASMIKRYDEHHQDLTLLKALVRQQLPEKYKEIFFDQSKNGYAGYIDGGASQEEFYKFIKPILEKMDGTEELLVKLNREDLLRKQRTFDNGSIPHQIHLGELHAILRRQEDFYPFLKDNREKIEKILTFRIPYYVGPLARGNSRFAWMTRKSEETITPWNFEEVVDKGASAQSFIERMTNFDKNLPNEKVLPKHSLLYEYFTVYNELTKVKYVTEGMRKPAFLSGEQKKAIVDLLFKTNRKVTVKQLKEDYFKKIECFDSVEISGVEDRFNASLGTYHDLLKIIKDKDFLDNEENEDILEDIVLTLTLFEDREMIEERLKTYAHLFDDKVMKQLKRRRYTGWGRLSRKLINGIRDKQSGKTILDFLKSDGFANRNFMQLIHDDSLTFKEDIQKAQVSGQGDSLHEHIANLAGSPAIKKGILQTVKVVDELVKVMGRHKPENIVIEMARENQTTQKGQKNSRERMKRIEEGIKELGSQILKEHPVENTQLQNEKLYLYYLQNGRDMYVDQELDINRLSDYDVDHIVPQSFLKDDSIDNKVLTRSDKARGKSDNVPSEEVVKKMKNYWRQLLNAKLITQRKFDNLTKAERGGLSELDKAGFIKRQLVETRQITKHVAQILDSRMNTKYDENDKLIREVKVITLKSKLVSDFRKDFQFYKVREINNYHHAHDAYLNAVVGTALIKKYPKLESEFVYGDYKVYDVRKMIAKSEQEIGKATAKYFFYSNIMNFFKTEITLANGEIRKRPLIETNGETGEIVWDKGRDFATVRKVLSMPQVNIVKKTEVQTGGFSKESILPKRNSDKLIARKKDWDPKKYGGFDSPTVAYSVLVVAKVEKGKSKKLKSVKELLGITIMERSSFEKNPIDFLEAKGYKEVKKDLIIKLPKYSLFELENGRKRMLASAGELQKGNELALPSKYVNFLYLASHYEKLKGSPEDNEQKQLFVEQHKHYLDEIIEQISEFSKRVILADANLDKVLSAYNKHRDKPIREQAENIIHLFTLTNLGAPAAFKYFDTTIDRKRYTSTKEVLDATLIHQSITGLYETRIDLSQLGGDGGGGGGGSGGLLGRDLLTKLKAQIQFSTEGPQVTWEDRPAMCLVLNLEEEYRLHEKPVPPSIDPSWLQLFPMVWAEKAGMGLANQVPPVVVELKSDASPVAVRQYPMSKEAREGIRPHIQRFLDLGILVPCQSPWNTPLLPVKKPGTNDYRPVQDLREVNKRVQDIHPTVPNPYNLLSSLPPSHTWYSVLDLKDAFFCLKLHPNSQPLFAFEWRDPEKGNTGQLTWTRLPQGFKNSPTLFNEALHRDLASFRALNPQVVMLQYVDDLLVAAPTYRDCKEGTRRLLQELSKLGYRVSAKKAQLCREEVTYLGYLLKGGKRWLTPARKATVMKIPTPTTPRQVREFLGTAGFCRLWIPGFASLAAPLYPLTRPKVPFTWTEAHQEAFGRIKEALLSAPALALPDLTKPFALYVDEKEGVARGVLTQTLGPWRRPVAYLSKKLDPVASGWPTCLKAIAAVALLLKDADKLTLGQNVLVIAPHNLESIVRQPPDRWMTNARMTHYQSLLLNERVSFAPPAILNPATLLPVESDDTPIHICSEILAEETGTRPDLRDQPLPGVPAWYTDGSSFIMDGRRQAGAAIVDNKRTVWASNLPEGTSAQKAELIALTQALRLAEGKSINIYTDSRYAFATAHVHGAIYKQRGWLTSAGKDIKNKEEILALLEAIHLPKRVAIIHCPGHQRGTDPVATGNRKADEAAKQAAQSTRILTETTKNAGKRTADGSEFEKRTADGSEFESPKKKAKVE

SEQ ID NO: 1643 - protein, 2121 aa, synthetic construct
MPAAKRVKLDGGDKKYSIGLDIGTNSVGWAVITDEYKVPSKKFKVLGNTDRHSIKKNLIGALLFDSGETAEATRLKRTARRRYTRRKNRICYLQEIFSNEMAKVDDSFFHRLEESFLVEEDKKHERHPIFGNIVDEVAYHEKYPTIYHLRKKLVDSTDKADLRLIYLALAHMIKFRGHFLIEGDLNPDNSDVDKLFIQLVQTYNQLFEENPINASGVDAKAILSARLSKSRRLENLIAQLPGEKKNGLFGNLIALSLGLTPNFKSNFDLAEDAKLQLSKDTYDDDLDNLLAQIGDQYADLFLAAKNLSDAILLSDILRVNTEITKAPLSASMIKRYDEHHQDLTLLKALVRQQLPEKYKEIFFDQSKNGYAGYIDGGASQEEFYKFIKPILEKMDGTEELLVKLNREDLLRKQRTFDNGSIPHQIHLGELHAILRRQEDFYPFLKDNREKIEKILTFRIPYYVGPLARGNSRFAWMTRKSEETITPWNFEEVVDKGASAQSFIERMTNFDKNLPNEKVLPKHSLLYEYFTVYNELTKVKYVTEGMRKPAFLSGEQKKAIVDLLFKTNRKVTVKQLKEDYFKKIECFDSVEISGVEDRFNASLGTYHDLLKIIKDKDFLDNEENEDILEDIVLTLTLFEDREMIEERLKTYAHLFDDKVMKQLKRRRYTGWGRLSRKLINGIRDKQSGKTILDFLKSDGFANRNFMQLIHDDSLTFKEDIQKAQVSGQGDSLHEHIANLAGSPAIKKGILQTVKVVDELVKVMGRHKPENIVIEMARENQTTQKGQKNSRERMKRIEEGIKELGSQILKEHPVENTQLQNEKLYLYYLQNGRDMYVDQELDINRLSDYDVDHIVPQSFLKDDSIDNKVLTRSDKARGKSDNVPSEEVVKKMKNYWRQLLNAKLITQRKFDNLTKAERGGLSELDKAGFIKRQLVETRQITKHVAQILDSRMNTKYDENDKLIREVKVITLKSKLVSDFRKDFQFYKVREINNYHHAHDAYLNAVVGTALIKKYPKLESEFVYGDYKVYDVRKMIAKSEQEIGKATAKYFFYSNIMNFFKTEITLANGEIRKRPLIETNGETGEIVWDKGRDFATVRKVLSMPQVNIVKKTEVQTGGFSKESILPKRNSDKLIARKKDWDPKKYGGFDSPTVAYSVLVVAKVEKGKSKKLKSVKELLGITIMERSSFEKNPIDFLEAKGYKEVKKDLIIKLPKYSLFELENGRKRMLASAGELQKGNELALPSKYVNFLYLASHYEKLKGSPEDNEQKQLFVEQHKHYLDEIIEQISEFSKRVILADANLDKVLSAYNKHRDKPIREQAENIIHLFTLTNLGAPAAFKYFDTTIDRKRYTSTKEVLDATLIHQSITGLYETRIDLSQLGGDGGGGGGGGGLLGRDLLTKLKAQIQFSTEGPQVTWEDRPAMCLVLNLEEEYRLHEKPVPPSIDPSWLQLFPMVWAEKAGMGLANQVPPVVVELKSDASPVAVRQYPMSKEAREGIRPHIQRFLDLGILVPCQSPWNTPLLPVKKPGTNDYRPVQDLREVNKRVQDIHPTVPNPYNLLSSLPPSHTWYSVLDLKDAFFCLKLHPNSQPLFAFEWRDPEKGNTGQLTWTRLPQGFKNSPTLFNEALHRDLASFRALNPQVVMLQYVDDLLVAAPTYRDCKEGTRRLLQELSKLGYRVSAKKAQLCREEVTYLGYLLKGGKRWLTPARKATVMKIPTPTTPRQVREFLGTAGFCRLWIPGFASLAAPLYPLTRPKVPFTWTEAHQEAFGRIKEALLSAPALALPDLTKPFALYVDEKEGVARGVLTQTLGPWRRPVAYLSKKLDPVASGWPTCLKAIAAVALLLKDADKLTLGQNVLVIAPHNLESIVRQPPDRWMTNARMTHYQSLLLNERVSFAPPAILNPATLLPVESDDTPIHICSEILAEETGTRPDLRDQPLPGVPAWYTDGSSFIMDGRRQAGAAIVDNKRTVWASNLPEGTSAQKAELIALTQALRLAEGKSINIYTDSRYAFATAHVHGAIYKQRGWLTSAGKDIKNKEEILALLEAIHLPKRVAIIHCPGHQRGTDPVATGNRKADEAAKQAAQSTRILTETTKNAGKRTADGSEFEKRTADGSEFESPKKKAKVE

SEQ ID NO: 1644 - protein, 2127 aa, synthetic construct
MPAAKRVKLDGGDKKYSIGLDIGTNSVGWAVITDEYKVPSKKFKVLGNTDRHSIKKNLIGALLFDSGETAEATRLKRTARRRYTRRKNRICYLQEIFSNEMAKVDDSFFHRLEESFLVEEDKKHERHPIFGNIVDEVAYHEKYPTIYHLRKKLVDSTDKADLRLIYLALAHMIKFRGHFLIEGDLNPDNSDVDKLFIQLVQTYNQLFEENPINASGVDAKAILSARLSKSRRLENLIAQLPGEKKNGLFGNLIALSLGLTPNFKSNFDLAEDAKLQLSKDTYDDDLDNLLAQIGDQYADLFLAAKNLSDAILLSDILRVNTEITKAPLSASMIKRYDEHHQDLTLLKALVRQQLPEKYKEIFFDQSKNGYAGYIDGGASQEEFYKFIKPILEKMDGTEELLVKLNREDLLRKQRTFDNGSIPHQIHLGELHAILRRQEDFYPFLKDNREKIEKILTFRIPYYVGPLARGNSRFAWMTRKSEETITPWNFEEVVDKGASAQSFIERMTNFDKNLPNEKVLPKHSLLYEYFTVYNELTKVKYVTEGMRKPAFLSGEQKKAIVDLLFKTNRKVTVKQLKEDYFKKIECFDSVEISGVEDRFNASLGTYHDLLKIIKDKDFLDNEENEDILEDIVLTLTLFEDREMIEERLKTYAHLFDDKVMKQLKRRRYTGWGRLSRKLINGIRDKQSGKTILDFLKSDGFANRNFMQLIHDDSLTFKEDIQKAQVSGQGDSLHEHIANLAGSPAIKKGILQTVKVVDELVKVMGRHKPENIVIEMARENQTTQKGQKNSRERMKRIEEGIKELGSQILKEHPVENTQLQNEKLYLYYLQNGRDMYVDQELDINRLSDYDVDHIVPQSFLKDDSIDNKVLTRSDKARGKSDNVPSEEVVKKMKNYWRQLLNAKLITQRKFDNLTKAERGGLSELDKAGFIKRQLVETRQITKHVAQILDSRMNTKYDENDKLIREVKVITLKSKLVSDFRKDFQFYKVREINNYHHAHDAYLNAVVGTALIKKYPKLESEFVYGDYKVYDVRKMIAKSEQEIGKATAKYFFYSNIMNFFKTEITLANGEIRKRPLIETNGETGEIVWDKGRDFATVRKVLSMPQVNIVKKTEVQTGGFSKESILPKRNSDKLIARKKDWDPKKYGGFDSPTVAYSVLVVAKVEKGKSKKLKSVKELLGITIMERSSFEKNPIDFLEAKGYKEVKKDLIIKLPKYSLFELENGRKRMLASAGELQKGNELALPSKYVNFLYLASHYEKLKGSPEDNEQKQLFVEQHKHYLDEIIEQISEFSKRVILADANLDKVLSAYNKHRDKPIREQAENIIHLFTLTNLGAPAAFKYFDTTIDRKRYTSTKEVLDATLIHQSITGLYETRIDLSQLGGDGGGGSGSSEAAAKGGLLGRDLLTKLKAQIQFSTEGPQVTWEDRPAMCLVLNLEEEYRLHEKPVPPSIDPSWLQLFPMVWAEKAGMGLANQVPPVVVELKSDASPVAVRQYPMSKEAREGIRPHIQRFLDLGILVPCQSPWNTPLLPVKKPGTNDYRPVQDLREVNKRVQDIHPTVPNPYNLLSSLPPSHTWYSVLDLKDAFFCLKLHPNSQPLFAFEWRDPEKGNTGQLTWTRLPQGFKNSPTLFNEALHRDLASFRALNPQVVMLQYVDDLLVAAPTYRDCKEGTRRLLQELSKLGYRVSAKKAQLCREEVTYLGYLLKGGKRWLTPARKATVMKIPTPTTPRQVREFLGTAGFCRLWIPGFASLAAPLYPLTRPKVPFTWTEAHQEAFGRIKEALLSAPALALPDLTKPFALYVDEKEGVARGVLTQTLGPWRRPVAYLSKKLDPVASGWPTCLKAIAAVALLLKDADKLTLGQNVLVIAPHNLESIVRQPPDRWMTNARMTHYQSLLLNERVSFAPPAILNPATLLPVESDDTPIHICSEILAEETGTRPDLRDQPLPGVPAWYTDGSSFIMDGRRQAGAAIVDNKRTVWASNLPEGTSAQKAELIALTQALRLAEGKSINIYTDSRYAFATAHVHGAIYKQRGWLTSAGKDIKNKEEILALLEAIHLPKRVAIIHCPGHQRGTDPVATGNRKADEAAKQAAQSTRILTETTKNAGKRTADGSEFEKRTADGSEFESPKKKAKVE

SEQ ID NO: 1645 - protein, 2127 aa, synthetic construct
MPAAKRVKLDGGDKKYSIGLDIGTNSVGWAVITDEYKVPSKKFKVLGNTDRHSIKKNLIGALLFDSGETAEATRLKRTARRRYTRRKNRICYLQEIFSNEMAKVDDSFFHRLEESFLVEEDKKHERHPIFGNIVDEVAYHEKYPTIYHLRKKLVDSTDKADLRLIYLALAHMIKFRGHFLIEGDLNPDNSDVDKLFIQLVQTYNQLFEENPINASGVDAKAILSARLSKSRRLENLIAQLPGEKKNGLFGNLIALSLGLTPNFKSNFDLAEDAKLQLSKDTYDDDLDNLLAQIGDQYADLFLAAKNLSDAILLSDILRVNTEITKAPLSASMIKRYDEHHQDLTLLKALVRQQLPEKYKEIFFDQSKNGYAGYIDGGASQEEFYKFIKPILEKMDGTEELLVKLNREDLLRKQRTFDNGSIPHQIHLGELHAILRRQEDFYPFLKDNREKIEKILTFRIPYYVGPLARGNSRFAWMTRKSEETITPWNFEEVVDKGASAQSFIERMTNFDKNLPNEKVLPKHSLLYEYFTVYNELTKVKYVTEGMRKPAFLSGEQKKAIVDLLFKTNRKVTVKQLKEDYFKKIECFDSVEISGVEDRFNASLGTYHDLLKIIKDKDFLDNEENEDILEDIVLTLTLFEDREMIEERLKTYAHLFDDKVMKQLKRRRYTGWGRLSRKLINGIRDKQSGKTILDFLKSDGFANRNFMQLIHDDSLTFKEDIQKAQVSGQGDSLHEHIANLAGSPAIKKGILQTVKVVDELVKVMGRHKPENIVIEMARENQTTQKGQKNSRERMKRIEEGIKELGSQILKEHPVENTQLQNEKLYLYYLQNGRDMYVDQELDINRLSDYDVDHIVPQSFLKDDSIDNKVLTRSDKARGKSDNVPSEEVVKKMKNYWRQLLNAKLITQRKFDNLTKAERGGLSELDKAGFIKRQLVETRQITKHVAQILDSRMNTKYDENDKLIREVKVITLKSKLVSDFRKDFQFYKVREINNYHHAHDAYLNAVVGTALIKKYPKLESEFVYGDYKVYDVRKMIAKSEQEIGKATAKYFFYSNIMNFFKTEITLANGEIRKRPLIETNGETGEIVWDKGRDFATVRKVLSMPQVNIVKKTEVQTGGFSKESILPKRNSDKLIARKKDWDPKKYGGFDSPTVAYSVLVVAKVEKGKSKKLKSVKELLGITIMERSSFEKNPIDFLEAKGYKEVKKDLIIKLPKYSLFELENGRKRMLASAGELQKGNELALPSKYVNFLYLASHYEKLKGSPEDNEQKQLFVEQHKHYLDEIIEQISEFSKRVILADANLDKVLSAYNKHRDKPIREQAENIIHLFTLTNLGAPAAFKYFDTTIDRKRYTSTKEVLDATLIHQSITGLYETRIDLSQLGGDGGEAAAKGGSGSSGGLLGRDLLTKLKAQIQFSTEGPQVTWEDRPAMCLVLNLEEEYRLHEKPVPPSIDPSWLQLFPMVWAEKAGMGLANQVPPVVVELKSDASPVAVRQYPMSKEAREGIRPHIQRFLDLGILVPCQSPWNTPLLPVKKPGTNDYRPVQDLREVNKRVQDIHPTVPNPYNLLSSLPPSHTWYSVLDLKDAFFCLKLHPNSQPLFAFEWRDPEKGNTGQLTWTRLPQGFKNSPTLFNEALHRDLASFRALNPQVVMLQYVDDLLVAAPTYRDCKEGTRRLLQELSKLGYRVSAKKAQLCREEVTYLGYLLKGGKRWLTPARKATVMKIPTPTTPRQVREFLGTAGFCRLWIPGFASLAAPLYPLTRPKVPFTWTEAHQEAFGRIKEALLSAPALALPDLTKPFALYVDEKEGVARGVLTQTLGPWRRPVAYLSKKLDPVASGWPTCLKAIAAVALLLKDADKLTLGQNVLVIAPHNLESIVRQPPDRWMTNARMTHYQSLLLNERVSFAPPAILNPATLLPVESDDTPIHICSEILAEETGTRPDLRDQPLPGVPAWYTDGSSFIMDGRRQAGAAIVDNKRTVWASNLPEGTSAQKAELIALTQALRLAEGKSINIYTDSRYAFATAHVHGAIYKQRGWLTSAGKDIKNKEEILALLEAIHLPKRVAIIHCPGHQRGTDPVATGNRKADEAAKQAAQSTRILTETTKNAGKRTADGSEFEKRTADGSEFESPKKKAKVE

SEQ ID NO: 1646 - protein, 2127 aa, synthetic construct
MPAAKRVKLDGGDKKYSIGLDIGTNSVGWAVITDEYKVPSKKFKVLGNTDRHSIKKNLIGALLFDSGETAEATRLKRTARRRYTRRKNRICYLQEIFSNEMAKVDDSFFHRLEESFLVEEDKKHERHPIFGNIVDEVAYHEKYPTIYHLRKKLVDSTDKADLRLIYLALAHMIKFRGHFLIEGDLNPDNSDVDKLFIQLVQTYNQLFEENPINASGVDAKAILSARLSKSRRLENLIAQLPGEKKNGLFGNLIALSLGLTPNFKSNFDLAEDAKLQLSKDTYDDDLDNLLAQIGDQYADLFLAAKNLSDAILLSDILRVNTEITKAPLSASMIKRYDEHHQDLTLLKALVRQQLPEKYKEIFFDQSKNGYAGYIDGGASQEEFYKFIKPILEKMDGTEELLVKLNREDLLRKQRTFDNGSIPHQIHLGELHAILRRQEDFYPFLKDNREKIEKILTFRIPYYVGPLARGNSRFAWMTRKSEETITPWNFEEVVDKGASAQSFIERMTNFDKNLPNEKVLPKHSLLYEYFTVYNELTKVKYVTEGMRKPAFLSGEQKKAIVDLLFKTNRKVTVKQLKEDYFKKIECFDSVEISGVEDRFNASLGTYHDLLKIIKDKDFLDNEENEDILEDIVLTLTLFEDREMIEERLKTYAHLFDDKVMKQLKRRRYTGWGRLSRKLINGIRDKQSGKTILDFLKSDGFANRNFMQLIHDDSLTFKEDIQKAQVSGQGDSLHEHIANLAGSPAIKKGILQTVKVVDELVKVMGRHKPENIVIEMARENQTTQKGQKNSRERMKRIEEGIKELGSQILKEHPVENTQLQNEKLYLYYLQNGRDMYVDQELDINRLSDYDVDHIVPQSFLKDDSIDNKVLTRSDKARGKSDNVPSEEVVKKMKNYWRQLLNAKLITQRKFDNLTKAERGGLSELDKAGFIKRQLVETRQITKHVAQILDSRMNTKYDENDKLIREVKVITLKSKLVSDFRKDFQFYKVREINNYHHAHDAYLNAVVGTALIKKYPKLESEFVYGDYKVYDVRKMIAKSEQEIGKATAKYFFYSNIMNFFKTEITLANGEIRKRPLIETNGETGEIVWDKGRDFATVRKVLSMPQVNIVKKTEVQTGGFSKESILPKRNSDKLIARKKDWDPKKYGGFDSPTVAYSVLVVAKVEKGKSKKLKSVKELLGITIMERSSFEKNPIDFLEAKGYKEVKKDLIIKLPKYSLFELENGRKRMLASAGELQKGNELALPSKYVNFLYLASHYEKLKGSPEDNEQKQLFVEQHKHYLDEIIEQISEFSKRVILADANLDKVLSAYNKHRDKPIREQAENIIHLFTLTNLGAPAAFKYFDTTIDRKRYTSTKEVLDATLIHQSITGLYETRIDLSQLGGDGGEAAAKGGGGGSGGLLGRDLLTKLKAQIQFSTEGPQVTWEDRPAMCLVLNLEEEYRLHEKPVPPSIDPSWLQLFPMVWAEKAGMGLANQVPPVVVELKSDASPVAVRQYPMSKEAREGIRPHIQRFLDLGILVPCQSPWNTPLLPVKKPGTNDYRPVQDLREVNKRVQDIHPTVPNPYNLLSSLPPSHTWYSVLDLKDAFFCLKLHPNSQPLFAFEWRDPEKGNTGQLTWTRLPQGFKNSPTLFNEALHRDLASFRALNPQVVMLQYVDDLLVAAPTYRDCKEGTRRLLQELSKLGYRVSAKKAQLCREEVTYLGYLLKGGKRWLTPARKATVMKIPTPTTPRQVREFLGTAGFCRLWIPGFASLAAPLYPLTRPKVPFTWTEAHQEAFGRIKEALLSAPALALPDLTKPFALYVDEKEGVARGVLTQTLGPWRRPVAYLSKKLDPVASGWPTCLKAIAAVALLLKDADKLTLGQNVLVIAPHNLESIVRQPPDRWMTNARMTHYQSLLLNERVSFAPPAILNPATLLPVESDDTPIHICSEILAEETGTRPDLRDQPLPGVPAWYTDGSSFIMDGRRQAGAAIVDNKRTVWASNLPEGTSAQKAELIALTQALRLAEGKSINIYTDSRYAFATAHVHGAIYKQRGWLTSAGKDIKNKEEILALLEAIHLPKRVAIIHCPGHQRGTDPVATGNRKADEAAKQAAQSTRILTETTKNAGKRTADGSEFEKRTADGSEFESPKKKAKVE

SEQ ID NO: 1647 - protein, 2127 aa, synthetic construct
MPAAKRVKLDGGDKKYSIGLDIGTNSVGWAVITDEYKVPSKKFKVLGNTDRHSIKKNLIGALLFDSGETAEATRLKRTARRRYTRRKNRICYLQEIFSNEMAKVDDSFFHRLEESFLVEEDKKHERHPIFGNIVDEVAYHEKYPTIYHLRKKLVDSTDKADLRLIYLALAHMIKFRGHFLIEGDLNPDNSDVDKLFIQLVQTYNQLFEENPINASGVDAKAILSARLSKSRRLENLIAQLPGEKKNGLFGNLIALSLGLTPNFKSNFDLAEDAKLQLSKDTYDDDLDNLLAQIGDQYADLFLAAKNLSDAILLSDILRVNTEITKAPLSASMIKRYDEHHQDLTLLKALVRQQLPEKYKEIFFDQSKNGYAGYIDGGASQEEFYKFIKPILEKMDGTEELLVKLNREDLLRKQRTFDNGSIPHQIHLGELHAILRRQEDFYPFLKDNREKIEKILTFRIPYYVGPLARGNSRFAWMTRKSEETITPWNFEEVVDKGASAQSFIERMTNFDKNLPNEKVLPKHSLLYEYFTVYNELTKVKYVTEGMRKPAFLSGEQKKAIVDLLFKTNRKVTVKQLKEDYFKKIECFDSVEISGVEDRFNASLGTYHDLLKIIKDKDFLDNEENEDILEDIVLTLTLFEDREMIEERLKTYAHLFDDKVMKQLKRRRYTGWGRLSRKLINGIRDKQSGKTILDFLKSDGFANRNFMQLIHDDSLTFKEDIQKAQVSGQGDSLHEHIANLAGSPAIKKGILQTVKVVDELVKVMGRHKPENIVIEMARENQTTQKGQKNSRERMKRIEEGIKELGSQILKEHPVENTQLQNEKLYLYYLQNGRDMYVDQELDINRLSDYDVDHIVPQSFLKDDSIDNKVLTRSDKARGKSDNVPSEEVVKKMKNYWRQLLNAKLITQRKFDNLTKAERGGLSELDKAGFIKRQLVETRQITKHVAQILDSRMNTKYDENDKLIREVKVITLKSKLVSDFRKDFQFYKVREINNYHHAHDAYLNAVVGTALIKKYPKLESEFVYGDYKVYDVRKMIAKSEQEIGKATAKYFFYSNIMNFFKTEITLANGEIRKRPLIETNGETGEIVWDKGRDFATVRKVLSMPQVNIVKKTEVQTGGFSKESILPKRNSDKLIARKKDWDPKKYGGFDSPTVAYSVLVVAKVEKGKSKKLKSVKELLGITIMERSSFEKNPIDFLEAKGYKEVKKDLIIKLPKYSLFELENGRKRMLASAGELQKGNELALPSKYVNFLYLASHYEKLKGSPEDNEQKQLFVEQHKHYLDEIIEQISEFSKRVILADANLDKVLSAYNKHRDKPIREQAENIIHLFTLTNLGAPAAFKYFDTTIDRKRYTSTKEVLDATLIHQSITGLYETRIDLSQLGGDGGGGSEAAAKGGGGGLLGRDLLTKLKAQIQFSTEGPQVTWEDRPAMCLVLNLEEEYRLHEKPVPPSIDPSWLQLFPMVWAEKAGMGLANQVPPVVVELKSDASPVAVRQYPMSKEAREGIRPHIQRFLDLGILVPCQSPWNTPLLPVKKPGTNDYRPVQDLREVNKRVQDIHPTVPNPYNLLSSLPPSHTWYSVLDLKDAFFCLKLHPNSQPLFAFEWRDPEKGNTGQLTWTRLPQGFKNSPTLFNEALHRDLASFRALNPQVVMLQYVDDLLVAAPTYRDCKEGTRRLLQELSKLGYRVSAKKAQLCREEVTYLGYLLKGGKRWLTPARKATVMKIPTPTTPRQVREFLGTAGFCRLWIPGFASLAAPLYPLTRPKVPFTWTEAHQEAFGRIKEALLSAPALALPDLTKPFALYVDEKEGVARGVLTQTLGPWRRPVAYLSKKLDPVASGWPTCLKAIAAVALLLKDADKLTLGQNVLVIAPHNLESIVRQPPDRWMTNARMTHYQSLLLNERVSFAPPAILNPATLLPVESDDTPIHICSEILAEETGTRPDLRDQPLPGVPAWYTDGSSFIMDGRRQAGAAIVDNKRTVWASNLPEGTSAQKAELIALTQALRLAEGKSINIYTDSRYAFATAHVHGAIYKQRGWLTSAGKDIKNKEEILALLEAIHLPKRVAIIHCPGHQRGTDPVATGNRKADEAAKQAAQSTRILTETTKNAGKRTADGSEFEKRTADGSEFESPKKKAKVE

SEQ ID NO: 1648 - protein, 2125 aa, synthetic construct
MPAAKRVKLDGGDKKYSIGLDIGTNSVGWAVITDEYKVPSKKFKVLGNTDRHSIKKNLIGALLFDSGETAEATRLKRTARRRYTRRKNRICYLQEIFSNEMAKVDDSFFHRLEESFLVEEDKKHERHPIFGNIVDEVAYHEKYPTIYHLRKKLVDSTDKADLRLIYLALAHMIKFRGHFLIEGDLNPDNSDVDKLFIQLVQTYNQLFEENPINASGVDAKAILSARLSKSRRLENLIAQLPGEKKNGLFGNLIALSLGLTPNFKSNFDLAEDAKLQLSKDTYDDDLDNLLAQIGDQYADLFLAAKNLSDAILLSDILRVNTEITKAPLSASMIKRYDEHHQDLTLLKALVRQQLPEKYKEIFFDQSKNGYAGYIDGGASQEEFYKFIKPILEKMDGTEELLVKLNREDLLRKQRTFDNGSIPHQIHLGELHAILRRQEDFYPFLKDNREKIEKILTFRIPYYVGPLARGNSRFAWMTRKSEETITPWNFEEVVDKGASAQSFIERMTNFDKNLPNEKVLPKHSLLYEYFTVYNELTKVKYVTEGMRKPAFLSGEQKKAIVDLLFKTNRKVTVKQLKEDYFKKIECFDSVEISGVEDRFNASLGTYHDLLKIIKDKDFLDNEENEDILEDIVLTLTLFEDREMIEERLKTYAHLFDDKVMKQLKRRRYTGWGRLSRKLINGIRDKQSGKTILDFLKSDGFANRNFMQLIHDDSLTFKEDIQKAQVSGQGDSLHEHIANLAGSPAIKKGILQTVKVVDELVKVMGRHKPENIVIEMARENQTTQKGQKNSRERMKRIEEGIKELGSQILKEHPVENTQLQNEKLYLYYLQNGRDMYVDQELDINRLSDYDVDHIVPQSFLKDDSIDNKVLTRSDKARGKSDNVPSEEVVKKMKNYWRQLLNAKLITQRKFDNLTKAERGGLSELDKAGFIKRQLVETRQITKHVAQILDSRMNTKYDENDKLIREVKVITLKSKLVSDFRKDFQFYKVREINNYHHAHDAYLNAVVGTALIKKYPKLESEFVYGDYKVYDVRKMIAKSEQEIGKATAKYFFYSNIMNFFKTEITLANGEIRKRPLIETNGETGEIVWDKGRDFATVRKVLSMPQVNIVKKTEVQTGGFSKESILPKRNSDKLIARKKDWDPKKYGGFDSPTVAYSVLVVAKVEKGKSKKLKSVKELLGITIMERSSFEKNPIDFLEAKGYKEVKKDLIIKLPKYSLFELENGRKRMLASAGELQKGNELALPSKYVNFLYLASHYEKLKGSPEDNEQKQLFVEQHKHYLDEIIEQISEFSKRVILADANLDKVLSAYNKHRDKPIREQAENIIHLFTLTNLGAPAAFKYFDTTIDRKRYTSTKEVLDATLIHQSITGLYETRIDLSQLGGDGGGGSPAPGSSGGLLGRDLLTKLKAQIQFSTEGPQVTWEDRPAMCLVLNLEEEYRLHEKPVPPSIDPSWLQLFPMVWAEKAGMGLANQVPPVVVELKSDASPVAVRQYPMSKEAREGIRPHIQRFLDLGILVPCQSPWNTPLLPVKKPGTNDYRPVQDLREVNKRVQDIHPTVPNPYNLLSSLPPSHTWYSVLDLKDAFFCLKLHPNSQPLFAFEWRDPEKGNTGQLTWTRLPQGFKNSPTLFNEALHRDLASFRALNPQVVMLQYVDDLLVAAPTYRDCKEGTRRLLQELSKLGYRVSAKKAQLCREEVTYLGYLLKGGKRWLTPARKATVMKIPTPTTPRQVREFLGTAGFCRLWIPGFASLAAPLYPLTRPKVPFTWTEAHQEAFGRIKEALLSAPALALPDLTKPFALYVDEKEGVARGVLTQTLGPWRRPVAYLSKKLDPVASGWPTCLKAIAAVALLLKDADKLTLGQNVLVIAPHNLESIVRQPPDRWMTNARMTHYQSLLLNERVSFAPPAILNPATLLPVESDDTPIHICSEILAEETGTRPDLRDQPLPGVPAWYTDGSSFIMDGRRQAGAAIVDNKRTVWASNLPEGTSAQKAELIALTQALRLAEGKSINIYTDSRYAFATAHVHGAIYKQRGWLTSAGKDIKNKEEILALLEAIHLPKRVAIIHCPGHQRGTDPVATGNRKADEAAKQAAQSTRILTETTKNAGKRTADGSEFEKRTADGSEFESPKKKAKVE

SEQ ID NO: 1649 - protein, 2149 aa, synthetic construct
MPAAKRVKLDGGDKKYSIGLDIGTNSVGWAVITDEYKVPSKKFKVLGNTDRHSIKKNLIGALLFDSGETAEATRLKRTARRRYTRRKNRICYLQEIFSNEMAKVDDSFFHRLEESFLVEEDKKHERHPIFGNIVDEVAYHEKYPTIYHLRKKLVDSTDKADLRLIYLALAHMIKFRGHFLIEGDLNPDNSDVDKLFIQLVQTYNQLFEENPINASGVDAKAILSARLSKSRRLENLIAQLPGEKKNGLFGNLIALSLGLTPNFKSNFDLAEDAKLQLSKDTYDDDLDNLLAQIGDQYADLFLAAKNLSDAILLSDILRVNTEITKAPLSASMIKRYDEHHQDLTLLKALVRQQLPEKYKEIFFDQSKNGYAGYIDGGASQEEFYKFIKPILEKMDGTEELLVKLNREDLLRKQRTFDNGSIPHQIHLGELHAILRRQEDFYPFLKDNREKIEKILTFRIPYYVGPLARGNSRFAWMTRKSEETITPWNFEEVVDKGASAQSFIERMTNFDKNLPNEKVLPKHSLLYEYFTVYNELTKVKYVTEGMRKPAFLSGEQKKAIVDLLFKTNRKVTVKQLKEDYFKKIECFDSVEISGVEDRFNASLGTYHDLLKIIKDKDFLDNEENEDILEDIVLTLTLFEDREMIEERLKTYAHLFDDKVMKQLKRRRYTGWGRLSRKLINGIRDKQSGKTILDFLKSDGFANRNFMQLIHDDSLTFKEDIQKAQVSGQGDSLHEHIANLAGSPAIKKGILQTVKVVDELVKVMGRHKPENIVIEMARENQTTQKGQKNSRERMKRIEEGIKELGSQILKEHPVENTQLQNEKLYLYYLQNGRDMYVDQELDINRLSDYDVDHIVPQSFLKDDSIDNKVLTRSDKARGKSDNVPSEEVVKKMKNYWRQLLNAKLITQRKFDNLTKAERGGLSELDKAGFIKRQLVETRQITKHVAQILDSRMNTKYDENDKLIREVKVITLKSKLVSDFRKDFQFYKVREINNYHHAHDAYLNAVVGTALIKKYPKLESEFVYGDYKVYDVRKMIAKSEQEIGKATAKYFFYSNIMNFFKTEITLANGEIRKRPLIETNGETGEIVWDKGRDFATVRKVLSMPQVNIVKKTEVQTGGFSKESILPKRNSDKLIARKKDWDPKKYGGFDSPTVAYSVLVVAKVEKGKSKKLKSVKELLGITIMERSSFEKNPIDFLEAKGYKEVKKDLIIKLPKYSLFELENGRKRMLASAGELQKGNELALPSKYVNFLYLASHYEKLKGSPEDNEQKQLFVEQHKHYLDEIIEQISEFSKRVILADANLDKVLSAYNKHRDKPIREQAENIIHLFTLTNLGAPAAFKYFDTTIDRKRYTSTKEVLDATLIHQSITGLYETRIDLSQLGGDGGSGGSSGGSSGSETPGTSESATPESSGGSSGGSSGGLLGRDLLTKLKAQIQFSTEGPQVTWEDRPAMCLVLNLEEEYRLHEKPVPPSIDPSWLQLFPMVWAEKAGMGLANQVPPVVVELKSDASPVAVRQYPMSKEAREGIRPHIQRFLDLGILVPCQSPWNTPLLPVKKPGTNDYRPVQDLREVNKRVQDIHPTVPNPYNLLSSLPPSHTWYSVLDLKDAFFCLKLHPNSQPLFAFEWRDPEKGNTGQLTWTRLPQGFKNSPTLFNEALHRDLASFRALNPQVVMLQYVDDLLVAAPTYRDCKEGTRRLLQELSKLGYRVSAKKAQLCREEVTYLGYLLKGGKRWLTPARKATVMKIPTPTTPRQVREFLGTAGFCRLWIPGFASLAAPLYPLTRPKVPFTWTEAHQEAFGRIKEALLSAPALALPDLTKPFALYVDEKEGVARGVLTQTLGPWRRPVAYLSKKLDPVASGWPTCLKAIAAVALLLKDADKLTLGQNVLVIAPHNLESIVRQPPDRWMTNARMTHYQSLLLNERVSFAPPAILNPATLLPVESDDTPIHICSEILAEETGTRPDLRDQPLPGVPAWYTDGSSFIMDGRRQAGAAIVDNKRTVWASNLPEGTSAQKAELIALTQALRLAEGKSINIYTDSRYAFATAHVHGAIYKQRGWLTSAGKDIKNKEEILALLEAIHLPKRVAIIHCPGHQRGTDPVATGNRKADEAAKQAAQSTRILTETTKNAGKRTADGSEFEKRTADGSEFESPKKKAKVE

SEQ ID NO: 1650 - protein, 2121 aa, synthetic construct
MPAAKRVKLDGGDKKYSIGLDIGTNSVGWAVITDEYKVPSKKFKVLGNTDRHSIKKNLIGALLFDSGETAEATRLKRTARRRYTRRKNRICYLQEIFSNEMAKVDDSFFHRLEESFLVEEDKKHERHPIFGNIVDEVAYHEKYPTIYHLRKKLVDSTDKADLRLIYLALAHMIKFRGHFLIEGDLNPDNSDVDKLFIQLVQTYNQLFEENPINASGVDAKAILSARLSKSRRLENLIAQLPGEKKNGLFGNLIALSLGLTPNFKSNFDLAEDAKLQLSKDTYDDDLDNLLAQIGDQYADLFLAAKNLSDAILLSDILRVNTEITKAPLSASMIKRYDEHHQDLTLLKALVRQQLPEKYKEIFFDQSKNGYAGYIDGGASQEEFYKFIKPILEKMDGTEELLVKLNREDLLRKQRTFDNGSIPHQIHLGELHAILRRQEDFYPFLKDNREKIEKILTFRIPYYVGPLARGNSRFAWMTRKSEETITPWNFEEVVDKGASAQSFIERMTNFDKNLPNEKVLPKHSLLYEYFTVYNELTKVKYVTEGMRKPAFLSGEQKKAIVDLLFKTNRKVTVKQLKEDYFKKIECFDSVEISGVEDRFNASLGTYHDLLKIIKDKDFLDNEENEDILEDIVLTLTLFEDREMIEERLKTYAHLFDDKVMKQLKRRRYTGWGRLSRKLINGIRDKQSGKTILDFLKSDGFANRNFMQLIHDDSLTFKEDIQKAQVSGQGDSLHEHIANLAGSPAIKKGILQTVKVVDELVKVMGRHKPENIVIEMARENQTTQKGQKNSRERMKRIEEGIKELGSQILKEHPVENTQLQNEKLYLYYLQNGRDMYVDQELDINRLSDYDVDHIVPQSFLKDDSIDNKVLTRSDKARGKSDNVPSEEVVKKMKNYWRQLLNAKLITQRKFDNLTKAERGGLSELDKAGFIKRQLVETRQITKHVAQILDSRMNTKYDENDKLIREVKVITLKSKLVSDFRKDFQFYKVREINNYHHAHDAYLNAVVGTALIKKYPKLESEFVYGDYKVYDVRKMIAKSEQEIGKATAKYFFYSNIMNFFKTEITLANGEIRKRPLIETNGETGEIVWDKGRDFATVRKVLSMPQVNIVKKTEVQTGGFSKESILPKRNSDKLIARKKDWDPKKYGGFDSPTVAYSVLVVAKVEKGKSKKLKSVKELLGITIMERSSFEKNPIDFLEAKGYKEVKKDLIIKLPKYSLFELENGRKRMLASAGELQKGNELALPSKYVNFLYLASHYEKLKGSPEDNEQKQLFVEQHKHYLDEIIEQISEFSKRVILADANLDKVLSAYNKHRDKPIREQAENIIHLFTLTNLGAPAAFKYFDTTIDRKRYTSTKEVLDATLIHQSITGLYETRIDLSQLGGDGGGGGGSGGLLGRDLLTKLKAQIQFSTEGPQVTWEDRPAMCLVLNLEEEYRLHEKPVPPSIDPSWLQLFPMVWAEKAGMGLANQVPPVVVELKSDASPVAVRQYPMSKEAREGIRPHIQRFLDLGILVPCQSPWNTPLLPVKKPGTNDYRPVQDLREVNKRVQDIHPTVPNPYNLLSSLPPSHTWYSVLDLKDAFFCLKLHPNSQPLFAFEWRDPEKGNTGQLTWTRLPQGFKNSPTLFNEALHRDLASFRALNPQVVMLQYVDDLLVAAPTYRDCKEGTRRLLQELSKLGYRVSAKKAQLCREEVTYLGYLLKGGKRWLTPARKATVMKIPTPTTPRQVREFLGTAGFCRLWIPGFASLAAPLYPLTRPKVPFTWTEAHQEAFGRIKEALLSAPALALPDLTKPFALYVDEKEGVARGVLTQTLGPWRRPVAYLSKKLDPVASGWPTCLKAIAAVALLLKDADKLTLGQNVLVIAPHNLESIVRQPPDRWMTNARMTHYQSLLLNERVSFAPPAILNPATLLPVESDDTPIHICSEILAEETGTRPDLRDQPLPGVPAWYTDGSSFIMDGRRQAGAAIVDNKRTVWASNLPEGTSAQKAELIALTQALRLAEGKSINIYTDSRYAFATAHVHGAIYKQRGWLTSAGKDIKNKEEILALLEAIHLPKRVAIIHCPGHQRGTDPVATGNRKADEAAKQAAQSTRILTETTKNAGKRTADGSEFEKRTADGSEFESPKKKAKVE

SEQ ID NO: 1651 - protein, 2125 aa, synthetic construct
MPAAKRVKLDGGDKKYSIGLDIGTNSVGWAVITDEYKVPSKKFKVLGNTDRHSIKKNLIGALLFDSGETAEATRLKRTARRRYTRRKNRICYLQEIFSNEMAKVDDSFFHRLEESFLVEEDKKHERHPIFGNIVDEVAYHEKYPTIYHLRKKLVDSTDKADLRLIYLALAHMIKFRGHFLIEGDLNPDNSDVDKLFIQLVQTYNQLFEENPINASGVDAKAILSARLSKSRRLENLIAQLPGEKKNGLFGNLIALSLGLTPNFKSNFDLAEDAKLQLSKDTYDDDLDNLLAQIGDQYADLFLAAKNLSDAILLSDILRVNTEITKAPLSASMIKRYDEHHQDLTLLKALVRQQLPEKYKEIFFDQSKNGYAGYIDGGASQEEFYKFIKPILEKMDGTEELLVKLNREDLLRKQRTFDNGSIPHQIHLGELHAILRRQEDFYPFLKDNREKIEKILTFRIPYYVGPLARGNSRFAWMTRKSEETITPWNFEEVVDKGASAQSFIERMTNFDKNLPNEKVLPKHSLLYEYFTVYNELTKVKYVTEGMRKPAFLSGEQKKAIVDLLFKTNRKVTVKQLKEDYFKKIECFDSVEISGVEDRFNASLGTYHDLLKIIKDKDFLDNEENEDILEDIVLTLTLFEDREMIEERLKTYAHLFDDKVMKQLKRRRYTGWGRLSRKLINGIRDKQSGKTILDFLKSDGFANRNFMQLIHDDSLTFKEDIQKAQVSGQGDSLHEHIANLAGSPAIKKGILQTVKVVDELVKVMGRHKPENIVIEMARENQTTQKGQKNSRERMKRIEEGIKELGSQILKEHPVENTQLQNEKLYLYYLQNGRDMYVDQELDINRLSDYDVDHIVPQSFLKDDSIDNKVLTRSDKARGKSDNVPSEEVVKKMKNYWRQLLNAKLITQRKFDNLTKAERGGLSELDKAGFIKRQLVETRQITKHVAQILDSRMNTKYDENDKLIREVKVITLKSKLVSDFRKDFQFYKVREINNYHHAHDAYLNAVVGTALIKKYPKLESEFVYGDYKVYDVRKMIAKSEQEIGKATAKYFFYSNIMNFFKTEITLANGEIRKRPLIETNGETGEIVWDKGRDFATVRKVLSMPQVNIVKKTEVQTGGFSKESILPKRNSDKLIARKKDWDPKKYGGFDSPTVAYSVLVVAKVEKGKSKKLKSVKELLGITIMERSSFEKNPIDFLEAKGYKEVKKDLIIKLPKYSLFELENGRKRMLASAGELQKGNELALPSKYVNFLYLASHYEKLKGSPEDNEQKQLFVEQHKHYLDEIIEQISEFSKRVILADANLDKVLSAYNKHRDKPIREQAENIIHLFTLTNLGAPAAFKYFDTTIDRKRYTSTKEVLDATLIHQSITGLYETRIDLSQLGGDGGPAPGSSGGSGGLLGRDLLTKLKAQIQFSTEGPQVTWEDRPAMCLVLNLEEEYRLHEKPVPPSIDPSWLQLFPMVWAEKAGMGLANQVPPVVVELKSDASPVAVRQYPMSKEAREGIRPHIQRFLDLGILVPCQSPWNTPLLPVKKPGTNDYRPVQDLREVNKRVQDIHPTVPNPYNLLSSLPPSHTWYSVLDLKDAFFCLKLHPNSQPLFAFEWRDPEKGNTGQLTWTRLPQGFKNSPTLFNEALHRDLASFRALNPQVVMLQYVDDLLVAAPTYRDCKEGTRRLLQELSKLGYRVSAKKAQLCREEVTYLGYLLKGGKRWLTPARKATVMKIPTPTTPRQVREFLGTAGFCRLWIPGFASLAAPLYPLTRPKVPFTWTEAHQEAFGRIKEALLSAPALALPDLTKPFALYVDEKEGVARGVLTQTLGPWRRPVAYLSKKLDPVASGWPTCLKAIAAVALLLKDADKLTLGQNVLVIAPHNLESIVRQPPDRWMTNARMTHYQSLLLNERVSFAPPAILNPATLLPVESDDTPIHICSEILAEETGTRPDLRDQPLPGVPAWYTDGSSFIMDGRRQAGAAIVDNKRTVWASNLPEGTSAQKAELIALTQALRLAEGKSINIYTDSRYAFATAHVHGAIYKQRGWLTSAGKDIKNKEEILALLEAIHLPKRVAIIHCPGHQRGTDPVATGNRKADEAAKQAAQSTRILTETTKNAGKRTADGSEFEKRTADGSEFESPKKKAKVE

SEQ ID NO: 1652 - protein, 2125 aa, synthetic construct
MPAAKRVKLDGGDKKYSIGLDIGTNSVGWAVITDEYKVPSKKFKVLGNTDRHSIKKNLIGALLFDSGETAEATRLKRTARRRYTRRKNRICYLQEIFSNEMAKVDDSFFHRLEESFLVEEDKKHERHPIFGNIVDEVAYHEKYPTIYHLRKKLVDSTDKADLRLIYLALAHMIKFRGHFLIEGDLNPDNSDVDKLFIQLVQTYNQLFEENPINASGVDAKAILSARLSKSRRLENLIAQLPGEKKNGLFGNLIALSLGLTPNFKSNFDLAEDAKLQLSKDTYDDDLDNLLAQIGDQYADLFLAAKNLSDAILLSDILRVNTEITKAPLSASMIKRYDEHHQDLTLLKALVRQQLPEKYKEIFFDQSKNGYAGYIDGGASQEEFYKFIKPILEKMDGTEELLVKLNREDLLRKQRTFDNGSIPHQIHLGELHAILRRQEDFYPFLKDNREKIEKILTFRIPYYVGPLARGNSRFAWMTRKSEETITPWNFEEVVDKGASAQSFIERMTNFDKNLPNEKVLPKHSLLYEYFTVYNELTKVKYVTEGMRKPAFLSGEQKKAIVDLLFKTNRKVTVKQLKEDYFKKIECFDSVEISGVEDRFNASLGTYHDLLKIIKDKDFLDNEENEDILEDIVLTLTLFEDREMIEERLKTYAHLFDDKVMKQLKRRRYTGWGRLSRKLINGIRDKQSGKTILDFLKSDGFANRNFMQLIHDDSLTFKEDIQKAQVSGQGDSLHEHIANLAGSPAIKKGILQTVKVVDELVKVMGRHKPENIVIEMARENQTTQKGQKNSRERMKRIEEGIKELGSQILKEHPVENTQLQNEKLYLYYLQNGRDMYVDQELDINRLSDYDVDHIVPQSFLKDDSIDNKVLTRSDKARGKSDNVPSEEVVKKMKNYWRQLLNAKLITQRKFDNLTKAERGGLSELDKAGFIKRQLVETRQITKHVAQILDSRMNTKYDENDKLIREVKVITLKSKLVSDFRKDFQFYKVREINNYHHAHDAYLNAVVGTALIKKYPKLESEFVYGDYKVYDVRKMIAKSEQEIGKATAKYFFYSNIMNFFKTEITLANGEIRKRPLIETNGETGEIVWDKGRDFATVRKVLSMPQVNIVKKTEVQTGGFSKESILPKRNSDKLIARKKDWDPKKYGGFDSPTVAYSVLVVAKVEKGKSKKLKSVKELLGITIMERSSFEKNPIDFLEAKGYKEVKKDLIIKLPKYSLFELENGRKRMLASAGELQKGNELALPSKYVNFLYLASHYEKLKGSPEDNEQKQLFVEQHKHYLDEIIEQISEFSKRVILADANLDKVLSAYNKHRDKPIREQAENIIHLFTLTNLGAPAAFKYFDTTIDRKRYTSTKEVLDATLIHQSITGLYETRIDLSQLGGDGGPAPGGSGGGGGLLGRDLLTKLKAQIQFSTEGPQVTWEDRPAMCLVLNLEEEYRLHEKPVPPSIDPSWLQLFPMVWAEKAGMGLANQVPPVVVELKSDASPVAVRQYPMSKEAREGIRPHIQRFLDLGILVPCQSPWNTPLLPVKKPGTNDYRPVQDLREVNKRVQDIHPTVPNPYNLLSSLPPSHTWYSVLDLKDAFFCLKLHPNSQPLFAFEWRDPEKGNTGQLTWTRLPQGFKNSPTLFNEALHRDLASFRALNPQVVMLQYVDDLLVAAPTYRDCKEGTRRLLQELSKLGYRVSAKKAQLCREEVTYLGYLLKGGKRWLTPARKATVMKIPTPTTPRQVREFLGTAGFCRLWIPGFASLAAPLYPLTRPKVPFTWTEAHQEAFGRIKEALLSAPALALPDLTKPFALYVDEKEGVARGVLTQTLGPWRRPVAYLSKKLDPVASGWPTCLKAIAAVALLLKDADKLTLGQNVLVIAPHNLESIVRQPPDRWMTNARMTHYQSLLLNERVSFAPPAILNPATLLPVESDDTPIHICSEILAEETGTRPDLRDQPLPGVPAWYTDGSSFIMDGRRQAGAAIVDNKRTVWASNLPEGTSAQKAELIALTQALRLAEGKSINIYTDSRYAFATAHVHGAIYKQRGWLTSAGKDIKNKEEILALLEAIHLPKRVAIIHCPGHQRGTDPVATGNRKADEAAKQAAQSTRILTETTKNAGKRTADGSEFEKRTADGSEFESPKKKAKVE

SEQ ID NO: 1653 - protein, 2125 aa, synthetic construct
MPAAKRVKLDGGDKKYSIGLDIGTNSVGWAVITDEYKVPSKKFKVLGNTDRHSIKKNLIGALLFDSGETAEATRLKRTARRRYTRRKNRICYLQEIFSNEMAKVDDSFFHRLEESFLVEEDKKHERHPIFGNIVDEVAYHEKYPTIYHLRKKLVDSTDKADLRLIYLALAHMIKFRGHFLIEGDLNPDNSDVDKLFIQLVQTYNQLFEENPINASGVDAKAILSARLSKSRRLENLIAQLPGEKKNGLFGNLIALSLGLTPNFKSNFDLAEDAKLQLSKDTYDDDLDNLLAQIGDQYADLFLAAKNLSDAILLSDILRVNTEITKAPLSASMIKRYDEHHQDLTLLKALVRQQLPEKYKEIFFDQSKNGYAGYIDGGASQEEFYKFIKPILEKMDGTEELLVKLNREDLLRKQRTFDNGSIPHQIHLGELHAILRRQEDFYPFLKDNREKIEKILTFRIPYYVGPLARGNSRFAWMTRKSEETITPWNFEEVVDKGASAQSFIERMTNFDKNLPNEKVLPKHSLLYEYFTVYNELTKVKYVTEGMRKPAFLSGEQKKAIVDLLFKTNRKVTVKQLKEDYFKKIECFDSVEISGVEDRFNASLGTYHDLLKIIKDKDFLDNEENEDILEDIVLTLTLFEDREMIEERLKTYAHLFDDKVMKQLKRRRYTGWGRLSRKLINGIRDKQSGKTILDFLKSDGFANRNFMQLIHDDSLTFKEDIQKAQVSGQGDSLHEHIANLAGSPAIKKGILQTVKVVDELVKVMGRHKPENIVIEMARENQTTQKGQKNSRERMKRIEEGIKELGSQILKEHPVENTQLQNEKLYLYYLQNGRDMYVDQELDINRLSDYDVDHIVPQSFLKDDSIDNKVLTRSDKARGKSDNVPSEEVVKKMKNYWRQLLNAKLITQRKFDNLTKAERGGLSELDKAGFIKRQLVETRQITKHVAQILDSRMNTKYDENDKLIREVKVITLKSKLVSDFRKDFQFYKVREINNYHHAHDAYLNAVVGTALIKKYPKLESEFVYGDYKVYDVRKMIAKSEQEIGKATAKYFFYSNIMNFFKTEITLANGEIRKRPLIETNGETGEIVWDKGRDFATVRKVLSMPQVNIVKKTEVQTGGFSKESILPKRNSDKLIARKKDWDPKKYGGFDSPTVAYSVLVVAKVEKGKSKKLKSVKELLGITIMERSSFEKNPIDFLEAKGYKEVKKDLIIKLPKYSLFELENGRKRMLASAGELQKGNELALPSKYVNFLYLASHYEKLKGSPEDNEQKQLFVEQHKHYLDEIIEQISEFSKRVILADANLDKVLSAYNKHRDKPIREQAENIIHLFTLTNLGAPAAFKYFDTTIDRKRYTSTKEVLDATLIHQSITGLYETRIDLSQLGGDGGGGGGGSPAPGGLLGRDLLTKLKAQIQFSTEGPQVTWEDRPAMCLVLNLEEEYRLHEKPVPPSIDPSWLQLFPMVWAEKAGMGLANQVPPVVVELKSDASPVAVRQYPMSKEAREGIRPHIQRFLDLGILVPCQSPWNTPLLPVKKPGTNDYRPVQDLREVNKRVQDIHPTVPNPYNLLSSLPPSHTWYSVLDLKDAFFCLKLHPNSQPLFAFEWRDPEKGNTGQLTWTRLPQGFKNSPTLFNEALHRDLASFRALNPQVVMLQYVDDLLVAAPTYRDCKEGTRRLLQELSKLGYRVSAKKAQLCREEVTYLGYLLKGGKRWLTPARKATVMKIPTPTTPRQVREFLGTAGFCRLWIPGFASLAAPLYPLTRPKVPFTWTEAHQEAFGRIKEALLSAPALALPDLTKPFALYVDEKEGVARGVLTQTLGPWRRPVAYLSKKLDPVASGWPTCLKAIAAVALLLKDADKLTLGQNVLVIAPHNLESIVRQPPDRWMTNARMTHYQSLLLNERVSFAPPAILNPATLLPVESDDTPIHICSEILAEETGTRPDLRDQPLPGVPAWYTDGSSFIMDGRRQAGAAIVDNKRTVWASNLPEGTSAQKAELIALTQALRLAEGKSINIYTDSRYAFATAHVHGAIYKQRGWLTSAGKDIKNKEEILALLEAIHLPKRVAIIHCPGHQRGTDPVATGNRKADEAAKQAAQSTRILTETTKNAGKRTADGSEFEKRTADGSEFESPKKKAKVE

SEQ ID NO: 1654 - protein, 2127 aa, synthetic construct
MPAAKRVKLDGGDKKYSIGLDIGTNSVGWAVITDEYKVPSKKFKVLGNTDRHSIKKNLIGALLFDSGETAEATRLKRTARRRYTRRKNRICYLQEIFSNEMAKVDDSFFHRLEESFLVEEDKKHERHPIFGNIVDEVAYHEKYPTIYHLRKKLVDSTDKADLRLIYLALAHMIKFRGHFLIEGDLNPDNSDVDKLFIQLVQTYNQLFEENPINASGVDAKAILSARLSKSRRLENLIAQLPGEKKNGLFGNLIALSLGLTPNFKSNFDLAEDAKLQLSKDTYDDDLDNLLAQIGDQYADLFLAAKNLSDAILLSDILRVNTEITKAPLSASMIKRYDEHHQDLTLLKALVRQQLPEKYKEIFFDQSKNGYAGYIDGGASQEEFYKFIKPILEKMDGTEELLVKLNREDLLRKQRTFDNGSIPHQIHLGELHAILRRQEDFYPFLKDNREKIEKILTFRIPYYVGPLARGNSRFAWMTRKSEETITPWNFEEVVDKGASAQSFIERMTNFDKNLPNEKVLPKHSLLYEYFTVYNELTKVKYVTEGMRKPAFLSGEQKKAIVDLLFKTNRKVTVKQLKEDYFKKIECFDSVEISGVEDRFNASLGTYHDLLKIIKDKDFLDNEENEDILEDIVLTLTLFEDREMIEERLKTYAHLFDDKVMKQLKRRRYTGWGRLSRKLINGIRDKQSGKTILDFLKSDGFANRNFMQLIHDDSLTFKEDIQKAQVSGQGDSLHEHIANLAGSPAIKKGILQTVKVVDELVKVMGRHKPENIVIEMARENQTTQKGQKNSRERMKRIEEGIKELGSQILKEHPVENTQLQNEKLYLYYLQNGRDMYVDQELDINRLSDYDVDHIVPQSFLKDDSIDNKVLTRSDKARGKSDNVPSEEVVKKMKNYWRQLLNAKLITQRKFDNLTKAERGGLSELDKAGFIKRQLVETRQITKHVAQILDSRMNTKYDENDKLIREVKVITLKSKLVSDFRKDFQFYKVREINNYHHAHDAYLNAVVGTALIKKYPKLESEFVYGDYKVYDVRKMIAKSEQEIGKATAKYFFYSNIMNFFKTEITLANGEIRKRPLIETNGETGEIVWDKGRDFATVRKVLSMPQVNIVKKTEVQTGGFSKESILPKRNSDKLIARKKDWDPKKYGGFDSPTVAYSVLVVAKVEKGKSKKLKSVKELLGITIMERSSFEKNPIDFLEAKGYKEVKKDLIIKLPKYSLFELENGRKRMLASAGELQKGNELALPSKYVNFLYLASHYEKLKGSPEDNEQKQLFVEQHKHYLDEIIEQISEFSKRVILADANLDKVLSAYNKHRDKPIREQAENIIHLFTLTNLGAPAAFKYFDTTIDRKRYTSTKEVLDATLIHQSITGLYETRIDLSQLGGDGGGGSEAAAKPAPGGLLGRDLLTKLKAQIQFSTEGPQVTWEDRPAMCLVLNLEEEYRLHEKPVPPSIDPSWLQLFPMVWAEKAGMGLANQVPPVVVELKSDASPVAVRQYPMSKEAREGIRPHIQRFLDLGILVPCQSPWNTPLLPVKKPGTNDYRPVQDLREVNKRVQDIHPTVPNPYNLLSSLPPSHTWYSVLDLKDAFFCLKLHPNSQPLFAFEWRDPEKGNTGQLTWTRLPQGFKNSPTLFNEALHRDLASFRALNPQVVMLQYVDDLLVAAPTYRDCKEGTRRLLQELSKLGYRVSAKKAQLCREEVTYLGYLLKGGKRWLTPARKATVMKIPTPTTPRQVREFLGTAGFCRLWIPGFASLAAPLYPLTRPKVPFTWTEAHQEAFGRIKEALLSAPALALPDLTKPFALYVDEKEGVARGVLTQTLGPWRRPVAYLSKKLDPVASGWPTCLKAIAAVALLLKDADKLTLGQNVLVIAPHNLESIVRQPPDRWMTNARMTHYQSLLLNERVSFAPPAILNPATLLPVESDDTPIHICSEILAEETGTRPDLRDQPLPGVPAWYTDGSSFIMDGRRQAGAAIVDNKRTVWASNLPEGTSAQKAELIALTQALRLAEGKSINIYTDSRYAFATAHVHGAIYKQRGWLTSAGKDIKNKEEILALLEAIHLPKRVAIIHCPGHQRGTDPVATGNRKADEAAKQAAQSTRILTETTKNAGKRTADGSEFEKRTADGSEFESPKKKAKVE

SEQ ID NO: 1655 - protein, 2125 aa, synthetic construct
MPAAKRVKLDGGDKKYSIGLDIGTNSVGWAVITDEYKVPSKKFKVLGNTDRHSIKKNLIGALLFDSGETAEATRLKRTARRRYTRRKNRICYLQEIFSNEMAKVDDSFFHRLEESFLVEEDKKHERHPIFGNIVDEVAYHEKYPTIYHLRKKLVDSTDKADLRLIYLALAHMIKFRGHFLIEGDLNPDNSDVDKLFIQLVQTYNQLFEENPINASGVDAKAILSARLSKSRRLENLIAQLPGEKKNGLFGNLIALSLGLTPNFKSNFDLAEDAKLQLSKDTYDDDLDNLLAQIGDQYADLFLAAKNLSDAILLSDILRVNTEITKAPLSASMIKRYDEHHQDLTLLKALVRQQLPEKYKEIFFDQSKNGYAGYIDGGASQEEFYKFIKPILEKMDGTEELLVKLNREDLLRKQRTFDNGSIPHQIHLGELHAILRRQEDFYPFLKDNREKIEKILTFRIPYYVGPLARGNSRFAWMTRKSEETITPWNFEEVVDKGASAQSFIERMTNFDKNLPNEKVLPKHSLLYEYFTVYNELTKVKYVTEGMRKPAFLSGEQKKAIVDLLFKTNRKVTVKQLKEDYFKKIECFDSVEISGVEDRFNASLGTYHDLLKIIKDKDFLDNEENEDILEDIVLTLTLFEDREMIEERLKTYAHLFDDKVMKQLKRRRYTGWGRLSRKLINGIRDKQSGKTILDFLKSDGFANRNFMQLIHDDSLTFKEDIQKAQVSGQGDSLHEHIANLAGSPAIKKGILQTVKVVDELVKVMGRHKPENIVIEMARENQTTQKGQKNSRERMKRIEEGIKELGSQILKEHPVENTQLQNEKLYLYYLQNGRDMYVDQELDINRLSDYDVDHIVPQSFLKDDSIDNKVLTRSDKARGKSDNVPSEEVVKKMKNYWRQLLNAKLITQRKFDNLTKAERGGLSELDKAGFIKRQLVETRQITKHVAQILDSRMNTKYDENDKLIREVKVITLKSKLVSDFRKDFQFYKVREINNYHHAHDAYLNAVVGTALIKKYPKLESEFVYGDYKVYDVRKMIAKSEQEIGKATAKYFFYSNIMNFFKTEITLANGEIRKRPLIETNGETGEIVWDKGRDFATVRKVLSMPQVNIVKKTEVQTGGFSKESILPKRNSDKLIARKKDWDPKKYGGFDSPTVAYSVLVVAKVEKGKSKKLKSVKELLGITIMERSSFEKNPIDFLEAKGYKEVKKDLIIKLPKYSLFELENGRKRMLASAGELQKGNELALPSKYVNFLYLASHYEKLKGSPEDNEQKQLFVEQHKHYLDEIIEQISEFSKRVILADANLDKVLSAYNKHRDKPIREQAENIIHLFTLTNLGAPAAFKYFDTTIDRKRYTSTKEVLDATLIHQSITGLYETRIDLSQLGGDGGGGSGGSGGSGGLLGRDLLTKLKAQIQFSTEGPQVTWEDRPAMCLVLNLEEEYRLHEKPVPPSIDPSWLQLFPMVWAEKAGMGLANQVPPVVVELKSDASPVAVRQYPMSKEAREGIRPHIQRFLDLGILVPCQSPWNTPLLPVKKPGTNDYRPVQDLREVNKRVQDIHPTVPNPYNLLSSLPPSHTWYSVLDLKDAFFCLKLHPNSQPLFAFEWRDPEKGNTGQLTWTRLPQGFKNSPTLFNEALHRDLASFRALNPQVVMLQYVDDLLVAAPTYRDCKEGTRRLLQELSKLGYRVSAKKAQLCREEVTYLGYLLKGGKRWLTPARKATVMKIPTPTTPRQVREFLGTAGFCRLWIPGFASLAAPLYPLTRPKVPFTWTEAHQEAFGRIKEALLSAPALALPDLTKPFALYVDEKEGVARGVLTQTLGPWRRPVAYLSKKLDPVASGWPTCLKAIAAVALLLKDADKLTLGQNVLVIAPHNLESIVRQPPDRWMTNARMTHYQSLLLNERVSFAPPAILNPATLLPVESDDTPIHICSEILAEETGTRPDLRDQPLPGVPAWYTDGSSFIMDGRRQAGAAIVDNKRTVWASNLPEGTSAQKAELIALTQALRLAEGKSINIYTDSRYAFATAHVHGAIYKQRGWLTSAGKDIKNKEEILALLEAIHLPKRVAIIHCPGHQRGTDPVATGNRKADEAAKQAAQSTRILTETTKNAGKRTADGSEFEKRTADGSEFESPKKKAKVE

SEQ ID NO: 1656 - protein, 2127 aa, synthetic construct
MPAAKRVKLDGGDKKYSIGLDIGTNSVGWAVITDEYKVPSKKFKVLGNTDRHSIKKNLIGALLFDSGETAEATRLKRTARRRYTRRKNRICYLQEIFSNEMAKVDDSFFHRLEESFLVEEDKKHERHPIFGNIVDEVAYHEKYPTIYHLRKKLVDSTDKADLRLIYLALAHMIKFRGHFLIEGDLNPDNSDVDKLFIQLVQTYNQLFEENPINASGVDAKAILSARLSKSRRLENLIAQLPGEKKNGLFGNLIALSLGLTPNFKSNFDLAEDAKLQLSKDTYDDDLDNLLAQIGDQYADLFLAAKNLSDAILLSDILRVNTEITKAPLSASMIKRYDEHHQDLTLLKALVRQQLPEKYKEIFFDQSKNGYAGYIDGGASQEEFYKFIKPILEKMDGTEELLVKLNREDLLRKQRTFDNGSIPHQIHLGELHAILRRQEDFYPFLKDNREKIEKILTFRIPYYVGPLARGNSRFAWMTRKSEETITPWNFEEVVDKGASAQSFIERMTNFDKNLPNEKVLPKHSLLYEYFTVYNELTKVKYVTEGMRKPAFLSGEQKKAIVDLLFKTNRKVTVKQLKEDYFKKIECFDSVEISGVEDRFNASLGTYHDLLKIIKDKDFLDNEENEDILEDIVLTLTLFEDREMIEERLKTYAHLFDDKVMKQLKRRRYTGWGRLSRKLINGIRDKQSGKTILDFLKSDGFANRNFMQLIHDDSLTFKEDIQKAQVSGQGDSLHEHIANLAGSPAIKKGILQTVKVVDELVKVMGRHKPENIVIEMARENQTTQKGQKNSRERMKRIEEGIKELGSQILKEHPVENTQLQNEKLYLYYLQNGRDMYVDQELDINRLSDYDVDHIVPQSFLKDDSIDNKVLTRSDKARGKSDNVPSEEVVKKMKNYWRQLLNAKLITQRKFDNLTKAERGGLSELDKAGFIKRQLVETRQITKHVAQILDSRMNTKYDENDKLIREVKVITLKSKLVSDFRKDFQFYKVREINNYHHAHDAYLNAVVGTALIKKYPKLESEFVYGDYKVYDVRKMIAKSEQEIGKATAKYFFYSNIMNFFKTEITLANGEIRKRPLIETNGETGEIVWDKGRDFATVRKVLSMPQVNIVKKTEVQTGGFSKESILPKRNSDKLIARKKDWDPKKYGGFDSPTVAYSVLVVAKVEKGKSKKLKSVKELLGITIMERSSFEKNPIDFLEAKGYKEVKKDLIIKLPKYSLFELENGRKRMLASAGELQKGNELALPSKYVNFLYLASHYEKLKGSPEDNEQKQLFVEQHKHYLDEIIEQISEFSKRVILADANLDKVLSAYNKHRDKPIREQAENIIHLFTLTNLGAPAAFKYFDTTIDRKRYTSTKEVLDATLIHQSITGLYETRIDLSQLGGDGGPAPEAAAKGSSGGLLGRDLLTKLKAQIQFSTEGPQVTWEDRPAMCLVLNLEEEYRLHEKPVPPSIDPSWLQLFPMVWAEKAGMGLANQVPPVVVELKSDASPVAVRQYPMSKEAREGIRPHIQRFLDLGILVPCQSPWNTPLLPVKKPGTNDYRPVQDLREVNKRVQDIHPTVPNPYNLLSSLPPSHTWYSVLDLKDAFFCLKLHPNSQPLFAFEWRDPEKGNTGQLTWTRLPQGFKNSPTLFNEALHRDLASFRALNPQVVMLQYVDDLLVAAPTYRDCKEGTRRLLQELSKLGYRVSAKKAQLCREEVTYLGYLLKGGKRWLTPARKATVMKIPTPTTPRQVREFLGTAGFCRLWIPGFASLAAPLYPLTRPKVPFTWTEAHQEAFGRIKEALLSAPALALPDLTKPFALYVDEKEGVARGVLTQTLGPWRRPVAYLSKKLDPVASGWPTCLKAIAAVALLLKDADKLTLGQNVLVIAPHNLESIVRQPPDRWMTNARMTHYQSLLLNERVSFAPPAILNPATLLPVESDDTPIHICSEILAEETGTRPDLRDQPLPGVPAWYTDGSSFIMDGRRQAGAAIVDNKRTVWASNLPEGTSAQKAELIALTQALRLAEGKSINIYTDSRYAFATAHVHGAIYKQRGWLTSAGKDIKNKEEILALLEAIHLPKRVAIIHCPGHQRGTDPVATGNRKADEAAKQAAQSTRILTETTKNAGKRTADGSEFEKRTADGSEFESPKKKAKVE

SEQ ID NO: 1657 - protein, 2122 aa, synthetic construct
MPAAKRVKLDGGDKKYSIGLDIGTNSVGWAVITDEYKVPSKKFKVLGNTDRHSIKKNLIGALLFDSGETAEATRLKRTARRRYTRRKNRICYLQEIFSNEMAKVDDSFFHRLEESFLVEEDKKHERHPIFGNIVDEVAYHEKYPTIYHLRKKLVDSTDKADLRLIYLALAHMIKFRGHFLIEGDLNPDNSDVDKLFIQLVQTYNQLFEENPINASGVDAKAILSARLSKSRRLENLIAQLPGEKKNGLFGNLIALSLGLTPNFKSNFDLAEDAKLQLSKDTYDDDLDNLLAQIGDQYADLFLAAKNLSDAILLSDILRVNTEITKAPLSASMIKRYDEHHQDLTLLKALVRQQLPEKYKEIFFDQSKNGYAGYIDGGASQEEFYKFIKPILEKMDGTEELLVKLNREDLLRKQRTFDNGSIPHQIHLGELHAILRRQEDFYPFLKDNREKIEKILTFRIPYYVGPLARGNSRFAWMTRKSEETITPWNFEEVVDKGASAQSFIERMTNFDKNLPNEKVLPKHSLLYEYFTVYNELTKVKYVTEGMRKPAFLSGEQKKAIVDLLFKTNRKVTVKQLKEDYFKKIECFDSVEISGVEDRFNASLGTYHDLLKIIKDKDFLDNEENEDILEDIVLTLTLFEDREMIEERLKTYAHLFDDKVMKQLKRRRYTGWGRLSRKLINGIRDKQSGKTILDFLKSDGFANRNFMQLIHDDSLTFKEDIQKAQVSGQGDSLHEHIANLAGSPAIKKGILQTVKVVDELVKVMGRHKPENIVIEMARENQTTQKGQKNSRERMKRIEEGIKELGSQILKEHPVENTQLQNEKLYLYYLQNGRDMYVDQELDINRLSDYDVDHIVPQSFLKDDSIDNKVLTRSDKARGKSDNVPSEEVVKKMKNYWRQLLNAKLITQRKFDNLTKAERGGLSELDKAGFIKRQLVETRQITKHVAQILDSRMNTKYDENDKLIREVKVITLKSKLVSDFRKDFQFYKVREINNYHHAHDAYLNAVVGTALIKKYPKLESEFVYGDYKVYDVRKMIAKSEQEIGKATAKYFFYSNIMNFFKTEITLANGEIRKRPLIETNGETGEIVWDKGRDFATVRKVLSMPQVNIVKKTEVQTGGFSKESILPKRNSDKLIARKKDWDPKKYGGFDSPTVAYSVLVVAKVEKGKSKKLKSVKELLGITIMERSSFEKNPIDFLEAKGYKEVKKDLIIKLPKYSLFELENGRKRMLASAGELQKGNELALPSKYVNFLYLASHYEKLKGSPEDNEQKQLFVEQHKHYLDEIIEQISEFSKRVILADANLDKVLSAYNKHRDKPIREQAENIIHLFTLTNLGAPAAFKYFDTTIDRKRYTSTKEVLDATLIHQSITGLYETRIDLSQLGGDGGGGGGSSGGLLGRDLLTKLKAQIQFSTEGPQVTWEDRPAMCLVLNLEEEYRLHEKPVPPSIDPSWLQLFPMVWAEKAGMGLANQVPPVVVELKSDASPVAVRQYPMSKEAREGIRPHIQRFLDLGILVPCQSPWNTPLLPVKKPGTNDYRPVQDLREVNKRVQDIHPTVPNPYNLLSSLPPSHTWYSVLDLKDAFFCLKLHPNSQPLFAFEWRDPEKGNTGQLTWTRLPQGFKNSPTLFNEALHRDLASFRALNPQVVMLQYVDDLLVAAPTYRDCKEGTRRLLQELSKLGYRVSAKKAQLCREEVTYLGYLLKGGKRWLTPARKATVMKIPTPTTPRQVREFLGTAGFCRLWIPGFASLAAPLYPLTRPKVPFTWTEAHQEAFGRIKEALLSAPALALPDLTKPFALYVDEKEGVARGVLTQTLGPWRRPVAYLSKKLDPVASGWPTCLKAIAAVALLLKDADKLTLGQNVLVIAPHNLESIVRQPPDRWMTNARMTHYQSLLLNERVSFAPPAILNPATLLPVESDDTPIHICSEILAEETGTRPDLRDQPLPGVPAWYTDGSSFIMDGRRQAGAAIVDNKRTVWASNLPEGTSAQKAELIALTQALRLAEGKSINIYTDSRYAFATAHVHGAIYKQRGWLTSAGKDIKNKEEILALLEAIHLPKRVAIIHCPGHQRGTDPVATGNRKADEAAKQAAQSTRILTETTKNAGKRTADGSEFEKRTADGSEFESPKKKAKVE

SEQ ID NO: 1658 - protein, 2125 aa, synthetic construct
MPAAKRVKLDGGDKKYSIGLDIGTNSVGWAVITDEYKVPSKKFKVLGNTDRHSIKKNLIGALLFDSGETAEATRLKRTARRRYTRRKNRICYLQEIFSNEMAKVDDSFFHRLEESFLVEEDKKHERHPIFGNIVDEVAYHEKYPTIYHLRKKLVDSTDKADLRLIYLALAHMIKFRGHFLIEGDLNPDNSDVDKLFIQLVQTYNQLFEENPINASGVDAKAILSARLSKSRRLENLIAQLPGEKKNGLFGNLIALSLGLTPNFKSNFDLAEDAKLQLSKDTYDDDLDNLLAQIGDQYADLFLAAKNLSDAILLSDILRVNTEITKAPLSASMIKRYDEHHQDLTLLKALVRQQLPEKYKEIFFDQSKNGYAGYIDGGASQEEFYKFIKPILEKMDGTEELLVKLNREDLLRKQRTFDNGSIPHQIHLGELHAILRRQEDFYPFLKDNREKIEKILTFRIPYYVGPLARGNSRFAWMTRKSEETITPWNFEEVVDKGASAQSFIERMTNFDKNLPNEKVLPKHSLLYEYFTVYNELTKVKYVTEGMRKPAFLSGEQKKAIVDLLFKTNRKVTVKQLKEDYFKKIECFDSVEISGVEDRFNASLGTYHDLLKIIKDKDFLDNEENEDILEDIVLTLTLFEDREMIEERLKTYAHLFDDKVMKQLKRRRYTGWGRLSRKLINGIRDKQSGKTILDFLKSDGFANRNFMQLIHDDSLTFKEDIQKAQVSGQGDSLHEHIANLAGSPAIKKGILQTVKVVDELVKVMGRHKPENIVIEMARENQTTQKGQKNSRERMKRIEEGIKELGSQILKEHPVENTQLQNEKLYLYYLQNGRDMYVDQELDINRLSDYDVDHIVPQSFLKDDSIDNKVLTRSDKARGKSDNVPSEEVVKKMKNYWRQLLNAKLITQRKFDNLTKAERGGLSELDKAGFIKRQLVETRQITKHVAQILDSRMNTKYDENDKLIREVKVITLKSKLVSDFRKDFQFYKVREINNYHHAHDAYLNAVVGTALIKKYPKLESEFVYGDYKVYDVRKMIAKSEQEIGKATAKYFFYSNIMNFFKTEITLANGEIRKRPLIETNGETGEIVWDKGRDFATVRKVLSMPQVNIVKKTEVQTGGFSKESILPKRNSDKLIARKKDWDPKKYGGFDSPTVAYSVLVVAKVEKGKSKKLKSVKELLGITIMERSSFEKNPIDFLEAKGYKEVKKDLIIKLPKYSLFELENGRKRMLASAGELQKGNELALPSKYVNFLYLASHYEKLKGSPEDNEQKQLFVEQHKHYLDEIIEQISEFSKRVILADANLDKVLSAYNKHRDKPIREQAENIIHLFTLTNLGAPAAFKYFDTTIDRKRYTSTKEVLDATLIHQSITGLYETRIDLSQLGGDGGPAPGGSGSSGGLLGRDLLTKLKAQIQFSTEGPQVTWEDRPAMCLVLNLEEEYRLHEKPVPPSIDPSWLQLFPMVWAEKAGMGLANQVPPVVVELKSDASPVAVRQYPMSKEAREGIRPHIQRFLDLGILVPCQSPWNTPLLPVKKPGTNDYRPVQDLREVNKRVQDIHPTVPNPYNLLSSLPPSHTWYSVLDLKDAFFCLKLHPNSQPLFAFEWRDPEKGNTGQLTWTRLPQGFKNSPTLFNEALHRDLASFRALNPQVVMLQYVDDLLVAAPTYRDCKEGTRRLLQELSKLGYRVSAKKAQLCREEVTYLGYLLKGGKRWLTPARKATVMKIPTPTTPRQVREFLGTAGFCRLWIPGFASLAAPLYPLTRPKVPFTWTEAHQEAFGRIKEALLSAPALALPDLTKPFALYVDEKEGVARGVLTQTLGPWRRPVAYLSKKLDPVASGWPTCLKAIAAVALLLKDADKLTLGQNVLVIAPHNLESIVRQPPDRWMTNARMTHYQSLLLNERVSFAPPAILNPATLLPVESDDTPIHICSEILAEETGTRPDLRDQPLPGVPAWYTDGSSFIMDGRRQAGAAIVDNKRTVWASNLPEGTSAQKAELIALTQALRLAEGKSINIYTDSRYAFATAHVHGAIYKQRGWLTSAGKDIKNKEEILALLEAIHLPKRVAIIHCPGHQRGTDPVATGNRKADEAAKQAAQSTRILTETTKNAGKRTADGSEFEKRTADGSEFESPKKKAKVE

SEQ ID NO: 1659 - protein, 2127 aa, synthetic construct
MPAAKRVKLDGGDKKYSIGLDIGTNSVGWAVITDEYKVPSKKFKVLGNTDRHSIKKNLIGALLFDSGETAEATRLKRTARRRYTRRKNRICYLQEIFSNEMAKVDDSFFHRLEESFLVEEDKKHERHPIFGNIVDEVAYHEKYPTIYHLRKKLVDSTDKADLRLIYLALAHMIKFRGHFLIEGDLNPDNSDVDKLFIQLVQTYNQLFEENPINASGVDAKAILSARLSKSRRLENLIAQLPGEKKNGLFGNLIALSLGLTPNFKSNFDLAEDAKLQLSKDTYDDDLDNLLAQIGDQYADLFLAAKNLSDAILLSDILRVNTEITKAPLSASMIKRYDEHHQDLTLLKALVRQQLPEKYKEIFFDQSKNGYAGYIDGGASQEEFYKFIKPILEKMDGTEELLVKLNREDLLRKQRTFDNGSIPHQIHLGELHAILRRQEDFYPFLKDNREKIEKILTFRIPYYVGPLARGNSRFAWMTRKSEETITPWNFEEVVDKGASAQSFIERMTNFDKNLPNEKVLPKHSLLYEYFTVYNELTKVKYVTEGMRKPAFLSGEQKKAIVDLLFKTNRKVTVKQLKEDYFKKIECFDSVEISGVEDRFNASLGTYHDLLKIIKDKDFLDNEENEDILEDIVLTLTLFEDREMIEERLKTYAHLFDDKVMKQLKRRRYTGWGRLSRKLINGIRDKQSGKTILDFLKSDGFANRNFMQLIHDDSLTFKEDIQKAQVSGQGDSLHEHIANLAGSPAIKKGILQTVKVVDELVKVMGRHKPENIVIEMARENQTTQKGQKNSRERMKRIEEGIKELGSQILKEHPVENTQLQNEKLYLYYLQNGRDMYVDQELDINRLSDYDVDHIVPQSFLKDDSIDNKVLTRSDKARGKSDNVPSEEVVKKMKNYWRQLLNAKLITQRKFDNLTKAERGGLSELDKAGFIKRQLVETRQITKHVAQILDSRMNTKYDENDKLIREVKVITLKSKLVSDFRKDFQFYKVREINNYHHAHDAYLNAVVGTALIKKYPKLESEFVYGDYKVYDVRKMIAKSEQEIGKATAKYFFYSNIMNFFKTEITLANGEIRKRPLIETNGETGEIVWDKGRDFATVRKVLSMPQVNIVKKTEVQTGGFSKESILPKRNSDKLIARKKDWDPKKYGGFDSPTVAYSVLVVAKVEKGKSKKLKSVKELLGITIMERSSFEKNPIDFLEAKGYKEVKKDLIIKLPKYSLFELENGRKRMLASAGELQKGNELALPSKYVNFLYLASHYEKLKGSPEDNEQKQLFVEQHKHYLDEIIEQISEFSKRVILADANLDKVLSAYNKHRDKPIREQAENIIHLFTLTNLGAPAAFKYFDTTIDRKRYTSTKEVLDATLIHQSITGLYETRIDLSQLGGDGGGGSGGGEAAAKGGLLGRDLLTKLKAQIQFSTEGPQVTWEDRPAMCLVLNLEEEYRLHEKPVPPSIDPSWLQLFPMVWAEKAGMGLANQVPPVVVELKSDASPVAVRQYPMSKEAREGIRPHIQRFLDLGILVPCQSPWNTPLLPVKKPGTNDYRPVQDLREVNKRVQDIHPTVPNPYNLLSSLPPSHTWYSVLDLKDAFFCLKLHPNSQPLFAFEWRDPEKGNTGQLTWTRLPQGFKNSPTLFNEALHRDLASFRALNPQVVMLQYVDDLLVAAPTYRDCKEGTRRLLQELSKLGYRVSAKKAQLCREEVTYLGYLLKGGKRWLTPARKATVMKIPTPTTPRQVREFLGTAGFCRLWIPGFASLAAPLYPLTRPKVPFTWTEAHQEAFGRIKEALLSAPALALPDLTKPFALYVDEKEGVARGVLTQTLGPWRRPVAYLSKKLDPVASGWPTCLKAIAAVALLLKDADKLTLGQNVLVIAPHNLESIVRQPPDRWMTNARMTHYQSLLLNERVSFAPPAILNPATLLPVESDDTPIHICSEILAEETGTRPDLRDQPLPGVPAWYTDGSSFIMDGRRQAGAAIVDNKRTVWASNLPEGTSAQKAELIALTQALRLAEGKSINIYTDSRYAFATAHVHGAIYKQRGWLTSAGKDIKNKEEILALLEAIHLPKRVAIIHCPGHQRGTDPVATGNRKADEAAKQAAQSTRILTETTKNAGKRTADGSEFEKRTADGSEFESPKKKAKVE

SEQ ID NO: 1660 - protein, 2132 aa, synthetic construct
MPAAKRVKLDGGDKKYSIGLDIGTNSVGWAVITDEYKVPSKKFKVLGNTDRHSIKKNLIGALLFDSGETAEATRLKRTARRRYTRRKNRICYLQEIFSNEMAKVDDSFFHRLEESFLVEEDKKHERHPIFGNIVDEVAYHEKYPTIYHLRKKLVDSTDKADLRLIYLALAHMIKFRGHFLIEGDLNPDNSDVDKLFIQLVQTYNQLFEENPINASGVDAKAILSARLSKSRRLENLIAQLPGEKKNGLFGNLIALSLGLTPNFKSNFDLAEDAKLQLSKDTYDDDLDNLLAQIGDQYADLFLAAKNLSDAILLSDILRVNTEITKAPLSASMIKRYDEHHQDLTLLKALVRQQLPEKYKEIFFDQSKNGYAGYIDGGASQEEFYKFIKPILEKMDGTEELLVKLNREDLLRKQRTFDNGSIPHQIHLGELHAILRRQEDFYPFLKDNREKIEKILTFRIPYYVGPLARGNSRFAWMTRKSEETITPWNFEEVVDKGASAQSFIERMTNFDKNLPNEKVLPKHSLLYEYFTVYNELTKVKYVTEGMRKPAFLSGEQKKAIVDLLFKTNRKVTVKQLKEDYFKKIECFDSVEISGVEDRFNASLGTYHDLLKIIKDKDFLDNEENEDILEDIVLTLTLFEDREMIEERLKTYAHLFDDKVMKQLKRRRYTGWGRLSRKLINGIRDKQSGKTILDFLKSDGFANRNFMQLIHDDSLTFKEDIQKAQVSGQGDSLHEHIANLAGSPAIKKGILQTVKVVDELVKVMGRHKPENIVIEMARENQTTQKGQKNSRERMKRIEEGIKELGSQILKEHPVENTQLQNEKLYLYYLQNGRDMYVDQELDINRLSDYDVDHIVPQSFLKDDSIDNKVLTRSDKARGKSDNVPSEEVVKKMKNYWRQLLNAKLITQRKFDNLTKAERGGLSELDKAGFIKRQLVETRQITKHVAQILDSRMNTKYDENDKLIREVKVITLKSKLVSDFRKDFQFYKVREINNYHHAHDAYLNAVVGTALIKKYPKLESEFVYGDYKVYDVRKMIAKSEQEIGKATAKYFFYSNIMNFFKTEITLANGEIRKRPLIETNGETGEIVWDKGRDFATVRKVLSMPQVNIVKKTEVQTGGFSKESILPKRNSDKLIARKKDWDPKKYGGFDSPTVAYSVLVVAKVEKGKSKKLKSVKELLGITIMERSSFEKNPIDFLEAKGYKEVKKDLIIKLPKYSLFELENGRKRMLASAGELQKGNELALPSKYVNFLYLASHYEKLKGSPEDNEQKQLFVEQHKHYLDEIIEQISEFSKRVILADANLDKVLSAYNKHRDKPIREQAENIIHLFTLTNLGAPAAFKYFDTTIDRKRYTSTKEVLDATLIHQSITGLYETRIDLSQLGGDGGSGSETPGTSESATPESGGLLGRDLLTKLKAQIQFSTEGPQVTWEDRPAMCLVLNLEEEYRLHEKPVPPSIDPSWLQLFPMVWAEKAGMGLANQVPPVVVELKSDASPVAVRQYPMSKEAREGIRPHIQRFLDLGILVPCQSPWNTPLLPVKKPGTNDYRPVQDLREVNKRVQDIHPTVPNPYNLLSSLPPSHTWYSVLDLKDAFFCLKLHPNSQPLFAFEWRDPEKGNTGQLTWTRLPQGFKNSPTLFNEALHRDLASFRALNPQVVMLQYVDDLLVAAPTYRDCKEGTRRLLQELSKLGYRVSAKKAQLCREEVTYLGYLLKGGKRWLTPARKATVMKIPTPTTPRQVREFLGTAGFCRLWIPGFASLAAPLYPLTRPKVPFTWTEAHQEAFGRIKEALLSAPALALPDLTKPFALYVDEKEGVARGVLTQTLGPWRRPVAYLSKKLDPVASGWPTCLKAIAAVALLLKDADKLTLGQNVLVIAPHNLESIVRQPPDRWMTNARMTHYQSLLLNERVSFAPPAILNPATLLPVESDDTPIHICSEILAEETGTRPDLRDQPLPGVPAWYTDGSSFIMDGRRQAGAAIVDNKRTVWASNLPEGTSAQKAELIALTQALRLAEGKSINIYTDSRYAFATAHVHGAIYKQRGWLTSAGKDIKNKEEILALLEAIHLPKRVAIIHCPGHQRGTDPVATGNRKADEAAKQAAQSTRILTETTKNAGKRTADGSEFEKRTADGSEFESPKKKAKVE

SEQ ID NO: 1661 - protein, 2125 aa, synthetic construct
MPAAKRVKLDGGDKKYSIGLDIGTNSVGWAVITDEYKVPSKKFKVLGNTDRHSIKKNLIGALLFDSGETAEATRLKRTARRRYTRRKNRICYLQEIFSNEMAKVDDSFFHRLEESFLVEEDKKHERHPIFGNIVDEVAYHEKYPTIYHLRKKLVDSTDKADLRLIYLALAHMIKFRGHFLIEGDLNPDNSDVDKLFIQLVQTYNQLFEENPINASGVDAKAILSARLSKSRRLENLIAQLPGEKKNGLFGNLIALSLGLTPNFKSNFDLAEDAKLQLSKDTYDDDLDNLLAQIGDQYADLFLAAKNLSDAILLSDILRVNTEITKAPLSASMIKRYDEHHQDLTLLKALVRQQLPEKYKEIFFDQSKNGYAGYIDGGASQEEFYKFIKPILEKMDGTEELLVKLNREDLLRKQRTFDNGSIPHQIHLGELHAILRRQEDFYPFLKDNREKIEKILTFRIPYYVGPLARGNSRFAWMTRKSEETITPWNFEEVVDKGASAQSFIERMTNFDKNLPNEKVLPKHSLLYEYFTVYNELTKVKYVTEGMRKPAFLSGEQKKAIVDLLFKTNRKVTVKQLKEDYFKKIECFDSVEISGVEDRFNASLGTYHDLLKIIKDKDFLDNEENEDILEDIVLTLTLFEDREMIEERLKTYAHLFDDKVMKQLKRRRYTGWGRLSRKLINGIRDKQSGKTILDFLKSDGFANRNFMQLIHDDSLTFKEDIQKAQVSGQGDSLHEHIANLAGSPAIKKGILQTVKVVDELVKVMGRHKPENIVIEMARENQTTQKGQKNSRERMKRIEEGIKELGSQILKEHPVENTQLQNEKLYLYYLQNGRDMYVDQELDINRLSDYDVDHIVPQSFLKDDSIDNKVLTRSDKARGKSDNVPSEEVVKKMKNYWRQLLNAKLITQRKFDNLTKAERGGLSELDKAGFIKRQLVETRQITKHVAQILDSRMNTKYDENDKLIREVKVITLKSKLVSDFRKDFQFYKVREINNYHHAHDAYLNAVVGTALIKKYPKLESEFVYGDYKVYDVRKMIAKSEQEIGKATAKYFFYSNIMNFFKTEITLANGEIRKRPLIETNGETGEIVWDKGRDFATVRKVLSMPQVNIVKKTEVQTGGFSKESILPKRNSDKLIARKKDWDPKKYGGFDSPTVAYSVLVVAKVEKGKSKKLKSVKELLGITIMERSSFEKNPIDFLEAKGYKEVKKDLIIKLPKYSLFELENGRKRMLASAGELQKGNELALPSKYVNFLYLASHYEKLKGSPEDNEQKQLFVEQHKHYLDEIIEQISEFSKRVILADANLDKVLSAYNKHRDKPIREQAENIIHLFTLTNLGAPAAFKYFDTTIDRKRYTSTKEVLDATLIHQSITGLYETRIDLSQLGGDGGGSSGGSPAPGGLLGRDLLTKLKAQIQFSTEGPQVTWEDRPAMCLVLNLEEEYRLHEKPVPPSIDPSWLQLFPMVWAEKAGMGLANQVPPVVVELKSDASPVAVRQYPMSKEAREGIRPHIQRFLDLGILVPCQSPWNTPLLPVKKPGTNDYRPVQDLREVNKRVQDIHPTVPNPYNLLSSLPPSHTWYSVLDLKDAFFCLKLHPNSQPLFAFEWRDPEKGNTGQLTWTRLPQGFKNSPTLFNEALHRDLASFRALNPQVVMLQYVDDLLVAAPTYRDCKEGTRRLLQELSKLGYRVSAKKAQLCREEVTYLGYLLKGGKRWLTPARKATVMKIPTPTTPRQVREFLGTAGFCRLWIPGFASLAAPLYPLTRPKVPFTWTEAHQEAFGRIKEALLSAPALALPDLTKPFALYVDEKEGVARGVLTQTLGPWRRPVAYLSKKLDPVASGWPTCLKAIAAVALLLKDADKLTLGQNVLVIAPHNLESIVRQPPDRWMTNARMTHYQSLLLNERVSFAPPAILNPATLLPVESDDTPIHICSEILAEETGTRPDLRDQPLPGVPAWYTDGSSFIMDGRRQAGAAIVDNKRTVWASNLPEGTSAQKAELIALTQALRLAEGKSINIYTDSRYAFATAHVHGAIYKQRGWLTSAGKDIKNKEEILALLEAIHLPKRVAIIHCPGHQRGTDPVATGNRKADEAAKQAAQSTRILTETTKNAGKRTADGSEFEKRTADGSEFESPKKKAKVE

SEQ ID NO: 1662 - protein, 2146 aa, synthetic construct
MPAAKRVKLDGGDKKYSIGLDIGTNSVGWAVITDEYKVPSKKFKVLGNTDRHSIKKNLIGALLFDSGETAEATRLKRTARRRYTRRKNRICYLQEIFSNEMAKVDDSFFHRLEESFLVEEDKKHERHPIFGNIVDEVAYHEKYPTIYHLRKKLVDSTDKADLRLIYLALAHMIKFRGHFLIEGDLNPDNSDVDKLFIQLVQTYNQLFEENPINASGVDAKAILSARLSKSRRLENLIAQLPGEKKNGLFGNLIALSLGLTPNFKSNFDLAEDAKLQLSKDTYDDDLDNLLAQIGDQYADLFLAAKNLSDAILLSDILRVNTEITKAPLSASMIKRYDEHHQDLTLLKALVRQQLPEKYKEIFFDQSKNGYAGYIDGGASQEEFYKFIKPILEKMDGTEELLVKLNREDLLRKQRTFDNGSIPHQIHLGELHAILRRQEDFYPFLKDNREKIEKILTFRIPYYVGPLARGNSRFAWMTRKSEETITPWNFEEVVDKGASAQSFIERMTNFDKNLPNEKVLPKHSLLYEYFTVYNELTKVKYVTEGMRKPAFLSGEQKKAIVDLLFKTNRKVTVKQLKEDYFKKIECFDSVEISGVEDRFNASLGTYHDLLKIIKDKDFLDNEENEDILEDIVLTLTLFEDREMIEERLKTYAHLFDDKVMKQLKRRRYTGWGRLSRKLINGIRDKQSGKTILDFLKSDGFANRNFMQLIHDDSLTFKEDIQKAQVSGQGDSLHEHIANLAGSPAIKKGILQTVKVVDELVKVMGRHKPENIVIEMARENQTTQKGQKNSRERMKRIEEGIKELGSQILKEHPVENTQLQNEKLYLYYLQNGRDMYVDQELDINRLSDYDVDHIVPQSFLKDDSIDNKVLTRSDKARGKSDNVPSEEVVKKMKNYWRQLLNAKLITQRKFDNLTKAERGGLSELDKAGFIKRQLVETRQITKHVAQILDSRMNTKYDENDKLIREVKVITLKSKLVSDFRKDFQFYKVREINNYHHAHDAYLNAVVGTALIKKYPKLESEFVYGDYKVYDVRKMIAKSEQEIGKATAKYFFYSNIMNFFKTEITLANGEIRKRPLIETNGETGEIVWDKGRDFATVRKVLSMPQVNIVKKTEVQTGGFSKESILPKRNSDKLIARKKDWDPKKYGGFDSPTVAYSVLVVAKVEKGKSKKLKSVKELLGITIMERSSFEKNPIDFLEAKGYKEVKKDLIIKLPKYSLFELENGRKRMLASAGELQKGNELALPSKYVNFLYLASHYEKLKGSPEDNEQKQLFVEQHKHYLDEIIEQISEFSKRVILADANLDKVLSAYNKHRDKPIREQAENIIHLFTLTNLGAPAAFKYFDTTIDRKRYTSTKEVLDATLIHQSITGLYETRIDLSQLGGDGGGGGGSGGGGSGGGGSGGGGSGGGGSGGGGSGGLLGRDLLTKLKAQIQFSTEGPQVTWEDRPAMCLVLNLEEEYRLHEKPVPPSIDPSWLQLFPMVWAEKAGMGLANQVPPVVVELKSDASPVAVRQYPMSKEAREGIRPHIQRFLDLGILVPCQSPWNTPLLPVKKPGTNDYRPVQDLREVNKRVQDIHPTVPNPYNLLSSLPPSHTWYSVLDLKDAFFCLKLHPNSQPLFAFEWRDPEKGNTGQLTWTRLPQGFKNSPTLFNEALHRDLASFRALNPQVVMLQYVDDLLVAAPTYRDCKEGTRRLLQELSKLGYRVSAKKAQLCREEVTYLGYLLKGGKRWLTPARKATVMKIPTPTTPRQVREFLGKAGFCRLFIPGFASLAAPLYPLTRPKVPFTWTEAHQEAFGRIKEALLSAPALALPDLTKPFALYVDEKEGVARGVLTQTLGPWRRPVAYLSKKLDPVASGWPTCLKAIAAVALLLKDADKLTLGQNVLVIAPHNLESIVRQPPDRWMTNARMTHYQSLLLNERVSFAPPAILNPATLLPVESDDTPIHICSEILAEETGTRPDLRDQPLPGVPAWYTDGSSFIMDGRRQAGAAIVDNKRTVWASNLPEGTSAQKAELIALTQALRLAEGKSINIYTDSRYAFATAHVHGAIYKQRGWLTSAGKDIKNKEEILALLEAIHLPKRVAIIHCPGHQRGTDPVATGNRKADEAAKQAAQSTRILTETTKNAGKRTADGSEFEKRTADGSEFESPKKKAKVE

SEQ ID NO: 1663 - protein, 2127 aa, synthetic construct
MPAAKRVKLDGGDKKYSIGLDIGTNSVGWAVITDEYKVPSKKFKVLGNTDRHSIKKNLIGALLFDSGETAEATRLKRTARRRYTRRKNRICYLQEIFSNEMAKVDDSFFHRLEESFLVEEDKKHERHPIFGNIVDEVAYHEKYPTIYHLRKKLVDSTDKADLRLIYLALAHMIKFRGHFLIEGDLNPDNSDVDKLFIQLVQTYNQLFEENPINASGVDAKAILSARLSKSRRLENLIAQLPGEKKNGLFGNLIALSLGLTPNFKSNFDLAEDAKLQLSKDTYDDDLDNLLAQIGDQYADLFLAAKNLSDAILLSDILRVNTEITKAPLSASMIKRYDEHHQDLTLLKALVRQQLPEKYKEIFFDQSKNGYAGYIDGGASQEEFYKFIKPILEKMDGTEELLVKLNREDLLRKQRTFDNGSIPHQIHLGELHAILRRQEDFYPFLKDNREKIEKILTFRIPYYVGPLARGNSRFAWMTRKSEETITPWNFEEVVDKGASAQSFIERMTNFDKNLPNEKVLPKHSLLYEYFTVYNELTKVKYVTEGMRKPAFLSGEQKKAIVDLLFKTNRKVTVKQLKEDYFKKIECFDSVEISGVEDRFNASLGTYHDLLKIIKDKDFLDNEENEDILEDIVLTLTLFEDREMIEERLKTYAHLFDDKVMKQLKRRRYTGWGRLSRKLINGIRDKQSGKTILDFLKSDGFANRNFMQLIHDDSLTFKEDIQKAQVSGQGDSLHEHIANLAGSPAIKKGILQTVKVVDELVKVMGRHKPENIVIEMARENQTTQKGQKNSRERMKRIEEGIKELGSQILKEHPVENTQLQNEKLYLYYLQNGRDMYVDQELDINRLSDYDVDHIVPQSFLKDDSIDNKVLTRSDKARGKSDNVPSEEVVKKMKNYWRQLLNAKLITQRKFDNLTKAERGGLSELDKAGFIKRQLVETRQITKHVAQILDSRMNTKYDENDKLIREVKVITLKSKLVSDFRKDFQFYKVREINNYHHAHDAYLNAVVGTALIKKYPKLESEFVYGDYKVYDVRKMIAKSEQEIGKATAKYFFYSNIMNFFKTEITLANGEIRKRPLIETNGETGEIVWDKGRDFATVRKVLSMPQVNIVKKTEVQTGGFSKESILPKRNSDKLIARKKDWDPKKYGGFDSPTVAYSVLVVAKVEKGKSKKLKSVKELLGITIMERSSFEKNPIDFLEAKGYKEVKKDLIIKLPKYSLFELENGRKRMLASAGELQKGNELALPSKYVNFLYLASHYEKLKGSPEDNEQKQLFVEQHKHYLDEIIEQISEFSKRVILADANLDKVLSAYNKHRDKPIREQAENIIHLFTLTNLGAPAAFKYFDTTIDRKRYTSTKEVLDATLIHQSITGLYETRIDLSQLGGDGGPAPEAAAKGGGGGLLGRDLLTKLKAQIQFSTEGPQVTWEDRPAMCLVLNLEEEYRLHEKPVPPSIDPSWLQLFPMVWAEKAGMGLANQVPPVVVELKSDASPVAVRQYPMSKEAREGIRPHIQRFLDLGILVPCQSPWNTPLLPVKKPGTNDYRPVQDLREVNKRVQDIHPTVPNPYNLLSSLPPSHTWYSVLDLKDAFFCLKLHPNSQPLFAFEWRDPEKGNTGQLTWTRLPQGFKNSPTLFNEALHRDLASFRALNPQVVMLQYVDDLLVAAPTYRDCKEGTRRLLQELSKLGYRVSAKKAQLCREEVTYLGYLLKGGKRWLTPARKATVMKIPTPTTPRQVREFLGKAGFCRLFIPGFASLAAPLYPLTRPKVPFTWTEAHQEAFGRIKEALLSAPALALPDLTKPFALYVDEKEGVARGVLTQTLGPWRRPVAYLSKKLDPVASGWPTCLKAIAAVALLLKDADKLTLGQNVLVIAPHNLESIVRQPPDRWMTNARMTHYQSLLLNERVSFAPPAILNPATLLPVESDDTPIHICSEILAEETGTRPDLRDQPLPGVPAWYTDGSSFIMDGRRQAGAAIVDNKRTVWASNLPEGTSAQKAELIALTQALRLAEGKSINIYTDSRYAFATAHVHGAIYKQRGWLTSAGKDIKNKEEILALLEAIHLPKRVAIIHCPGHQRGTDPVATGNRKADEAAKQAAQSTRILTETTKNAGKRTADGSEFEKRTADGSEFESPKKKAKVE

SEQ ID NO: 1664 - protein, 2127 aa, synthetic construct
MPAAKRVKLDGGDKKYSIGLDIGTNSVGWAVITDEYKVPSKKFKVLGNTDRHSIKKNLIGALLFDSGETAEATRLKRTARRRYTRRKNRICYLQEIFSNEMAKVDDSFFHRLEESFLVEEDKKHERHPIFGNIVDEVAYHEKYPTIYHLRKKLVDSTDKADLRLIYLALAHMIKFRGHFLIEGDLNPDNSDVDKLFIQLVQTYNQLFEENPINASGVDAKAILSARLSKSRRLENLIAQLPGEKKNGLFGNLIALSLGLTPNFKSNFDLAEDAKLQLSKDTYDDDLDNLLAQIGDQYADLFLAAKNLSDAILLSDILRVNTEITKAPLSASMIKRYDEHHQDLTLLKALVRQQLPEKYKEIFFDQSKNGYAGYIDGGASQEEFYKFIKPILEKMDGTEELLVKLNREDLLRKQRTFDNGSIPHQIHLGELHAILRRQEDFYPFLKDNREKIEKILTFRIPYYVGPLARGNSRFAWMTRKSEETITPWNFEEVVDKGASAQSFIERMTNFDKNLPNEKVLPKHSLLYEYFTVYNELTKVKYVTEGMRKPAFLSGEQKKAIVDLLFKTNRKVTVKQLKEDYFKKIECFDSVEISGVEDRFNASLGTYHDLLKIIKDKDFLDNEENEDILEDIVLTLTLFEDREMIEERLKTYAHLFDDKVMKQLKRRRYTGWGRLSRKLINGIRDKQSGKTILDFLKSDGFANRNFMQLIHDDSLTFKEDIQKAQVSGQGDSLHEHIANLAGSPAIKKGILQTVKVVDELVKVMGRHKPENIVIEMARENQTTQKGQKNSRERMKRIEEGIKELGSQILKEHPVENTQLQNEKLYLYYLQNGRDMYVDQELDINRLSDYDVDHIVPQSFLKDDSIDNKVLTRSDKARGKSDNVPSEEVVKKMKNYWRQLLNAKLITQRKFDNLTKAERGGLSELDKAGFIKRQLVETRQITKHVAQILDSRMNTKYDENDKLIREVKVITLKSKLVSDFRKDFQFYKVREINNYHHAHDAYLNAVVGTALIKKYPKLESEFVYGDYKVYDVRKMIAKSEQEIGKATAKYFFYSNIMNFFKTEITLANGEIRKRPLIETNGETGEIVWDKGRDFATVRKVLSMPQVNIVKKTEVQTGGFSKESILPKRNSDKLIARKKDWDPKKYGGFDSPTVAYSVLVVAKVEKGKSKKLKSVKELLGITIMERSSFEKNPIDFLEAKGYKEVKKDLIIKLPKYSLFELENGRKRMLASAGELQKGNELALPSKYVNFLYLASHYEKLKGSPEDNEQKQLFVEQHKHYLDEIIEQISEFSKRVILADANLDKVLSAYNKHRDKPIREQAENIIHLFTLTNLGAPAAFKYFDTTIDRKRYTSTKEVLDATLIHQSITGLYETRIDLSQLGGDGGEAAAKGSSPAPGGLLGRDLLTKLKAQIQFSTEGPQVTWEDRPAMCLVLNLEEEYRLHEKPVPPSIDPSWLQLFPMVWAEKAGMGLANQVPPVVVELKSDASPVAVRQYPMSKEAREGIRPHIQRFLDLGILVPCQSPWNTPLLPVKKPGTNDYRPVQDLREVNKRVQDIHPTVPNPYNLLSSLPPSHTWYSVLDLKDAFFCLKLHPNSQPLFAFEWRDPEKGNTGQLTWTRLPQGFKNSPTLFNEALHRDLASFRALNPQVVMLQYVDDLLVAAPTYRDCKEGTRRLLQELSKLGYRVSAKKAQLCREEVTYLGYLLKGGKRWLTPARKATVMKIPTPTTPRQVREFLGKAGFCRLFIPGFASLAAPLYPLTRPKVPFTWTEAHQEAFGRIKEALLSAPALALPDLTKPFALYVDEKEGVARGVLTQTLGPWRRPVAYLSKKLDPVASGWPTCLKAIAAVALLLKDADKLTLGQNVLVIAPHNLESIVRQPPDRWMTNARMTHYQSLLLNERVSFAPPAILNPATLLPVESDDTPIHICSEILAEETGTRPDLRDQPLPGVPAWYTDGSSFIMDGRRQAGAAIVDNKRTVWASNLPEGTSAQKAELIALTQALRLAEGKSINIYTDSRYAFATAHVHGAIYKQRGWLTSAGKDIKNKEEILALLEAIHLPKRVAIIHCPGHQRGTDPVATGNRKADEAAKQAAQSTRILTETTKNAGKRTADGSEFEKRTADGSEFESPKKKAKVE

SEQ ID NO: 1665 - protein, 2131 aa, synthetic construct
MPAAKRVKLDGGDKKYSIGLDIGTNSVGWAVITDEYKVPSKKFKVLGNTDRHSIKKNLIGALLFDSGETAEATRLKRTARRRYTRRKNRICYLQEIFSNEMAKVDDSFFHRLEESFLVEEDKKHERHPIFGNIVDEVAYHEKYPTIYHLRKKLVDSTDKADLRLIYLALAHMIKFRGHFLIEGDLNPDNSDVDKLFIQLVQTYNQLFEENPINASGVDAKAILSARLSKSRRLENLIAQLPGEKKNGLFGNLIALSLGLTPNFKSNFDLAEDAKLQLSKDTYDDDLDNLLAQIGDQYADLFLAAKNLSDAILLSDILRVNTEITKAPLSASMIKRYDEHHQDLTLLKALVRQQLPEKYKEIFFDQSKNGYAGYIDGGASQEEFYKFIKPILEKMDGTEELLVKLNREDLLRKQRTFDNGSIPHQIHLGELHAILRRQEDFYPFLKDNREKIEKILTFRIPYYVGPLARGNSRFAWMTRKSEETITPWNFEEVVDKGASAQSFIERMTNFDKNLPNEKVLPKHSLLYEYFTVYNELTKVKYVTEGMRKPAFLSGEQKKAIVDLLFKTNRKVTVKQLKEDYFKKIECFDSVEISGVEDRFNASLGTYHDLLKIIKDKDFLDNEENEDILEDIVLTLTLFEDREMIEERLKTYAHLFDDKVMKQLKRRRYTGWGRLSRKLINGIRDKQSGKTILDFLKSDGFANRNFMQLIHDDSLTFKEDIQKAQVSGQGDSLHEHIANLAGSPAIKKGILQTVKVVDELVKVMGRHKPENIVIEMARENQTTQKGQKNSRERMKRIEEGIKELGSQILKEHPVENTQLQNEKLYLYYLQNGRDMYVDQELDINRLSDYDVDHIVPQSFLKDDSIDNKVLTRSDKARGKSDNVPSEEVVKKMKNYWRQLLNAKLITQRKFDNLTKAERGGLSELDKAGFIKRQLVETRQITKHVAQILDSRMNTKYDENDKLIREVKVITLKSKLVSDFRKDFQFYKVREINNYHHAHDAYLNAVVGTALIKKYPKLESEFVYGDYKVYDVRKMIAKSEQEIGKATAKYFFYSNIMNFFKTEITLANGEIRKRPLIETNGETGEIVWDKGRDFATVRKVLSMPQVNIVKKTEVQTGGFSKESILPKRNSDKLIARKKDWDPKKYGGFDSPTVAYSVLVVAKVEKGKSKKLKSVKELLGITIMERSSFEKNPIDFLEAKGYKEVKKDLIIKLPKYSLFELENGRKRMLASAGELQKGNELALPSKYVNFLYLASHYEKLKGSPEDNEQKQLFVEQHKHYLDEIIEQISEFSKRVILADANLDKVLSAYNKHRDKPIREQAENIIHLFTLTNLGAPAAFKYFDTTIDRKRYTSTKEVLDATLIHQSITGLYETRIDLSQLGGDGGGGSGGSGGSGGSGGSGGLLGRDLLTKLKAQIQFSTEGPQVTWEDRPAMCLVLNLEEEYRLHEKPVPPSIDPSWLQLFPMVWAEKAGMGLANQVPPVVVELKSDASPVAVRQYPMSKEAREGIRPHIQRFLDLGILVPCQSPWNTPLLPVKKPGTNDYRPVQDLREVNKRVQDIHPTVPNPYNLLSSLPPSHTWYSVLDLKDAFFCLKLHPNSQPLFAFEWRDPEKGNTGQLTWTRLPQGFKNSPTLFNEALHRDLASFRALNPQVVMLQYVDDLLVAAPTYRDCKEGTRRLLQELSKLGYRVSAKKAQLCREEVTYLGYLLKGGKRWLTPARKATVMKIPTPTTPRQVREFLGKAGFCRLFIPGFASLAAPLYPLTRPKVPFTWTEAHQEAFGRIKEALLSAPALALPDLTKPFALYVDEKEGVARGVLTQTLGPWRRPVAYLSKKLDPVASGWPTCLKAIAAVALLLKDADKLTLGQNVLVIAPHNLESIVRQPPDRWMTNARMTHYQSLLLNERVSFAPPAILNPATLLPVESDDTPIHICSEILAEETGTRPDLRDQPLPGVPAWYTDGSSFIMDGRRQAGAAIVDNKRTVWASNLPEGTSAQKAELIALTQALRLAEGKSINIYTDSRYAFATAHVHGAIYKQRGWLTSAGKDIKNKEEILALLEAIHLPKRVAIIHCPGHQRGTDPVATGNRKADEAAKQAAQSTRILTETTKNAGKRTADGSEFEKRTADGSEFESPKKKAKVE

SEQ ID NO: 1666 - protein, 2127 aa, synthetic construct
MPAAKRVKLDGGDKKYSIGLDIGTNSVGWAVITDEYKVPSKKFKVLGNTDRHSIKKNLIGALLFDSGETAEATRLKRTARRRYTRRKNRICYLQEIFSNEMAKVDDSFFHRLEESFLVEEDKKHERHPIFGNIVDEVAYHEKYPTIYHLRKKLVDSTDKADLRLIYLALAHMIKFRGHFLIEGDLNPDNSDVDKLFIQLVQTYNQLFEENPINASGVDAKAILSARLSKSRRLENLIAQLPGEKKNGLFGNLIALSLGLTPNFKSNFDLAEDAKLQLSKDTYDDDLDNLLAQIGDQYADLFLAAKNLSDAILLSDILRVNTEITKAPLSASMIKRYDEHHQDLTLLKALVRQQLPEKYKEIFFDQSKNGYAGYIDGGASQEEFYKFIKPILEKMDGTEELLVKLNREDLLRKQRTFDNGSIPHQIHLGELHAILRRQEDFYPFLKDNREKIEKILTFRIPYYVGPLARGNSRFAWMTRKSEETITPWNFEEVVDKGASAQSFIERMTNFDKNLPNEKVLPKHSLLYEYFTVYNELTKVKYVTEGMRKPAFLSGEQKKAIVDLLFKTNRKVTVKQLKEDYFKKIECFDSVEISGVEDRFNASLGTYHDLLKIIKDKDFLDNEENEDILEDIVLTLTLFEDREMIEERLKTYAHLFDDKVMKQLKRRRYTGWGRLSRKLINGIRDKQSGKTILDFLKSDGFANRNFMQLIHDDSLTFKEDIQKAQVSGQGDSLHEHIANLAGSPAIKKGILQTVKVVDELVKVMGRHKPENIVIEMARENQTTQKGQKNSRERMKRIEEGIKELGSQILKEHPVENTQLQNEKLYLYYLQNGRDMYVDQELDINRLSDYDVDHIVPQSFLKDDSIDNKVLTRSDKARGKSDNVPSEEVVKKMKNYWRQLLNAKLITQRKFDNLTKAERGGLSELDKAGFIKRQLVETRQITKHVAQILDSRMNTKYDENDKLIREVKVITLKSKLVSDFRKDFQFYKVREINNYHHAHDAYLNAVVGTALIKKYPKLESEFVYGDYKVYDVRKMIAKSEQEIGKATAKYFFYSNIMNFFKTEITLANGEIRKRPLIETNGETGEIVWDKGRDFATVRKVLSMPQVNIVKKTEVQTGGFSKESILPKRNSDKLIARKKDWDPKKYGGFDSPTVAYSVLVVAKVEKGKSKKLKSVKELLGITIMERSSFEKNPIDFLEAKGYKEVKKDLIIKLPKYSLFELENGRKRMLASAGELQKGNELALPSKYVNFLYLASHYEKLKGSPEDNEQKQLFVEQHKHYLDEIIEQISEFSKRVILADANLDKVLSAYNKHRDKPIREQAENIIHLFTLTNLGAPAAFKYFDTTIDRKRYTSTKEVLDATLIHQSITGLYETRIDLSQLGGDGGGGSPAPEAAAKGGLLGRDLLTKLKAQIQFSTEGPQVTWEDRPAMCLVLNLEEEYRLHEKPVPPSIDPSWLQLFPMVWAEKAGMGLANQVPPVVVELKSDASPVAVRQYPMSKEAREGIRPHIQRFLDLGILVPCQSPWNTPLLPVKKPGTNDYRPVQDLREVNKRVQDIHPTVPNPYNLLSSLPPSHTWYSVLDLKDAFFCLKLHPNSQPLFAFEWRDPEKGNTGQLTWTRLPQGFKNSPTLFNEALHRDLASFRALNPQVVMLQYVDDLLVAAPTYRDCKEGTRRLLQELSKLGYRVSAKKAQLCREEVTYLGYLLKGGKRWLTPARKATVMKIPTPTTPRQVREFLGKAGFCRLFIPGFASLAAPLYPLTRPKVPFTWTEAHQEAFGRIKEALLSAPALALPDLTKPFALYVDEKEGVARGVLTQTLGPWRRPVAYLSKKLDPVASGWPTCLKAIAAVALLLKDADKLTLGQNVLVIAPHNLESIVRQPPDRWMTNARMTHYQSLLLNERVSFAPPAILNPATLLPVESDDTPIHICSEILAEETGTRPDLRDQPLPGVPAWYTDGSSFIMDGRRQAGAAIVDNKRTVWASNLPEGTSAQKAELIALTQALRLAEGKSINIYTDSRYAFATAHVHGAIYKQRGWLTSAGKDIKNKEEILALLEAIHLPKRVAIIHCPGHQRGTDPVATGNRKADEAAKQAAQSTRILTETTKNAGKRTADGSEFEKRTADGSEFESPKKKAKVE

SEQ ID NO: 1667 - protein, 2134 aa, synthetic construct
MPAAKRVKLDGGDKKYSIGLDIGTNSVGWAVITDEYKVPSKKFKVLGNTDRHSIKKNLIGALLFDSGETAEATRLKRTARRRYTRRKNRICYLQEIFSNEMAKVDDSFFHRLEESFLVEEDKKHERHPIFGNIVDEVAYHEKYPTIYHLRKKLVDSTDKADLRLIYLALAHMIKFRGHFLIEGDLNPDNSDVDKLFIQLVQTYNQLFEENPINASGVDAKAILSARLSKSRRLENLIAQLPGEKKNGLFGNLIALSLGLTPNFKSNFDLAEDAKLQLSKDTYDDDLDNLLAQIGDQYADLFLAAKNLSDAILLSDILRVNTEITKAPLSASMIKRYDEHHQDLTLLKALVRQQLPEKYKEIFFDQSKNGYAGYIDGGASQEEFYKFIKPILEKMDGTEELLVKLNREDLLRKQRTFDNGSIPHQIHLGELHAILRRQEDFYPFLKDNREKIEKILTFRIPYYVGPLARGNSRFAWMTRKSEETITPWNFEEVVDKGASAQSFIERMTNFDKNLPNEKVLPKHSLLYEYFTVYNELTKVKYVTEGMRKPAFLSGEQKKAIVDLLFKTNRKVTVKQLKEDYFKKIECFDSVEISGVEDRFNASLGTYHDLLKIIKDKDFLDNEENEDILEDIVLTLTLFEDREMIEERLKTYAHLFDDKVMKQLKRRRYTGWGRLSRKLINGIRDKQSGKTILDFLKSDGFANRNFMQLIHDDSLTFKEDIQKAQVSGQGDSLHEHIANLAGSPAIKKGILQTVKVVDELVKVMGRHKPENIVIEMARENQTTQKGQKNSRERMKRIEEGIKELGSQILKEHPVENTQLQNEKLYLYYLQNGRDMYVDQELDINRLSDYDVDHIVPQSFLKDDSIDNKVLTRSDKARGKSDNVPSEEVVKKMKNYWRQLLNAKLITQRKFDNLTKAERGGLSELDKAGFIKRQLVETRQITKHVAQILDSRMNTKYDENDKLIREVKVITLKSKLVSDFRKDFQFYKVREINNYHHAHDAYLNAVVGTALIKKYPKLESEFVYGDYKVYDVRKMIAKSEQEIGKATAKYFFYSNIMNFFKTEITLANGEIRKRPLIETNGETGEIVWDKGRDFATVRKVLSMPQVNIVKKTEVQTGGFSKESILPKRNSDKLIARKKDWDPKKYGGFDSPTVAYSVLVVAKVEKGKSKKLKSVKELLGITIMERSSFEKNPIDFLEAKGYKEVKKDLIIKLPKYSLFELENGRKRMLASAGELQKGNELALPSKYVNFLYLASHYEKLKGSPEDNEQKQLFVEQHKHYLDEIIEQISEFSKRVILADANLDKVLSAYNKHRDKPIREQAENIIHLFTLTNLGAPAAFKYFDTTIDRKRYTSTKEVLDATLIHQSITGLYETRIDLSQLGGDGGGSSGSSGSSGSSGSSGSSGGLLGRDLLTKLKAQIQFSTEGPQVTWEDRPAMCLVLNLEEEYRLHEKPVPPSIDPSWLQLFPMVWAEKAGMGLANQVPPVVVELKSDASPVAVRQYPMSKEAREGIRPHIQRFLDLGILVPCQSPWNTPLLPVKKPGTNDYRPVQDLREVNKRVQDIHPTVPNPYNLLSSLPPSHTWYSVLDLKDAFFCLKLHPNSQPLFAFEWRDPEKGNTGQLTWTRLPQGFKNSPTLFNEALHRDLASFRALNPQVVMLQYVDDLLVAAPTYRDCKEGTRRLLQELSKLGYRVSAKKAQLCREEVTYLGYLLKGGKRWLTPARKATVMKIPTPTTPRQVREFLGKAGFCRLFIPGFASLAAPLYPLTRPKVPFTWTEAHQEAFGRIKEALLSAPALALPDLTKPFALYVDEKEGVARGVLTQTLGPWRRPVAYLSKKLDPVASGWPTCLKAIAAVALLLKDADKLTLGQNVLVIAPHNLESIVRQPPDRWMTNARMTHYQSLLLNERVSFAPPAILNPATLLPVESDDTPIHICSEILAEETGTRPDLRDQPLPGVPAWYTDGSSFIMDGRRQAGAAIVDNKRTVWASNLPEGTSAQKAELIALTQALRLAEGKSINIYTDSRYAFATAHVHGAIYKQRGWLTSAGKDIKNKEEILALLEAIHLPKRVAIIHCPGHQRGTDPVATGNRKADEAAKQAAQSTRILTETTKNAGKRTADGSEFEKRTADGSEFESPKKKAKVE

SEQ ID NO: 1668 - protein, 2122 aa, synthetic construct
MPAAKRVKLDGGDKKYSIGLDIGTNSVGWAVITDEYKVPSKKFKVLGNTDRHSIKKNLIGALLFDSGETAEATRLKRTARRRYTRRKNRICYLQEIFSNEMAKVDDSFFHRLEESFLVEEDKKHERHPIFGNIVDEVAYHEKYPTIYHLRKKLVDSTDKADLRLIYLALAHMIKFRGHFLIEGDLNPDNSDVDKLFIQLVQTYNQLFEENPINASGVDAKAILSARLSKSRRLENLIAQLPGEKKNGLFGNLIALSLGLTPNFKSNFDLAEDAKLQLSKDTYDDDLDNLLAQIGDQYADLFLAAKNLSDAILLSDILRVNTEITKAPLSASMIKRYDEHHQDLTLLKALVRQQLPEKYKEIFFDQSKNGYAGYIDGGASQEEFYKFIKPILEKMDGTEELLVKLNREDLLRKQRTFDNGSIPHQIHLGELHAILRRQEDFYPFLKDNREKIEKILTFRIPYYVGPLARGNSRFAWMTRKSEETITPWNFEEVVDKGASAQSFIERMTNFDKNLPNEKVLPKHSLLYEYFTVYNELTKVKYVTEGMRKPAFLSGEQKKAIVDLLFKTNRKVTVKQLKEDYFKKIECFDSVEISGVEDRFNASLGTYHDLLKIIKDKDFLDNEENEDILEDIVLTLTLFEDREMIEERLKTYAHLFDDKVMKQLKRRRYTGWGRLSRKLINGIRDKQSGKTILDFLKSDGFANRNFMQLIHDDSLTFKEDIQKAQVSGQGDSLHEHIANLAGSPAIKKGILQTVKVVDELVKVMGRHKPENIVIEMARENQTTQKGQKNSRERMKRIEEGIKELGSQILKEHPVENTQLQNEKLYLYYLQNGRDMYVDQELDINRLSDYDVDHIVPQSFLKDDSIDNKVLTRSDKARGKSDNVPSEEVVKKMKNYWRQLLNAKLITQRKFDNLTKAERGGLSELDKAGFIKRQLVETRQITKHVAQILDSRMNTKYDENDKLIREVKVITLKSKLVSDFRKDFQFYKVREINNYHHAHDAYLNAVVGTALIKKYPKLESEFVYGDYKVYDVRKMIAKSEQEIGKATAKYFFYSNIMNFFKTEITLANGEIRKRPLIETNGETGEIVWDKGRDFATVRKVLSMPQVNIVKKTEVQTGGFSKESILPKRNSDKLIARKKDWDPKKYGGFDSPTVAYSVLVVAKVEKGKSKKLKSVKELLGITIMERSSFEKNPIDFLEAKGYKEVKKDLIIKLPKYSLFELENGRKRMLASAGELQKGNELALPSKYVNFLYLASHYEKLKGSPEDNEQKQLFVEQHKHYLDEIIEQISEFSKRVILADANLDKVLSAYNKHRDKPIREQAENIIHLFTLTNLGAPAAFKYFDTTIDRKRYTSTKEVLDATLIHQSITGLYETRIDLSQLGGDGGGGSGGGGGLLGRDLLTKLKAQIQFSTEGPQVTWEDRPAMCLVLNLEEEYRLHEKPVPPSIDPSWLQLFPMVWAEKAGMGLANQVPPVVVELKSDASPVAVRQYPMSKEAREGIRPHIQRFLDLGILVPCQSPWNTPLLPVKKPGTNDYRPVQDLREVNKRVQDIHPTVPNPYNLLSSLPPSHTWYSVLDLKDAFFCLKLHPNSQPLFAFEWRDPEKGNTGQLTWTRLPQGFKNSPTLFNEALHRDLASFRALNPQVVMLQYVDDLLVAAPTYRDCKEGTRRLLQELSKLGYRVSAKKAQLCREEVTYLGYLLKGGKRWLTPARKATVMKIPTPTTPRQVREFLGKAGFCRLFIPGFASLAAPLYPLTRPKVPFTWTEAHQEAFGRIKEALLSAPALALPDLTKPFALYVDEKEGVARGVLTQTLGPWRRPVAYLSKKLDPVASGWPTCLKAIAAVALLLKDADKLTLGQNVLVIAPHNLESIVRQPPDRWMTNARMTHYQSLLLNERVSFAPPAILNPATLLPVESDDTPIHICSEILAEETGTRPDLRDQPLPGVPAWYTDGSSFIMDGRRQAGAAIVDNKRTVWASNLPEGTSAQKAELIALTQALRLAEGKSINIYTDSRYAFATAHVHGAIYKQRGWLTSAGKDIKNKEEILALLEAIHLPKRVAIIHCPGHQRGTDPVATGNRKADEAAKQAAQSTRILTETTKNAGKRTADGSEFEKRTADGSEFESPKKKAKVE

SEQ ID NO: 1669 - protein, 2124 aa, synthetic construct
MPAAKRVKLDGGDKKYSIGLDIGTNSVGWAVITDEYKVPSKKFKVLGNTDRHSIKKNLIGALLFDSGETAEATRLKRTARRRYTRRKNRICYLQEIFSNEMAKVDDSFFHRLEESFLVEEDKKHERHPIFGNIVDEVAYHEKYPTIYHLRKKLVDSTDKADLRLIYLALAHMIKFRGHFLIEGDLNPDNSDVDKLFIQLVQTYNQLFEENPINASGVDAKAILSARLSKSRRLENLIAQLPGEKKNGLFGNLIALSLGLTPNFKSNFDLAEDAKLQLSKDTYDDDLDNLLAQIGDQYADLFLAAKNLSDAILLSDILRVNTEITKAPLSASMIKRYDEHHQDLTLLKALVRQQLPEKYKEIFFDQSKNGYAGYIDGGASQEEFYKFIKPILEKMDGTEELLVKLNREDLLRKQRTFDNGSIPHQIHLGELHAILRRQEDFYPFLKDNREKIEKILTFRIPYYVGPLARGNSRFAWMTRKSEETITPWNFEEVVDKGASAQSFIERMTNFDKNLPNEKVLPKHSLLYEYFTVYNELTKVKYVTEGMRKPAFLSGEQKKAIVDLLFKTNRKVTVKQLKEDYFKKIECFDSVEISGVEDRFNASLGTYHDLLKIIKDKDFLDNEENEDILEDIVLTLTLFEDREMIEERLKTYAHLFDDKVMKQLKRRRYTGWGRLSRKLINGIRDKQSGKTILDFLKSDGFANRNFMQLIHDDSLTFKEDIQKAQVSGQGDSLHEHIANLAGSPAIKKGILQTVKVVDELVKVMGRHKPENIVIEMARENQTTQKGQKNSRERMKRIEEGIKELGSQILKEHPVENTQLQNEKLYLYYLQNGRDMYVDQELDINRLSDYDVDHIVPQSFLKDDSIDNKVLTRSDKARGKSDNVPSEEVVKKMKNYWRQLLNAKLITQRKFDNLTKAERGGLSELDKAGFIKRQLVETRQITKHVAQILDSRMNTKYDENDKLIREVKVITLKSKLVSDFRKDFQFYKVREINNYHHAHDAYLNAVVGTALIKKYPKLESEFVYGDYKVYDVRKMIAKSEQEIGKATAKYFFYSNIMNFFKTEITLANGEIRKRPLIETNGETGEIVWDKGRDFATVRKVLSMPQVNIVKKTEVQTGGFSKESILPKRNSDKLIARKKDWDPKKYGGFDSPTVAYSVLVVAKVEKGKSKKLKSVKELLGITIMERSSFEKNPIDFLEAKGYKEVKKDLIIKLPKYSLFELENGRKRMLASAGELQKGNELALPSKYVNFLYLASHYEKLKGSPEDNEQKQLFVEQHKHYLDEIIEQISEFSKRVILADANLDKVLSAYNKHRDKPIREQAENIIHLFTLTNLGAPAAFKYFDTTIDRKRYTSTKEVLDATLIHQSITGLYETRIDLSQLGGDGGPAPEAAAKGGLLGRDLLTKLKAQIQFSTEGPQVTWEDRPAMCLVLNLEEEYRLHEKPVPPSIDPSWLQLFPMVWAEKAGMGLANQVPPVVVELKSDASPVAVRQYPMSKEAREGIRPHIQRFLDLGILVPCQSPWNTPLLPVKKPGTNDYRPVQDLREVNKRVQDIHPTVPNPYNLLSSLPPSHTWYSVLDLKDAFFCLKLHPNSQPLFAFEWRDPEKGNTGQLTWTRLPQGFKNSPTLFNEALHRDLASFRALNPQVVMLQYVDDLLVAAPTYRDCKEGTRRLLQELSKLGYRVSAKKAQLCREEVTYLGYLLKGGKRWLTPARKATVMKIPTPTTPRQVREFLGKAGFCRLFIPGFASLAAPLYPLTRPKVPFTWTEAHQEAFGRIKEALLSAPALALPDLTKPFALYVDEKEGVARGVLTQTLGPWRRPVAYLSKKLDPVASGWPTCLKAIAAVALLLKDADKLTLGQNVLVIAPHNLESIVRQPPDRWMTNARMTHYQSLLLNERVSFAPPAILNPATLLPVESDDTPIHICSEILAEETGTRPDLRDQPLPGVPAWYTDGSSFIMDGRRQAGAAIVDNKRTVWASNLPEGTSAQKAELIALTQALRLAEGKSINIYTDSRYAFATAHVHGAIYKQRGWLTSAGKDIKNKEEILALLEAIHLPKRVAIIHCPGHQRGTDPVATGNRKADEAAKQAAQSTRILTETTKNAGKRTADGSEFEKRTADGSEFESPKKKAKVE

SEQ ID NO: 1670 - protein, 2162 aa, synthetic construct
MPAAKRVKLDGGDKKYSIGLDIGTNSVGWAVITDEYKVPSKKFKVLGNTDRHSIKKNLIGALLFDSGETAEATRLKRTARRRYTRRKNRICYLQEIFSNEMAKVDDSFFHRLEESFLVEEDKKHERHPIFGNIVDEVAYHEKYPTIYHLRKKLVDSTDKADLRLIYLALAHMIKFRGHFLIEGDLNPDNSDVDKLFIQLVQTYNQLFEENPINASGVDAKAILSARLSKSRRLENLIAQLPGEKKNGLFGNLIALSLGLTPNFKSNFDLAEDAKLQLSKDTYDDDLDNLLAQIGDQYADLFLAAKNLSDAILLSDILRVNTEITKAPLSASMIKRYDEHHQDLTLLKALVRQQLPEKYKEIFFDQSKNGYAGYIDGGASQEEFYKFIKPILEKMDGTEELLVKLNREDLLRKQRTFDNGSIPHQIHLGELHAILRRQEDFYPFLKDNREKIEKILTFRIPYYVGPLARGNSRFAWMTRKSEETITPWNFEEVVDKGASAQSFIERMTNFDKNLPNEKVLPKHSLLYEYFTVYNELTKVKYVTEGMRKPAFLSGEQKKAIVDLLFKTNRKVTVKQLKEDYFKKIECFDSVEISGVEDRFNASLGTYHDLLKIIKDKDFLDNEENEDILEDIVLTLTLFEDREMIEERLKTYAHLFDDKVMKQLKRRRYTGWGRLSRKLINGIRDKQSGKTILDFLKSDGFANRNFMQLIHDDSLTFKEDIQKAQVSGQGDSLHEHIANLAGSPAIKKGILQTVKVVDELVKVMGRHKPENIVIEMARENQTTQKGQKNSRERMKRIEEGIKELGSQILKEHPVENTQLQNEKLYLYYLQNGRDMYVDQELDINRLSDYDVDHIVPQSFLKDDSIDNKVLTRSDKARGKSDNVPSEEVVKKMKNYWRQLLNAKLITQRKFDNLTKAERGGLSELDKAGFIKRQLVETRQITKHVAQILDSRMNTKYDENDKLIREVKVITLKSKLVSDFRKDFQFYKVREINNYHHAHDAYLNAVVGTALIKKYPKLESEFVYGDYKVYDVRKMIAKSEQEIGKATAKYFFYSNIMNFFKTEITLANGEIRKRPLIETNGETGEIVWDKGRDFATVRKVLSMPQVNIVKKTEVQTGGFSKESILPKRNSDKLIARKKDWDPKKYGGFDSPTVAYSVLVVAKVEKGKSKKLKSVKELLGITIMERSSFEKNPIDFLEAKGYKEVKKDLIIKLPKYSLFELENGRKRMLASAGELQKGNELALPSKYVNFLYLASHYEKLKGSPEDNEQKQLFVEQHKHYLDEIIEQISEFSKRVILADANLDKVLSAYNKHRDKPIREQAENIIHLFTLTNLGAPAAFKYFDTTIDRKRYTSTKEVLDATLIHQSITGLYETRIDLSQLGGDGGAEAAAKEAAAKEAAAKEAAAKALEAEAAAKEAAAKEAAAKEAAAKAGGLLGRDLLTKLKAQIQFSTEGPQVTWEDRPAMCLVLNLEEEYRLHEKPVPPSIDPSWLQLFPMVWAEKAGMGLANQVPPVVVELKSDASPVAVRQYPMSKEAREGIRPHIQRFLDLGILVPCQSPWNTPLLPVKKPGTNDYRPVQDLREVNKRVQDIHPTVPNPYNLLSSLPPSHTWYSVLDLKDAFFCLKLHPNSQPLFAFEWRDPEKGNTGQLTWTRLPQGFKNSPTLFNEALHRDLASFRALNPQVVMLQYVDDLLVAAPTYRDCKEGTRRLLQELSKLGYRVSAKKAQLCREEVTYLGYLLKGGKRWLTPARKATVMKIPTPTTPRQVREFLGKAGFCRLFIPGFASLAAPLYPLTRPKVPFTWTEAHQEAFGRIKEALLSAPALALPDLTKPFALYVDEKEGVARGVLTQTLGPWRRPVAYLSKKLDPVASGWPTCLKAIAAVALLLKDADKLTLGQNVLVIAPHNLESIVRQPPDRWMTNARMTHYQSLLLNERVSFAPPAILNPATLLPVESDDTPIHICSEILAEETGTRPDLRDQPLPGVPAWYTDGSSFIMDGRRQAGAAIVDNKRTVWASNLPEGTSAQKAELIALTQALRLAEGKSINIYTDSRYAFATAHVHGAIYKQRGWLTSAGKDIKNKEEILALLEAIHLPKRVAIIHCPGHQRGTDPVATGNRKADEAAKQAAQSTRILTETTKNAGKRTADGSEFEKRTADGSEFESPKKKAKVE

SEQ ID NO: 1671 - protein, 2124 aa, synthetic construct
MPAAKRVKLDGGDKKYSIGLDIGTNSVGWAVITDEYKVPSKKFKVLGNTDRHSIKKNLIGALLFDSGETAEATRLKRTARRRYTRRKNRICYLQEIFSNEMAKVDDSFFHRLEESFLVEEDKKHERHPIFGNIVDEVAYHEKYPTIYHLRKKLVDSTDKADLRLIYLALAHMIKFRGHFLIEGDLNPDNSDVDKLFIQLVQTYNQLFEENPINASGVDAKAILSARLSKSRRLENLIAQLPGEKKNGLFGNLIALSLGLTPNFKSNFDLAEDAKLQLSKDTYDDDLDNLLAQIGDQYADLFLAAKNLSDAILLSDILRVNTEITKAPLSASMIKRYDEHHQDLTLLKALVRQQLPEKYKEIFFDQSKNGYAGYIDGGASQEEFYKFIKPILEKMDGTEELLVKLNREDLLRKQRTFDNGSIPHQIHLGELHAILRRQEDFYPFLKDNREKIEKILTFRIPYYVGPLARGNSRFAWMTRKSEETITPWNFEEVVDKGASAQSFIERMTNFDKNLPNEKVLPKHSLLYEYFTVYNELTKVKYVTEGMRKPAFLSGEQKKAIVDLLFKTNRKVTVKQLKEDYFKKIECFDSVEISGVEDRFNASLGTYHDLLKIIKDKDFLDNEENEDILEDIVLTLTLFEDREMIEERLKTYAHLFDDKVMKQLKRRRYTGWGRLSRKLINGIRDKQSGKTILDFLKSDGFANRNFMQLIHDDSLTFKEDIQKAQVSGQGDSLHEHIANLAGSPAIKKGILQTVKVVDELVKVMGRHKPENIVIEMARENQTTQKGQKNSRERMKRIEEGIKELGSQILKEHPVENTQLQNEKLYLYYLQNGRDMYVDQELDINRLSDYDVDHIVPQSFLKDDSIDNKVLTRSDKARGKSDNVPSEEVVKKMKNYWRQLLNAKLITQRKFDNLTKAERGGLSELDKAGFIKRQLVETRQITKHVAQILDSRMNTKYDENDKLIREVKVITLKSKLVSDFRKDFQFYKVREINNYHHAHDAYLNAVVGTALIKKYPKLESEFVYGDYKVYDVRKMIAKSEQEIGKATAKYFFYSNIMNFFKTEITLANGEIRKRPLIETNGETGEIVWDKGRDFATVRKVLSMPQVNIVKKTEVQTGGFSKESILPKRNSDKLIARKKDWDPKKYGGFDSPTVAYSVLVVAKVEKGKSKKLKSVKELLGITIMERSSFEKNPIDFLEAKGYKEVKKDLIIKLPKYSLFELENGRKRMLASAGELQKGNELALPSKYVNFLYLASHYEKLKGSPEDNEQKQLFVEQHKHYLDEIIEQISEFSKRVILADANLDKVLSAYNKHRDKPIREQAENIIHLFTLTNLGAPAAFKYFDTTIDRKRYTSTKEVLDATLIHQSITGLYETRIDLSQLGGDGGEAAAKGSSGGLLGRDLLTKLKAQIQFSTEGPQVTWEDRPAMCLVLNLEEEYRLHEKPVPPSIDPSWLQLFPMVWAEKAGMGLANQVPPVVVELKSDASPVAVRQYPMSKEAREGIRPHIQRFLDLGILVPCQSPWNTPLLPVKKPGTNDYRPVQDLREVNKRVQDIHPTVPNPYNLLSSLPPSHTWYSVLDLKDAFFCLKLHPNSQPLFAFEWRDPEKGNTGQLTWTRLPQGFKNSPTLFNEALHRDLASFRALNPQVVMLQYVDDLLVAAPTYRDCKEGTRRLLQELSKLGYRVSAKKAQLCREEVTYLGYLLKGGKRWLTPARKATVMKIPTPTTPRQVREFLGKAGFCRLFIPGFASLAAPLYPLTRPKVPFTWTEAHQEAFGRIKEALLSAPALALPDLTKPFALYVDEKEGVARGVLTQTLGPWRRPVAYLSKKLDPVASGWPTCLKAIAAVALLLKDADKLTLGQNVLVIAPHNLESIVRQPPDRWMTNARMTHYQSLLLNERVSFAPPAILNPATLLPVESDDTPIHICSEILAEETGTRPDLRDQPLPGVPAWYTDGSSFIMDGRRQAGAAIVDNKRTVWASNLPEGTSAQKAELIALTQALRLAEGKSINIYTDSRYAFATAHVHGAIYKQRGWLTSAGKDIKNKEEILALLEAIHLPKRVAIIHCPGHQRGTDPVATGNRKADEAAKQAAQSTRILTETTKNAGKRTADGSEFEKRTADGSEFESPKKKAKVE

SEQ ID NO: 1672 - protein, 2127 aa, synthetic construct
MPAAKRVKLDGGDKKYSIGLDIGTNSVGWAVITDEYKVPSKKFKVLGNTDRHSIKKNLIGALLFDSGETAEATRLKRTARRRYTRRKNRICYLQEIFSNEMAKVDDSFFHRLEESFLVEEDKKHERHPIFGNIVDEVAYHEKYPTIYHLRKKLVDSTDKADLRLIYLALAHMIKFRGHFLIEGDLNPDNSDVDKLFIQLVQTYNQLFEENPINASGVDAKAILSARLSKSRRLENLIAQLPGEKKNGLFGNLIALSLGLTPNFKSNFDLAEDAKLQLSKDTYDDDLDNLLAQIGDQYADLFLAAKNLSDAILLSDILRVNTEITKAPLSASMIKRYDEHHQDLTLLKALVRQQLPEKYKEIFFDQSKNGYAGYIDGGASQEEFYKFIKPILEKMDGTEELLVKLNREDLLRKQRTFDNGSIPHQIHLGELHAILRRQEDFYPFLKDNREKIEKILTFRIPYYVGPLARGNSRFAWMTRKSEETITPWNFEEVVDKGASAQSFIERMTNFDKNLPNEKVLPKHSLLYEYFTVYNELTKVKYVTEGMRKPAFLSGEQKKAIVDLLFKTNRKVTVKQLKEDYFKKIECFDSVEISGVEDRFNASLGTYHDLLKIIKDKDFLDNEENEDILEDIVLTLTLFEDREMIEERLKTYAHLFDDKVMKQLKRRRYTGWGRLSRKLINGIRDKQSGKTILDFLKSDGFANRNFMQLIHDDSLTFKEDIQKAQVSGQGDSLHEHIANLAGSPAIKKGILQTVKVVDELVKVMGRHKPENIVIEMARENQTTQKGQKNSRERMKRIEEGIKELGSQILKEHPVENTQLQNEKLYLYYLQNGRDMYVDQELDINRLSDYDVDHIVPQSFLKDDSIDNKVLTRSDKARGKSDNVPSEEVVKKMKNYWRQLLNAKLITQRKFDNLTKAERGGLSELDKAGFIKRQLVETRQITKHVAQILDSRMNTKYDENDKLIREVKVITLKSKLVSDFRKDFQFYKVREINNYHHAHDAYLNAVVGTALIKKYPKLESEFVYGDYKVYDVRKMIAKSEQEIGKATAKYFFYSNIMNFFKTEITLANGEIRKRPLIETNGETGEIVWDKGRDFATVRKVLSMPQVNIVKKTEVQTGGFSKESILPKRNSDKLIARKKDWDPKKYGGFDSPTVAYSVLVVAKVEKGKSKKLKSVKELLGITIMERSSFEKNPIDFLEAKGYKEVKKDLIIKLPKYSLFELENGRKRMLASAGELQKGNELALPSKYVNFLYLASHYEKLKGSPEDNEQKQLFVEQHKHYLDEIIEQISEFSKRVILADANLDKVLSAYNKHRDKPIREQAENIIHLFTLTNLGAPAAFKYFDTTIDRKRYTSTKEVLDATLIHQSITGLYETRIDLSQLGGDGGGGGEAAAKPAPGGLLGRDLLTKLKAQIQFSTEGPQVTWEDRPAMCLVLNLEEEYRLHEKPVPPSIDPSWLQLFPMVWAEKAGMGLANQVPPVVVELKSDASPVAVRQYPMSKEAREGIRPHIQRFLDLGILVPCQSPWNTPLLPVKKPGTNDYRPVQDLREVNKRVQDIHPTVPNPYNLLSSLPPSHTWYSVLDLKDAFFCLKLHPNSQPLFAFEWRDPEKGNTGQLTWTRLPQGFKNSPTLFNEALHRDLASFRALNPQVVMLQYVDDLLVAAPTYRDCKEGTRRLLQELSKLGYRVSAKKAQLCREEVTYLGYLLKGGKRWLTPARKATVMKIPTPTTPRQVREFLGKAGFCRLFIPGFASLAAPLYPLTRPKVPFTWTEAHQEAFGRIKEALLSAPALALPDLTKPFALYVDEKEGVARGVLTQTLGPWRRPVAYLSKKLDPVASGWPTCLKAIAAVALLLKDADKLTLGQNVLVIAPHNLESIVRQPPDRWMTNARMTHYQSLLLNERVSFAPPAILNPATLLPVESDDTPIHICSEILAEETGTRPDLRDQPLPGVPAWYTDGSSFIMDGRRQAGAAIVDNKRTVWASNLPEGTSAQKAELIALTQALRLAEGKSINIYTDSRYAFATAHVHGAIYKQRGWLTSAGKDIKNKEEILALLEAIHLPKRVAIIHCPGHQRGTDPVATGNRKADEAAKQAAQSTRILTETTKNAGKRTADGSEFEKRTADGSEFESPKKKAKVE

SEQ ID NO: 1673 - protein, 2122 aa, synthetic construct
MPAAKRVKLDGGDKKYSIGLDIGTNSVGWAVITDEYKVPSKKFKVLGNTDRHSIKKNLIGALLFDSGETAEATRLKRTARRRYTRRKNRICYLQEIFSNEMAKVDDSFFHRLEESFLVEEDKKHERHPIFGNIVDEVAYHEKYPTIYHLRKKLVDSTDKADLRLIYLALAHMIKFRGHFLIEGDLNPDNSDVDKLFIQLVQTYNQLFEENPINASGVDAKAILSARLSKSRRLENLIAQLPGEKKNGLFGNLIALSLGLTPNFKSNFDLAEDAKLQLSKDTYDDDLDNLLAQIGDQYADLFLAAKNLSDAILLSDILRVNTEITKAPLSASMIKRYDEHHQDLTLLKALVRQQLPEKYKEIFFDQSKNGYAGYIDGGASQEEFYKFIKPILEKMDGTEELLVKLNREDLLRKQRTFDNGSIPHQIHLGELHAILRRQEDFYPFLKDNREKIEKILTFRIPYYVGPLARGNSRFAWMTRKSEETITPWNFEEVVDKGASAQSFIERMTNFDKNLPNEKVLPKHSLLYEYFTVYNELTKVKYVTEGMRKPAFLSGEQKKAIVDLLFKTNRKVTVKQLKEDYFKKIECFDSVEISGVEDRFNASLGTYHDLLKIIKDKDFLDNEENEDILEDIVLTLTLFEDREMIEERLKTYAHLFDDKVMKQLKRRRYTGWGRLSRKLINGIRDKQSGKTILDFLKSDGFANRNFMQLIHDDSLTFKEDIQKAQVSGQGDSLHEHIANLAGSPAIKKGILQTVKVVDELVKVMGRHKPENIVIEMARENQTTQKGQKNSRERMKRIEEGIKELGSQILKEHPVENTQLQNEKLYLYYLQNGRDMYVDQELDINRLSDYDVDHIVPQSFLKDDSIDNKVLTRSDKARGKSDNVPSEEVVKKMKNYWRQLLNAKLITQRKFDNLTKAERGGLSELDKAGFIKRQLVETRQITKHVAQILDSRMNTKYDENDKLIREVKVITLKSKLVSDFRKDFQFYKVREINNYHHAHDAYLNAVVGTALIKKYPKLESEFVYGDYKVYDVRKMIAKSEQEIGKATAKYFFYSNIMNFFKTEITLANGEIRKRPLIETNGETGEIVWDKGRDFATVRKVLSMPQVNIVKKTEVQTGGFSKESILPKRNSDKLIARKKDWDPKKYGGFDSPTVAYSVLVVAKVEKGKSKKLKSVKELLGITIMERSSFEKNPIDFLEAKGYKEVKKDLIIKLPKYSLFELENGRKRMLASAGELQKGNELALPSKYVNFLYLASHYEKLKGSPEDNEQKQLFVEQHKHYLDEIIEQISEFSKRVILADANLDKVLSAYNKHRDKPIREQAENIIHLFTLTNLGAPAAFKYFDTTIDRKRYTSTKEVLDATLIHQSITGLYETRIDLSQLGGDGGGGGPAPGGLLGRDLLTKLKAQIQFSTEGPQVTWEDRPAMCLVLNLEEEYRLHEKPVPPSIDPSWLQLFPMVWAEKAGMGLANQVPPVVVELKSDASPVAVRQYPMSKEAREGIRPHIQRFLDLGILVPCQSPWNTPLLPVKKPGTNDYRPVQDLREVNKRVQDIHPTVPNPYNLLSSLPPSHTWYSVLDLKDAFFCLKLHPNSQPLFAFEWRDPEKGNTGQLTWTRLPQGFKNSPTLFNEALHRDLASFRALNPQVVMLQYVDDLLVAAPTYRDCKEGTRRLLQELSKLGYRVSAKKAQLCREEVTYLGYLLKGGKRWLTPARKATVMKIPTPTTPRQVREFLGKAGFCRLFIPGFASLAAPLYPLTRPKVPFTWTEAHQEAFGRIKEALLSAPALALPDLTKPFALYVDEKEGVARGVLTQTLGPWRRPVAYLSKKLDPVASGWPTCLKAIAAVALLLKDADKLTLGQNVLVIAPHNLESIVRQPPDRWMTNARMTHYQSLLLNERVSFAPPAILNPATLLPVESDDTPIHICSEILAEETGTRPDLRDQPLPGVPAWYTDGSSFIMDGRRQAGAAIVDNKRTVWASNLPEGTSAQKAELIALTQALRLAEGKSINIYTDSRYAFATAHVHGAIYKQRGWLTSAGKDIKNKEEILALLEAIHLPKRVAIIHCPGHQRGTDPVATGNRKADEAAKQAAQSTRILTETTKNAGKRTADGSEFEKRTADGSEFESPKKKAKVE

SEQ ID NO: 1674 - protein, 2136 aa, synthetic construct
MPAAKRVKLDGGDKKYSIGLDIGTNSVGWAVITDEYKVPSKKFKVLGNTDRHSIKKNLIGALLFDSGETAEATRLKRTARRRYTRRKNRICYLQEIFSNEMAKVDDSFFHRLEESFLVEEDKKHERHPIFGNIVDEVAYHEKYPTIYHLRKKLVDSTDKADLRLIYLALAHMIKFRGHFLIEGDLNPDNSDVDKLFIQLVQTYNQLFEENPINASGVDAKAILSARLSKSRRLENLIAQLPGEKKNGLFGNLIALSLGLTPNFKSNFDLAEDAKLQLSKDTYDDDLDNLLAQIGDQYADLFLAAKNLSDAILLSDILRVNTEITKAPLSASMIKRYDEHHQDLTLLKALVRQQLPEKYKEIFFDQSKNGYAGYIDGGASQEEFYKFIKPILEKMDGTEELLVKLNREDLLRKQRTFDNGSIPHQIHLGELHAILRRQEDFYPFLKDNREKIEKILTFRIPYYVGPLARGNSRFAWMTRKSEETITPWNFEEVVDKGASAQSFIERMTNFDKNLPNEKVLPKHSLLYEYFTVYNELTKVKYVTEGMRKPAFLSGEQKKAIVDLLFKTNRKVTVKQLKEDYFKKIECFDSVEISGVEDRFNASLGTYHDLLKIIKDKDFLDNEENEDILEDIVLTLTLFEDREMIEERLKTYAHLFDDKVMKQLKRRRYTGWGRLSRKLINGIRDKQSGKTILDFLKSDGFANRNFMQLIHDDSLTFKEDIQKAQVSGQGDSLHEHIANLAGSPAIKKGILQTVKVVDELVKVMGRHKPENIVIEMARENQTTQKGQKNSRERMKRIEEGIKELGSQILKEHPVENTQLQNEKLYLYYLQNGRDMYVDQELDINRLSDYDVDHIVPQSFLKDDSIDNKVLTRSDKARGKSDNVPSEEVVKKMKNYWRQLLNAKLITQRKFDNLTKAERGGLSELDKAGFIKRQLVETRQITKHVAQILDSRMNTKYDENDKLIREVKVITLKSKLVSDFRKDFQFYKVREINNYHHAHDAYLNAVVGTALIKKYPKLESEFVYGDYKVYDVRKMIAKSEQEIGKATAKYFFYSNIMNFFKTEITLANGEIRKRPLIETNGETGEIVWDKGRDFATVRKVLSMPQVNIVKKTEVQTGGFSKESILPKRNSDKLIARKKDWDPKKYGGFDSPTVAYSVLVVAKVEKGKSKKLKSVKELLGITIMERSSFEKNPIDFLEAKGYKEVKKDLIIKLPKYSLFELENGRKRMLASAGELQKGNELALPSKYVNFLYLASHYEKLKGSPEDNEQKQLFVEQHKHYLDEIIEQISEFSKRVILADANLDKVLSAYNKHRDKPIREQAENIIHLFTLTNLGAPAAFKYFDTTIDRKRYTSTKEVLDATLIHQSITGLYETRIDLSQLGGDGGEAAAKEAAAKEAAAKEAAAKGGLLGRDLLTKLKAQIQFSTEGPQVTWEDRPAMCLVLNLEEEYRLHEKPVPPSIDPSWLQLFPMVWAEKAGMGLANQVPPVVVELKSDASPVAVRQYPMSKEAREGIRPHIQRFLDLGILVPCQSPWNTPLLPVKKPGTNDYRPVQDLREVNKRVQDIHPTVPNPYNLLSSLPPSHTWYSVLDLKDAFFCLKLHPNSQPLFAFEWRDPEKGNTGQLTWTRLPQGFKNSPTLFNEALHRDLASFRALNPQVVMLQYVDDLLVAAPTYRDCKEGTRRLLQELSKLGYRVSAKKAQLCREEVTYLGYLLKGGKRWLTPARKATVMKIPTPTTPRQVREFLGKAGFCRLFIPGFASLAAPLYPLTRPKVPFTWTEAHQEAFGRIKEALLSAPALALPDLTKPFALYVDEKEGVARGVLTQTLGPWRRPVAYLSKKLDPVASGWPTCLKAIAAVALLLKDADKLTLGQNVLVIAPHNLESIVRQPPDRWMTNARMTHYQSLLLNERVSFAPPAILNPATLLPVESDDTPIHICSEILAEETGTRPDLRDQPLPGVPAWYTDGSSFIMDGRRQAGAAIVDNKRTVWASNLPEGTSAQKAELIALTQALRLAEGKSINIYTDSRYAFATAHVHGAIYKQRGWLTSAGKDIKNKEEILALLEAIHLPKRVAIIHCPGHQRGTDPVATGNRKADEAAKQAAQSTRILTETTKNAGKRTADGSEFEKRTADGSEFESPKKKAKVE

SEQ ID NO: 1675 - protein, 2119 aa, synthetic construct
MPAAKRVKLDGGDKKYSIGLDIGTNSVGWAVITDEYKVPSKKFKVLGNTDRHSIKKNLIGALLFDSGETAEATRLKRTARRRYTRRKNRICYLQEIFSNEMAKVDDSFFHRLEESFLVEEDKKHERHPIFGNIVDEVAYHEKYPTIYHLRKKLVDSTDKADLRLIYLALAHMIKFRGHFLIEGDLNPDNSDVDKLFIQLVQTYNQLFEENPINASGVDAKAILSARLSKSRRLENLIAQLPGEKKNGLFGNLIALSLGLTPNFKSNFDLAEDAKLQLSKDTYDDDLDNLLAQIGDQYADLFLAAKNLSDAILLSDILRVNTEITKAPLSASMIKRYDEHHQDLTLLKALVRQQLPEKYKEIFFDQSKNGYAGYIDGGASQEEFYKFIKPILEKMDGTEELLVKLNREDLLRKQRTFDNGSIPHQIHLGELHAILRRQEDFYPFLKDNREKIEKILTFRIPYYVGPLARGNSRFAWMTRKSEETITPWNFEEVVDKGASAQSFIERMTNFDKNLPNEKVLPKHSLLYEYFTVYNELTKVKYVTEGMRKPAFLSGEQKKAIVDLLFKTNRKVTVKQLKEDYFKKIECFDSVEISGVEDRFNASLGTYHDLLKIIKDKDFLDNEENEDILEDIVLTLTLFEDREMIEERLKTYAHLFDDKVMKQLKRRRYTGWGRLSRKLINGIRDKQSGKTILDFLKSDGFANRNFMQLIHDDSLTFKEDIQKAQVSGQGDSLHEHIANLAGSPAIKKGILQTVKVVDELVKVMGRHKPENIVIEMARENQTTQKGQKNSRERMKRIEEGIKELGSQILKEHPVENTQLQNEKLYLYYLQNGRDMYVDQELDINRLSDYDVDHIVPQSFLKDDSIDNKVLTRSDKARGKSDNVPSEEVVKKMKNYWRQLLNAKLITQRKFDNLTKAERGGLSELDKAGFIKRQLVETRQITKHVAQILDSRMNTKYDENDKLIREVKVITLKSKLVSDFRKDFQFYKVREINNYHHAHDAYLNAVVGTALIKKYPKLESEFVYGDYKVYDVRKMIAKSEQEIGKATAKYFFYSNIMNFFKTEITLANGEIRKRPLIETNGETGEIVWDKGRDFATVRKVLSMPQVNIVKKTEVQTGGFSKESILPKRNSDKLIARKKDWDPKKYGGFDSPTVAYSVLVVAKVEKGKSKKLKSVKELLGITIMERSSFEKNPIDFLEAKGYKEVKKDLIIKLPKYSLFELENGRKRMLASAGELQKGNELALPSKYVNFLYLASHYEKLKGSPEDNEQKQLFVEQHKHYLDEIIEQISEFSKRVILADANLDKVLSAYNKHRDKPIREQAENIIHLFTLTNLGAPAAFKYFDTTIDRKRYTSTKEVLDATLIHQSITGLYETRIDLSQLGGDGGGGSGGLLGRDLLTKLKAQIQFSTEGPQVTWEDRPAMCLVLNLEEEYRLHEKPVPPSIDPSWLQLFPMVWAEKAGMGLANQVPPVVVELKSDASPVAVRQYPMSKEAREGIRPHIQRFLDLGILVPCQSPWNTPLLPVKKPGTNDYRPVQDLREVNKRVQDIHPTVPNPYNLLSSLPPSHTWYSVLDLKDAFFCLKLHPNSQPLFAFEWRDPEKGNTGQLTWTRLPQGFKNSPTLFNEALHRDLASFRALNPQVVMLQYVDDLLVAAPTYRDCKEGTRRLLQELSKLGYRVSAKKAQLCREEVTYLGYLLKGGKRWLTPARKATVMKIPTPTTPRQVREFLGKAGFCRLFIPGFASLAAPLYPLTRPKVPFTWTEAHQEAFGRIKEALLSAPALALPDLTKPFALYVDEKEGVARGVLTQTLGPWRRPVAYLSKKLDPVASGWPTCLKAIAAVALLLKDADKLTLGQNVLVIAPHNLESIVRQPPDRWMTNARMTHYQSLLLNERVSFAPPAILNPATLLPVESDDTPIHICSEILAEETGTRPDLRDQPLPGVPAWYTDGSSFIMDGRRQAGAAIVDNKRTVWASNLPEGTSAQKAELIALTQALRLAEGKSINIYTDSRYAFATAHVHGAIYKQRGWLTSAGKDIKNKEEILALLEAIHLPKRVAIIHCPGHQRGTDPVATGNRKADEAAKQAAQSTRILTETTKNAGKRTADGSEFEKRTADGSEFESPKKKAKVE

SEQ ID NO: 1676 - protein, 2122 aa, synthetic construct
MPAAKRVKLDGGDKKYSIGLDIGTNSVGWAVITDEYKVPSKKFKVLGNTDRHSIKKNLIGALLFDSGETAEATRLKRTARRRYTRRKNRICYLQEIFSNEMAKVDDSFFHRLEESFLVEEDKKHERHPIFGNIVDEVAYHEKYPTIYHLRKKLVDSTDKADLRLIYLALAHMIKFRGHFLIEGDLNPDNSDVDKLFIQLVQTYNQLFEENPINASGVDAKAILSARLSKSRRLENLIAQLPGEKKNGLFGNLIALSLGLTPNFKSNFDLAEDAKLQLSKDTYDDDLDNLLAQIGDQYADLFLAAKNLSDAILLSDILRVNTEITKAPLSASMIKRYDEHHQDLTLLKALVRQQLPEKYKEIFFDQSKNGYAGYIDGGASQEEFYKFIKPILEKMDGTEELLVKLNREDLLRKQRTFDNGSIPHQIHLGELHAILRRQEDFYPFLKDNREKIEKILTFRIPYYVGPLARGNSRFAWMTRKSEETITPWNFEEVVDKGASAQSFIERMTNFDKNLPNEKVLPKHSLLYEYFTVYNELTKVKYVTEGMRKPAFLSGEQKKAIVDLLFKTNRKVTVKQLKEDYFKKIECFDSVEISGVEDRFNASLGTYHDLLKIIKDKDFLDNEENEDILEDIVLTLTLFEDREMIEERLKTYAHLFDDKVMKQLKRRRYTGWGRLSRKLINGIRDKQSGKTILDFLKSDGFANRNFMQLIHDDSLTFKEDIQKAQVSGQGDSLHEHIANLAGSPAIKKGILQTVKVVDELVKVMGRHKPENIVIEMARENQTTQKGQKNSRERMKRIEEGIKELGSQILKEHPVENTQLQNEKLYLYYLQNGRDMYVDQELDINRLSDYDVDHIVPQSFLKDDSIDNKVLTRSDKARGKSDNVPSEEVVKKMKNYWRQLLNAKLITQRKFDNLTKAERGGLSELDKAGFIKRQLVETRQITKHVAQILDSRMNTKYDENDKLIREVKVITLKSKLVSDFRKDFQFYKVREINNYHHAHDAYLNAVVGTALIKKYPKLESEFVYGDYKVYDVRKMIAKSEQEIGKATAKYFFYSNIMNFFKTEITLANGEIRKRPLIETNGETGEIVWDKGRDFATVRKVLSMPQVNIVKKTEVQTGGFSKESILPKRNSDKLIARKKDWDPKKYGGFDSPTVAYSVLVVAKVEKGKSKKLKSVKELLGITIMERSSFEKNPIDFLEAKGYKEVKKDLIIKLPKYSLFELENGRKRMLASAGELQKGNELALPSKYVNFLYLASHYEKLKGSPEDNEQKQLFVEQHKHYLDEIIEQISEFSKRVILADANLDKVLSAYNKHRDKPIREQAENIIHLFTLTNLGAPAAFKYFDTTIDRKRYTSTKEVLDATLIHQSITGLYETRIDLSQLGGDGGGGGGSSGGLLGRDLLTKLKAQIQFSTEGPQVTWEDRPAMCLVLNLEEEYRLHEKPVPPSIDPSWLQLFPMVWAEKAGMGLANQVPPVVVELKSDASPVAVRQYPMSKEAREGIRPHIQRFLDLGILVPCQSPWNTPLLPVKKPGTNDYRPVQDLREVNKRVQDIHPTVPNPYNLLSSLPPSHTWYSVLDLKDAFFCLKLHPNSQPLFAFEWRDPEKGNTGQLTWTRLPQGFKNSPTLFNEALHRDLASFRALNPQVVMLQYVDDLLVAAPTYRDCKEGTRRLLQELSKLGYRVSAKKAQLCREEVTYLGYLLKGGKRWLTPARKATVMKIPTPTTPRQVREFLGKAGFCRLFIPGFASLAAPLYPLTRPKVPFTWTEAHQEAFGRIKEALLSAPALALPDLTKPFALYVDEKEGVARGVLTQTLGPWRRPVAYLSKKLDPVASGWPTCLKAIAAVALLLKDADKLTLGQNVLVIAPHNLESIVRQPPDRWMTNARMTHYQSLLLNERVSFAPPAILNPATLLPVESDDTPIHICSEILAEETGTRPDLRDQPLPGVPAWYTDGSSFIMDGRRQAGAAIVDNKRTVWASNLPEGTSAQKAELIALTQALRLAEGKSINIYTDSRYAFATAHVHGAIYKQRGWLTSAGKDIKNKEEILALLEAIHLPKRVAIIHCPGHQRGTDPVATGNRKADEAAKQAAQSTRILTETTKNAGKRTADGSEFEKRTADGSEFESPKKKAKVE

SEQ ID NO: 1677 - protein, 2127 aa, synthetic construct
MPAAKRVKLDGGDKKYSIGLDIGTNSVGWAVITDEYKVPSKKFKVLGNTDRHSIKKNLIGALLFDSGETAEATRLKRTARRRYTRRKNRICYLQEIFSNEMAKVDDSFFHRLEESFLVEEDKKHERHPIFGNIVDEVAYHEKYPTIYHLRKKLVDSTDKADLRLIYLALAHMIKFRGHFLIEGDLNPDNSDVDKLFIQLVQTYNQLFEENPINASGVDAKAILSARLSKSRRLENLIAQLPGEKKNGLFGNLIALSLGLTPNFKSNFDLAEDAKLQLSKDTYDDDLDNLLAQIGDQYADLFLAAKNLSDAILLSDILRVNTEITKAPLSASMIKRYDEHHQDLTLLKALVRQQLPEKYKEIFFDQSKNGYAGYIDGGASQEEFYKFIKPILEKMDGTEELLVKLNREDLLRKQRTFDNGSIPHQIHLGELHAILRRQEDFYPFLKDNREKIEKILTFRIPYYVGPLARGNSRFAWMTRKSEETITPWNFEEVVDKGASAQSFIERMTNFDKNLPNEKVLPKHSLLYEYFTVYNELTKVKYVTEGMRKPAFLSGEQKKAIVDLLFKTNRKVTVKQLKEDYFKKIECFDSVEISGVEDRFNASLGTYHDLLKIIKDKDFLDNEENEDILEDIVLTLTLFEDREMIEERLKTYAHLFDDKVMKQLKRRRYTGWGRLSRKLINGIRDKQSGKTILDFLKSDGFANRNFMQLIHDDSLTFKEDIQKAQVSGQGDSLHEHIANLAGSPAIKKGILQTVKVVDELVKVMGRHKPENIVIEMARENQTTQKGQKNSRERMKRIEEGIKELGSQILKEHPVENTQLQNEKLYLYYLQNGRDMYVDQELDINRLSDYDVDHIVPQSFLKDDSIDNKVLTRSDKARGKSDNVPSEEVVKKMKNYWRQLLNAKLITQRKFDNLTKAERGGLSELDKAGFIKRQLVETRQITKHVAQILDSRMNTKYDENDKLIREVKVITLKSKLVSDFRKDFQFYKVREINNYHHAHDAYLNAVVGTALIKKYPKLESEFVYGDYKVYDVRKMIAKSEQEIGKATAKYFFYSNIMNFFKTEITLANGEIRKRPLIETNGETGEIVWDKGRDFATVRKVLSMPQVNIVKKTEVQTGGFSKESILPKRNSDKLIARKKDWDPKKYGGFDSPTVAYSVLVVAKVEKGKSKKLKSVKELLGITIMERSSFEKNPIDFLEAKGYKEVKKDLIIKLPKYSLFELENGRKRMLASAGELQKGNELALPSKYVNFLYLASHYEKLKGSPEDNEQKQLFVEQHKHYLDEIIEQISEFSKRVILADANLDKVLSAYNKHRDKPIREQAENIIHLFTLTNLGAPAAFKYFDTTIDRKRYTSTKEVLDATLIHQSITGLYETRIDLSQLGGDGGEAAAKGGGGSSGGLLGRDLLTKLKAQIQFSTEGPQVTWEDRPAMCLVLNLEEEYRLHEKPVPPSIDPSWLQLFPMVWAEKAGMGLANQVPPVVVELKSDASPVAVRQYPMSKEAREGIRPHIQRFLDLGILVPCQSPWNTPLLPVKKPGTNDYRPVQDLREVNKRVQDIHPTVPNPYNLLSSLPPSHTWYSVLDLKDAFFCLKLHPNSQPLFAFEWRDPEKGNTGQLTWTRLPQGFKNSPTLFNEALHRDLASFRALNPQVVMLQYVDDLLVAAPTYRDCKEGTRRLLQELSKLGYRVSAKKAQLCREEVTYLGYLLKGGKRWLTPARKATVMKIPTPTTPRQVREFLGKAGFCRLFIPGFASLAAPLYPLTRPKVPFTWTEAHQEAFGRIKEALLSAPALALPDLTKPFALYVDEKEGVARGVLTQTLGPWRRPVAYLSKKLDPVASGWPTCLKAIAAVALLLKDADKLTLGQNVLVIAPHNLESIVRQPPDRWMTNARMTHYQSLLLNERVSFAPPAILNPATLLPVESDDTPIHICSEILAEETGTRPDLRDQPLPGVPAWYTDGSSFIMDGRRQAGAAIVDNKRTVWASNLPEGTSAQKAELIALTQALRLAEGKSINIYTDSRYAFATAHVHGAIYKQRGWLTSAGKDIKNKEEILALLEAIHLPKRVAIIHCPGHQRGTDPVATGNRKADEAAKQAAQSTRILTETTKNAGKRTADGSEFEKRTADGSEFESPKKKAKVE

SEQ ID NO: 1678 - protein, 2128 aa, synthetic construct
MPAAKRVKLDGGDKKYSIGLDIGTNSVGWAVITDEYKVPSKKFKVLGNTDRHSIKKNLIGALLFDSGETAEATRLKRTARRRYTRRKNRICYLQEIFSNEMAKVDDSFFHRLEESFLVEEDKKHERHPIFGNIVDEVAYHEKYPTIYHLRKKLVDSTDKADLRLIYLALAHMIKFRGHFLIEGDLNPDNSDVDKLFIQLVQTYNQLFEENPINASGVDAKAILSARLSKSRRLENLIAQLPGEKKNGLFGNLIALSLGLTPNFKSNFDLAEDAKLQLSKDTYDDDLDNLLAQIGDQYADLFLAAKNLSDAILLSDILRVNTEITKAPLSASMIKRYDEHHQDLTLLKALVRQQLPEKYKEIFFDQSKNGYAGYIDGGASQEEFYKFIKPILEKMDGTEELLVKLNREDLLRKQRTFDNGSIPHQIHLGELHAILRRQEDFYPFLKDNREKIEKILTFRIPYYVGPLARGNSRFAWMTRKSEETITPWNFEEVVDKGASAQSFIERMTNFDKNLPNEKVLPKHSLLYEYFTVYNELTKVKYVTEGMRKPAFLSGEQKKAIVDLLFKTNRKVTVKQLKEDYFKKIECFDSVEISGVEDRFNASLGTYHDLLKIIKDKDFLDNEENEDILEDIVLTLTLFEDREMIEERLKTYAHLFDDKVMKQLKRRRYTGWGRLSRKLINGIRDKQSGKTILDFLKSDGFANRNFMQLIHDDSLTFKEDIQKAQVSGQGDSLHEHIANLAGSPAIKKGILQTVKVVDELVKVMGRHKPENIVIEMARENQTTQKGQKNSRERMKRIEEGIKELGSQILKEHPVENTQLQNEKLYLYYLQNGRDMYVDQELDINRLSDYDVDHIVPQSFLKDDSIDNKVLTRSDKARGKSDNVPSEEVVKKMKNYWRQLLNAKLITQRKFDNLTKAERGGLSELDKAGFIKRQLVETRQITKHVAQILDSRMNTKYDENDKLIREVKVITLKSKLVSDFRKDFQFYKVREINNYHHAHDAYLNAVVGTALIKKYPKLESEFVYGDYKVYDVRKMIAKSEQEIGKATAKYFFYSNIMNFFKTEITLANGEIRKRPLIETNGETGEIVWDKGRDFATVRKVLSMPQVNIVKKTEVQTGGFSKESILPKRNSDKLIARKKDWDPKKYGGFDSPTVAYSVLVVAKVEKGKSKKLKSVKELLGITIMERSSFEKNPIDFLEAKGYKEVKKDLIIKLPKYSLFELENGRKRMLASAGELQKGNELALPSKYVNFLYLASHYEKLKGSPEDNEQKQLFVEQHKHYLDEIIEQISEFSKRVILADANLDKVLSAYNKHRDKPIREQAENIIHLFTLTNLGAPAAFKYFDTTIDRKRYTSTKEVLDATLIHQSITGLYETRIDLSQLGGDGGGGSGGSGGSGGSGGLLGRDLLTKLKAQIQFSTEGPQVTWEDRPAMCLVLNLEEEYRLHEKPVPPSIDPSWLQLFPMVWAEKAGMGLANQVPPVVVELKSDASPVAVRQYPMSKEAREGIRPHIQRFLDLGILVPCQSPWNTPLLPVKKPGTNDYRPVQDLREVNKRVQDIHPTVPNPYNLLSSLPPSHTWYSVLDLKDAFFCLKLHPNSQPLFAFEWRDPEKGNTGQLTWTRLPQGFKNSPTLFNEALHRDLASFRALNPQVVMLQYVDDLLVAAPTYRDCKEGTRRLLQELSKLGYRVSAKKAQLCREEVTYLGYLLKGGKRWLTPARKATVMKIPTPTTPRQVREFLGKAGFCRLFIPGFASLAAPLYPLTRPKVPFTWTEAHQEAFGRIKEALLSAPALALPDLTKPFALYVDEKEGVARGVLTQTLGPWRRPVAYLSKKLDPVASGWPTCLKAIAAVALLLKDADKLTLGQNVLVIAPHNLESIVRQPPDRWMTNARMTHYQSLLLNERVSFAPPAILNPATLLPVESDDTPIHICSEILAEETGTRPDLRDQPLPGVPAWYTDGSSFIMDGRRQAGAAIVDNKRTVWASNLPEGTSAQKAELIALTQALRLAEGKSINIYTDSRYAFATAHVHGAIYKQRGWLTSAGKDIKNKEEILALLEAIHLPKRVAIIHCPGHQRGTDPVATGNRKADEAAKQAAQSTRILTETTKNAGKRTADGSEFEKRTADGSEFESPKKKAKVE

SEQ ID NO: 1679 - protein, 2124 aa, synthetic construct
MPAAKRVKLDGGDKKYSIGLDIGTNSVGWAVITDEYKVPSKKFKVLGNTDRHSIKKNLIGALLFDSGETAEATRLKRTARRRYTRRKNRICYLQEIFSNEMAKVDDSFFHRLEESFLVEEDKKHERHPIFGNIVDEVAYHEKYPTIYHLRKKLVDSTDKADLRLIYLALAHMIKFRGHFLIEGDLNPDNSDVDKLFIQLVQTYNQLFEENPINASGVDAKAILSARLSKSRRLENLIAQLPGEKKNGLFGNLIALSLGLTPNFKSNFDLAEDAKLQLSKDTYDDDLDNLLAQIGDQYADLFLAAKNLSDAILLSDILRVNTEITKAPLSASMIKRYDEHHQDLTLLKALVRQQLPEKYKEIFFDQSKNGYAGYIDGGASQEEFYKFIKPILEKMDGTEELLVKLNREDLLRKQRTFDNGSIPHQIHLGELHAILRRQEDFYPFLKDNREKIEKILTFRIPYYVGPLARGNSRFAWMTRKSEETITPWNFEEVVDKGASAQSFIERMTNFDKNLPNEKVLPKHSLLYEYFTVYNELTKVKYVTEGMRKPAFLSGEQKKAIVDLLFKTNRKVTVKQLKEDYFKKIECFDSVEISGVEDRFNASLGTYHDLLKIIKDKDFLDNEENEDILEDIVLTLTLFEDREMIEERLKTYAHLFDDKVMKQLKRRRYTGWGRLSRKLINGIRDKQSGKTILDFLKSDGFANRNFMQLIHDDSLTFKEDIQKAQVSGQGDSLHEHIANLAGSPAIKKGILQTVKVVDELVKVMGRHKPENIVIEMARENQTTQKGQKNSRERMKRIEEGIKELGSQILKEHPVENTQLQNEKLYLYYLQNGRDMYVDQELDINRLSDYDVDHIVPQSFLKDDSIDNKVLTRSDKARGKSDNVPSEEVVKKMKNYWRQLLNAKLITQRKFDNLTKAERGGLSELDKAGFIKRQLVETRQITKHVAQILDSRMNTKYDENDKLIREVKVITLKSKLVSDFRKDFQFYKVREINNYHHAHDAYLNAVVGTALIKKYPKLESEFVYGDYKVYDVRKMIAKSEQEIGKATAKYFFYSNIMNFFKTEITLANGEIRKRPLIETNGETGEIVWDKGRDFATVRKVLSMPQVNIVKKTEVQTGGFSKESILPKRNSDKLIARKKDWDPKKYGGFDSPTVAYSVLVVAKVEKGKSKKLKSVKELLGITIMERSSFEKNPIDFLEAKGYKEVKKDLIIKLPKYSLFELENGRKRMLASAGELQKGNELALPSKYVNFLYLASHYEKLKGSPEDNEQKQLFVEQHKHYLDEIIEQISEFSKRVILADANLDKVLSAYNKHRDKPIREQAENIIHLFTLTNLGAPAAFKYFDTTIDRKRYTSTKEVLDATLIHQSITGLYETRIDLSQLGGDGGEAAAKGGSGGLLGRDLLTKLKAQIQFSTEGPQVTWEDRPAMCLVLNLEEEYRLHEKPVPPSIDPSWLQLFPMVWAEKAGMGLANQVPPVVVELKSDASPVAVRQYPMSKEAREGIRPHIQRFLDLGILVPCQSPWNTPLLPVKKPGTNDYRPVQDLREVNKRVQDIHPTVPNPYNLLSSLPPSHTWYSVLDLKDAFFCLKLHPNSQPLFAFEWRDPEKGNTGQLTWTRLPQGFKNSPTLFNEALHRDLASFRALNPQVVMLQYVDDLLVAAPTYRDCKEGTRRLLQELSKLGYRVSAKKAQLCREEVTYLGYLLKGGKRWLTPARKATVMKIPTPTTPRQVREFLGKAGFCRLFIPGFASLAAPLYPLTRPKVPFTWTEAHQEAFGRIKEALLSAPALALPDLTKPFALYVDEKEGVARGVLTQTLGPWRRPVAYLSKKLDPVASGWPTCLKAIAAVALLLKDADKLTLGQNVLVIAPHNLESIVRQPPDRWMTNARMTHYQSLLLNERVSFAPPAILNPATLLPVESDDTPIHICSEILAEETGTRPDLRDQPLPGVPAWYTDGSSFIMDGRRQAGAAIVDNKRTVWASNLPEGTSAQKAELIALTQALRLAEGKSINIYTDSRYAFATAHVHGAIYKQRGWLTSAGKDIKNKEEILALLEAIHLPKRVAIIHCPGHQRGTDPVATGNRKADEAAKQAAQSTRILTETTKNAGKRTADGSEFEKRTADGSEFESPKKKAKVE

SEQ ID NO: 1680 - protein, 2123 aa, synthetic construct
MPAAKRVKLDGGDKKYSIGLDIGTNSVGWAVITDEYKVPSKKFKVLGNTDRHSIKKNLIGALLFDSGETAEATRLKRTARRRYTRRKNRICYLQEIFSNEMAKVDDSFFHRLEESFLVEEDKKHERHPIFGNIVDEVAYHEKYPTIYHLRKKLVDSTDKADLRLIYLALAHMIKFRGHFLIEGDLNPDNSDVDKLFIQLVQTYNQLFEENPINASGVDAKAILSARLSKSRRLENLIAQLPGEKKNGLFGNLIALSLGLTPNFKSNFDLAEDAKLQLSKDTYDDDLDNLLAQIGDQYADLFLAAKNLSDAILLSDILRVNTEITKAPLSASMIKRYDEHHQDLTLLKALVRQQLPEKYKEIFFDQSKNGYAGYIDGGASQEEFYKFIKPILEKMDGTEELLVKLNREDLLRKQRTFDNGSIPHQIHLGELHAILRRQEDFYPFLKDNREKIEKILTFRIPYYVGPLARGNSRFAWMTRKSEETITPWNFEEVVDKGASAQSFIERMTNFDKNLPNEKVLPKHSLLYEYFTVYNELTKVKYVTEGMRKPAFLSGEQKKAIVDLLFKTNRKVTVKQLKEDYFKKIECFDSVEISGVEDRFNASLGTYHDLLKIIKDKDFLDNEENEDILEDIVLTLTLFEDREMIEERLKTYAHLFDDKVMKQLKRRRYTGWGRLSRKLINGIRDKQSGKTILDFLKSDGFANRNFMQLIHDDSLTFKEDIQKAQVSGQGDSLHEHIANLAGSPAIKKGILQTVKVVDELVKVMGRHKPENIVIEMARENQTTQKGQKNSRERMKRIEEGIKELGSQILKEHPVENTQLQNEKLYLYYLQNGRDMYVDQELDINRLSDYDVDHIVPQSFLKDDSIDNKVLTRSDKARGKSDNVPSEEVVKKMKNYWRQLLNAKLITQRKFDNLTKAERGGLSELDKAGFIKRQLVETRQITKHVAQILDSRMNTKYDENDKLIREVKVITLKSKLVSDFRKDFQFYKVREINNYHHAHDAYLNAVVGTALIKKYPKLESEFVYGDYKVYDVRKMIAKSEQEIGKATAKYFFYSNIMNFFKTEITLANGEIRKRPLIETNGETGEIVWDKGRDFATVRKVLSMPQVNIVKKTEVQTGGFSKESILPKRNSDKLIARKKDWDPKKYGGFDSPTVAYSVLVVAKVEKGKSKKLKSVKELLGITIMERSSFEKNPIDFLEAKGYKEVKKDLIIKLPKYSLFELENGRKRMLASAGELQKGNELALPSKYVNFLYLASHYEKLKGSPEDNEQKQLFVEQHKHYLDEIIEQISEFSKRVILADANLDKVLSAYNKHRDKPIREQAENIIHLFTLTNLGAPAAFKYFDTTIDRKRYTSTKEVLDATLIHQSITGLYETRIDLSQLGGDGGPAPAPAPGGLLGRDLLTKLKAQIQFSTEGPQVTWEDRPAMCLVLNLEEEYRLHEKPVPPSIDPSWLQLFPMVWAEKAGMGLANQVPPVVVELKSDASPVAVRQYPMSKEAREGIRPHIQRFLDLGILVPCQSPWNTPLLPVKKPGTNDYRPVQDLREVNKRVQDIHPTVPNPYNLLSSLPPSHTWYSVLDLKDAFFCLKLHPNSQPLFAFEWRDPEKGNTGQLTWTRLPQGFKNSPTLFNEALHRDLASFRALNPQVVMLQYVDDLLVAAPTYRDCKEGTRRLLQELSKLGYRVSAKKAQLCREEVTYLGYLLKGGKRWLTPARKATVMKIPTPTTPRQVREFLGKAGFCRLFIPGFASLAAPLYPLTRPKVPFTWTEAHQEAFGRIKEALLSAPALALPDLTKPFALYVDEKEGVARGVLTQTLGPWRRPVAYLSKKLDPVASGWPTCLKAIAAVALLLKDADKLTLGQNVLVIAPHNLESIVRQPPDRWMTNARMTHYQSLLLNERVSFAPPAILNPATLLPVESDDTPIHICSEILAEETGTRPDLRDQPLPGVPAWYTDGSSFIMDGRRQAGAAIVDNKRTVWASNLPEGTSAQKAELIALTQALRLAEGKSINIYTDSRYAFATAHVHGAIYKQRGWLTSAGKDIKNKEEILALLEAIHLPKRVAIIHCPGHQRGTDPVATGNRKADEAAKQAAQSTRILTETTKNAGKRTADGSEFEKRTADGSEFESPKKKAKVE

SEQ ID NO: 1681 - protein, 2131 aa, synthetic construct
MPAAKRVKLDGGDKKYSIGLDIGTNSVGWAVITDEYKVPSKKFKVLGNTDRHSIKKNLIGALLFDSGETAEATRLKRTARRRYTRRKNRICYLQEIFSNEMAKVDDSFFHRLEESFLVEEDKKHERHPIFGNIVDEVAYHEKYPTIYHLRKKLVDSTDKADLRLIYLALAHMIKFRGHFLIEGDLNPDNSDVDKLFIQLVQTYNQLFEENPINASGVDAKAILSARLSKSRRLENLIAQLPGEKKNGLFGNLIALSLGLTPNFKSNFDLAEDAKLQLSKDTYDDDLDNLLAQIGDQYADLFLAAKNLSDAILLSDILRVNTEITKAPLSASMIKRYDEHHQDLTLLKALVRQQLPEKYKEIFFDQSKNGYAGYIDGGASQEEFYKFIKPILEKMDGTEELLVKLNREDLLRKQRTFDNGSIPHQIHLGELHAILRRQEDFYPFLKDNREKIEKILTFRIPYYVGPLARGNSRFAWMTRKSEETITPWNFEEVVDKGASAQSFIERMTNFDKNLPNEKVLPKHSLLYEYFTVYNELTKVKYVTEGMRKPAFLSGEQKKAIVDLLFKTNRKVTVKQLKEDYFKKIECFDSVEISGVEDRFNASLGTYHDLLKIIKDKDFLDNEENEDILEDIVLTLTLFEDREMIEERLKTYAHLFDDKVMKQLKRRRYTGWGRLSRKLINGIRDKQSGKTILDFLKSDGFANRNFMQLIHDDSLTFKEDIQKAQVSGQGDSLHEHIANLAGSPAIKKGILQTVKVVDELVKVMGRHKPENIVIEMARENQTTQKGQKNSRERMKRIEEGIKELGSQILKEHPVENTQLQNEKLYLYYLQNGRDMYVDQELDINRLSDYDVDHIVPQSFLKDDSIDNKVLTRSDKARGKSDNVPSEEVVKKMKNYWRQLLNAKLITQRKFDNLTKAERGGLSELDKAGFIKRQLVETRQITKHVAQILDSRMNTKYDENDKLIREVKVITLKSKLVSDFRKDFQFYKVREINNYHHAHDAYLNAVVGTALIKKYPKLESEFVYGDYKVYDVRKMIAKSEQEIGKATAKYFFYSNIMNFFKTEITLANGEIRKRPLIETNGETGEIVWDKGRDFATVRKVLSMPQVNIVKKTEVQTGGFSKESILPKRNSDKLIARKKDWDPKKYGGFDSPTVAYSVLVVAKVEKGKSKKLKSVKELLGITIMERSSFEKNPIDFLEAKGYKEVKKDLIIKLPKYSLFELENGRKRMLASAGELQKGNELALPSKYVNFLYLASHYEKLKGSPEDNEQKQLFVEQHKHYLDEIIEQISEFSKRVILADANLDKVLSAYNKHRDKPIREQAENIIHLFTLTNLGAPAAFKYFDTTIDRKRYTSTKEVLDATLIHQSITGLYETRIDLSQLGGDGGGSSGSSGSSGSSGSSGGLLGRDLLTKLKAQIQFSTEGPQVTWEDRPAMCLVLNLEEEYRLHEKPVPPSIDPSWLQLFPMVWAEKAGMGLANQVPPVVVELKSDASPVAVRQYPMSKEAREGIRPHIQRFLDLGILVPCQSPWNTPLLPVKKPGTNDYRPVQDLREVNKRVQDIHPTVPNPYNLLSSLPPSHTWYSVLDLKDAFFCLKLHPNSQPLFAFEWRDPEKGNTGQLTWTRLPQGFKNSPTLFNEALHRDLASFRALNPQVVMLQYVDDLLVAAPTYRDCKEGTRRLLQELSKLGYRVSAKKAQLCREEVTYLGYLLKGGKRWLTPARKATVMKIPTPTTPRQVREFLGKAGFCRLFIPGFASLAAPLYPLTRPKVPFTWTEAHQEAFGRIKEALLSAPALALPDLTKPFALYVDEKEGVARGVLTQTLGPWRRPVAYLSKKLDPVASGWPTCLKAIAAVALLLKDADKLTLGQNVLVIAPHNLESIVRQPPDRWMTNARMTHYQSLLLNERVSFAPPAILNPATLLPVESDDTPIHICSEILAEETGTRPDLRDQPLPGVPAWYTDGSSFIMDGRRQAGAAIVDNKRTVWASNLPEGTSAQKAELIALTQALRLAEGKSINIYTDSRYAFATAHVHGAIYKQRGWLTSAGKDIKNKEEILALLEAIHLPKRVAIIHCPGHQRGTDPVATGNRKADEAAKQAAQSTRILTETTKNAGKRTADGSEFEKRTADGSEFESPKKKAKVE

SEQ ID NO: 1682 - protein, 2127 aa, synthetic construct
MPAAKRVKLDGGDKKYSIGLDIGTNSVGWAVITDEYKVPSKKFKVLGNTDRHSIKKNLIGALLFDSGETAEATRLKRTARRRYTRRKNRICYLQEIFSNEMAKVDDSFFHRLEESFLVEEDKKHERHPIFGNIVDEVAYHEKYPTIYHLRKKLVDSTDKADLRLIYLALAHMIKFRGHFLIEGDLNPDNSDVDKLFIQLVQTYNQLFEENPINASGVDAKAILSARLSKSRRLENLIAQLPGEKKNGLFGNLIALSLGLTPNFKSNFDLAEDAKLQLSKDTYDDDLDNLLAQIGDQYADLFLAAKNLSDAILLSDILRVNTEITKAPLSASMIKRYDEHHQDLTLLKALVRQQLPEKYKEIFFDQSKNGYAGYIDGGASQEEFYKFIKPILEKMDGTEELLVKLNREDLLRKQRTFDNGSIPHQIHLGELHAILRRQEDFYPFLKDNREKIEKILTFRIPYYVGPLARGNSRFAWMTRKSEETITPWNFEEVVDKGASAQSFIERMTNFDKNLPNEKVLPKHSLLYEYFTVYNELTKVKYVTEGMRKPAFLSGEQKKAIVDLLFKTNRKVTVKQLKEDYFKKIECFDSVEISGVEDRFNASLGTYHDLLKIIKDKDFLDNEENEDILEDIVLTLTLFEDREMIEERLKTYAHLFDDKVMKQLKRRRYTGWGRLSRKLINGIRDKQSGKTILDFLKSDGFANRNFMQLIHDDSLTFKEDIQKAQVSGQGDSLHEHIANLAGSPAIKKGILQTVKVVDELVKVMGRHKPENIVIEMARENQTTQKGQKNSRERMKRIEEGIKELGSQILKEHPVENTQLQNEKLYLYYLQNGRDMYVDQELDINRLSDYDVDHIVPQSFLKDDSIDNKVLTRSDKARGKSDNVPSEEVVKKMKNYWRQLLNAKLITQRKFDNLTKAERGGLSELDKAGFIKRQLVETRQITKHVAQILDSRMNTKYDENDKLIREVKVITLKSKLVSDFRKDFQFYKVREINNYHHAHDAYLNAVVGTALIKKYPKLESEFVYGDYKVYDVRKMIAKSEQEIGKATAKYFFYSNIMNFFKTEITLANGEIRKRPLIETNGETGEIVWDKGRDFATVRKVLSMPQVNIVKKTEVQTGGFSKESILPKRNSDKLIARKKDWDPKKYGGFDSPTVAYSVLVVAKVEKGKSKKLKSVKELLGITIMERSSFEKNPIDFLEAKGYKEVKKDLIIKLPKYSLFELENGRKRMLASAGELQKGNELALPSKYVNFLYLASHYEKLKGSPEDNEQKQLFVEQHKHYLDEIIEQISEFSKRVILADANLDKVLSAYNKHRDKPIREQAENIIHLFTLTNLGAPAAFKYFDTTIDRKRYTSTKEVLDATLIHQSITGLYETRIDLSQLGGDGGGGGGGSEAAAKGGLLGRDLLTKLKAQIQFSTEGPQVTWEDRPAMCLVLNLEEEYRLHEKPVPPSIDPSWLQLFPMVWAEKAGMGLANQVPPVVVELKSDASPVAVRQYPMSKEAREGIRPHIQRFLDLGILVPCQSPWNTPLLPVKKPGTNDYRPVQDLREVNKRVQDIHPTVPNPYNLLSSLPPSHTWYSVLDLKDAFFCLKLHPNSQPLFAFEWRDPEKGNTGQLTWTRLPQGFKNSPTLFNEALHRDLASFRALNPQVVMLQYVDDLLVAAPTYRDCKEGTRRLLQELSKLGYRVSAKKAQLCREEVTYLGYLLKGGKRWLTPARKATVMKIPTPTTPRQVREFLGKAGFCRLFIPGFASLAAPLYPLTRPKVPFTWTEAHQEAFGRIKEALLSAPALALPDLTKPFALYVDEKEGVARGVLTQTLGPWRRPVAYLSKKLDPVASGWPTCLKAIAAVALLLKDADKLTLGQNVLVIAPHNLESIVRQPPDRWMTNARMTHYQSLLLNERVSFAPPAILNPATLLPVESDDTPIHICSEILAEETGTRPDLRDQPLPGVPAWYTDGSSFIMDGRRQAGAAIVDNKRTVWASNLPEGTSAQKAELIALTQALRLAEGKSINIYTDSRYAFATAHVHGAIYKQRGWLTSAGKDIKNKEEILALLEAIHLPKRVAIIHCPGHQRGTDPVATGNRKADEAAKQAAQSTRILTETTKNAGKRTADGSEFEKRTADGSEFESPKKKAKVE

SEQ ID NO: 1683 - protein, 2125 aa, synthetic construct
MPAAKRVKLDGGDKKYSIGLDIGTNSVGWAVITDEYKVPSKKFKVLGNTDRHSIKKNLIGALLFDSGETAEATRLKRTARRRYTRRKNRICYLQEIFSNEMAKVDDSFFHRLEESFLVEEDKKHERHPIFGNIVDEVAYHEKYPTIYHLRKKLVDSTDKADLRLIYLALAHMIKFRGHFLIEGDLNPDNSDVDKLFIQLVQTYNQLFEENPINASGVDAKAILSARLSKSRRLENLIAQLPGEKKNGLFGNLIALSLGLTPNFKSNFDLAEDAKLQLSKDTYDDDLDNLLAQIGDQYADLFLAAKNLSDAILLSDILRVNTEITKAPLSASMIKRYDEHHQDLTLLKALVRQQLPEKYKEIFFDQSKNGYAGYIDGGASQEEFYKFIKPILEKMDGTEELLVKLNREDLLRKQRTFDNGSIPHQIHLGELHAILRRQEDFYPFLKDNREKIEKILTFRIPYYVGPLARGNSRFAWMTRKSEETITPWNFEEVVDKGASAQSFIERMTNFDKNLPNEKVLPKHSLLYEYFTVYNELTKVKYVTEGMRKPAFLSGEQKKAIVDLLFKTNRKVTVKQLKEDYFKKIECFDSVEISGVEDRFNASLGTYHDLLKIIKDKDFLDNEENEDILEDIVLTLTLFEDREMIEERLKTYAHLFDDKVMKQLKRRRYTGWGRLSRKLINGIRDKQSGKTILDFLKSDGFANRNFMQLIHDDSLTFKEDIQKAQVSGQGDSLHEHIANLAGSPAIKKGILQTVKVVDELVKVMGRHKPENIVIEMARENQTTQKGQKNSRERMKRIEEGIKELGSQILKEHPVENTQLQNEKLYLYYLQNGRDMYVDQELDINRLSDYDVDHIVPQSFLKDDSIDNKVLTRSDKARGKSDNVPSEEVVKKMKNYWRQLLNAKLITQRKFDNLTKAERGGLSELDKAGFIKRQLVETRQITKHVAQILDSRMNTKYDENDKLIREVKVITLKSKLVSDFRKDFQFYKVREINNYHHAHDAYLNAVVGTALIKKYPKLESEFVYGDYKVYDVRKMIAKSEQEIGKATAKYFFYSNIMNFFKTEITLANGEIRKRPLIETNGETGEIVWDKGRDFATVRKVLSMPQVNIVKKTEVQTGGFSKESILPKRNSDKLIARKKDWDPKKYGGFDSPTVAYSVLVVAKVEKGKSKKLKSVKELLGITIMERSSFEKNPIDFLEAKGYKEVKKDLIIKLPKYSLFELENGRKRMLASAGELQKGNELALPSKYVNFLYLASHYEKLKGSPEDNEQKQLFVEQHKHYLDEIIEQISEFSKRVILADANLDKVLSAYNKHRDKPIREQAENIIHLFTLTNLGAPAAFKYFDTTIDRKRYTSTKEVLDATLIHQSITGLYETRIDLSQLGGDGGPAPGGSGSSGGLLGRDLLTKLKAQIQFSTEGPQVTWEDRPAMCLVLNLEEEYRLHEKPVPPSIDPSWLQLFPMVWAEKAGMGLANQVPPVVVELKSDASPVAVRQYPMSKEAREGIRPHIQRFLDLGILVPCQSPWNTPLLPVKKPGTNDYRPVQDLREVNKRVQDIHPTVPNPYNLLSSLPPSHTWYSVLDLKDAFFCLKLHPNSQPLFAFEWRDPEKGNTGQLTWTRLPQGFKNSPTLFNEALHRDLASFRALNPQVVMLQYVDDLLVAAPTYRDCKEGTRRLLQELSKLGYRVSAKKAQLCREEVTYLGYLLKGGKRWLTPARKATVMKIPTPTTPRQVREFLGKAGFCRLFIPGFASLAAPLYPLTRPKVPFTWTEAHQEAFGRIKEALLSAPALALPDLTKPFALYVDEKEGVARGVLTQTLGPWRRPVAYLSKKLDPVASGWPTCLKAIAAVALLLKDADKLTLGQNVLVIAPHNLESIVRQPPDRWMTNARMTHYQSLLLNERVSFAPPAILNPATLLPVESDDTPIHICSEILAEETGTRPDLRDQPLPGVPAWYTDGSSFIMDGRRQAGAAIVDNKRTVWASNLPEGTSAQKAELIALTQALRLAEGKSINIYTDSRYAFATAHVHGAIYKQRGWLTSAGKDIKNKEEILALLEAIHLPKRVAIIHCPGHQRGTDPVATGNRKADEAAKQAAQSTRILTETTKNAGKRTADGSEFEKRTADGSEFESPKKKAKVE

SEQ ID NO: 1684 - protein, 2127 aa, synthetic construct
MPAAKRVKLDGGDKKYSIGLDIGTNSVGWAVITDEYKVPSKKFKVLGNTDRHSIKKNLIGALLFDSGETAEATRLKRTARRRYTRRKNRICYLQEIFSNEMAKVDDSFFHRLEESFLVEEDKKHERHPIFGNIVDEVAYHEKYPTIYHLRKKLVDSTDKADLRLIYLALAHMIKFRGHFLIEGDLNPDNSDVDKLFIQLVQTYNQLFEENPINASGVDAKAILSARLSKSRRLENLIAQLPGEKKNGLFGNLIALSLGLTPNFKSNFDLAEDAKLQLSKDTYDDDLDNLLAQIGDQYADLFLAAKNLSDAILLSDILRVNTEITKAPLSASMIKRYDEHHQDLTLLKALVRQQLPEKYKEIFFDQSKNGYAGYIDGGASQEEFYKFIKPILEKMDGTEELLVKLNREDLLRKQRTFDNGSIPHQIHLGELHAILRRQEDFYPFLKDNREKIEKILTFRIPYYVGPLARGNSRFAWMTRKSEETITPWNFEEVVDKGASAQSFIERMTNFDKNLPNEKVLPKHSLLYEYFTVYNELTKVKYVTEGMRKPAFLSGEQKKAIVDLLFKTNRKVTVKQLKEDYFKKIECFDSVEISGVEDRFNASLGTYHDLLKIIKDKDFLDNEENEDILEDIVLTLTLFEDREMIEERLKTYAHLFDDKVMKQLKRRRYTGWGRLSRKLINGIRDKQSGKTILDFLKSDGFANRNFMQLIHDDSLTFKEDIQKAQVSGQGDSLHEHIANLAGSPAIKKGILQTVKVVDELVKVMGRHKPENIVIEMARENQTTQKGQKNSRERMKRIEEGIKELGSQILKEHPVENTQLQNEKLYLYYLQNGRDMYVDQELDINRLSDYDVDHIVPQSFLKDDSIDNKVLTRSDKARGKSDNVPSEEVVKKMKNYWRQLLNAKLITQRKFDNLTKAERGGLSELDKAGFIKRQLVETRQITKHVAQILDSRMNTKYDENDKLIREVKVITLKSKLVSDFRKDFQFYKVREINNYHHAHDAYLNAVVGTALIKKYPKLESEFVYGDYKVYDVRKMIAKSEQEIGKATAKYFFYSNIMNFFKTEITLANGEIRKRPLIETNGETGEIVWDKGRDFATVRKVLSMPQVNIVKKTEVQTGGFSKESILPKRNSDKLIARKKDWDPKKYGGFDSPTVAYSVLVVAKVEKGKSKKLKSVKELLGITIMERSSFEKNPIDFLEAKGYKEVKKDLIIKLPKYSLFELENGRKRMLASAGELQKGNELALPSKYVNFLYLASHYEKLKGSPEDNEQKQLFVEQHKHYLDEIIEQISEFSKRVILADANLDKVLSAYNKHRDKPIREQAENIIHLFTLTNLGAPAAFKYFDTTIDRKRYTSTKEVLDATLIHQSITGLYETRIDLSQLGGDGGPAPAPAPAPAPGGLLGRDLLTKLKAQIQFSTEGPQVTWEDRPAMCLVLNLEEEYRLHEKPVPPSIDPSWLQLFPMVWAEKAGMGLANQVPPVVVELKSDASPVAVRQYPMSKEAREGIRPHIQRFLDLGILVPCQSPWNTPLLPVKKPGTNDYRPVQDLREVNKRVQDIHPTVPNPYNLLSSLPPSHTWYSVLDLKDAFFCLKLHPNSQPLFAFEWRDPEKGNTGQLTWTRLPQGFKNSPTLFNEALHRDLASFRALNPQVVMLQYVDDLLVAAPTYRDCKEGTRRLLQELSKLGYRVSAKKAQLCREEVTYLGYLLKGGKRWLTPARKATVMKIPTPTTPRQVREFLGKAGFCRLFIPGFASLAAPLYPLTRPKVPFTWTEAHQEAFGRIKEALLSAPALALPDLTKPFALYVDEKEGVARGVLTQTLGPWRRPVAYLSKKLDPVASGWPTCLKAIAAVALLLKDADKLTLGQNVLVIAPHNLESIVRQPPDRWMTNARMTHYQSLLLNERVSFAPPAILNPATLLPVESDDTPIHICSEILAEETGTRPDLRDQPLPGVPAWYTDGSSFIMDGRRQAGAAIVDNKRTVWASNLPEGTSAQKAELIALTQALRLAEGKSINIYTDSRYAFATAHVHGAIYKQRGWLTSAGKDIKNKEEILALLEAIHLPKRVAIIHCPGHQRGTDPVATGNRKADEAAKQAAQSTRILTETTKNAGKRTADGSEFEKRTADGSEFESPKKKAKVE

SEQ ID NO: 1685 - protein, 2127 aa, synthetic construct
MPAAKRVKLDGGDKKYSIGLDIGTNSVGWAVITDEYKVPSKKFKVLGNTDRHSIKKNLIGALLFDSGETAEATRLKRTARRRYTRRKNRICYLQEIFSNEMAKVDDSFFHRLEESFLVEEDKKHERHPIFGNIVDEVAYHEKYPTIYHLRKKLVDSTDKADLRLIYLALAHMIKFRGHFLIEGDLNPDNSDVDKLFIQLVQTYNQLFEENPINASGVDAKAILSARLSKSRRLENLIAQLPGEKKNGLFGNLIALSLGLTPNFKSNFDLAEDAKLQLSKDTYDDDLDNLLAQIGDQYADLFLAAKNLSDAILLSDILRVNTEITKAPLSASMIKRYDEHHQDLTLLKALVRQQLPEKYKEIFFDQSKNGYAGYIDGGASQEEFYKFIKPILEKMDGTEELLVKLNREDLLRKQRTFDNGSIPHQIHLGELHAILRRQEDFYPFLKDNREKIEKILTFRIPYYVGPLARGNSRFAWMTRKSEETITPWNFEEVVDKGASAQSFIERMTNFDKNLPNEKVLPKHSLLYEYFTVYNELTKVKYVTEGMRKPAFLSGEQKKAIVDLLFKTNRKVTVKQLKEDYFKKIECFDSVEISGVEDRFNASLGTYHDLLKIIKDKDFLDNEENEDILEDIVLTLTLFEDREMIEERLKTYAHLFDDKVMKQLKRRRYTGWGRLSRKLINGIRDKQSGKTILDFLKSDGFANRNFMQLIHDDSLTFKEDIQKAQVSGQGDSLHEHIANLAGSPAIKKGILQTVKVVDELVKVMGRHKPENIVIEMARENQTTQKGQKNSRERMKRIEEGIKELGSQILKEHPVENTQLQNEKLYLYYLQNGRDMYVDQELDINRLSDYDVDHIVPQSFLKDDSIDNKVLTRSDKARGKSDNVPSEEVVKKMKNYWRQLLNAKLITQRKFDNLTKAERGGLSELDKAGFIKRQLVETRQITKHVAQILDSRMNTKYDENDKLIREVKVITLKSKLVSDFRKDFQFYKVREINNYHHAHDAYLNAVVGTALIKKYPKLESEFVYGDYKVYDVRKMIAKSEQEIGKATAKYFFYSNIMNFFKTEITLANGEIRKRPLIETNGETGEIVWDKGRDFATVRKVLSMPQVNIVKKTEVQTGGFSKESILPKRNSDKLIARKKDWDPKKYGGFDSPTVAYSVLVVAKVEKGKSKKLKSVKELLGITIMERSSFEKNPIDFLEAKGYKEVKKDLIIKLPKYSLFELENGRKRMLASAGELQKGNELALPSKYVNFLYLASHYEKLKGSPEDNEQKQLFVEQHKHYLDEIIEQISEFSKRVILADANLDKVLSAYNKHRDKPIREQAENIIHLFTLTNLGAPAAFKYFDTTIDRKRYTSTKEVLDATLIHQSITGLYETRIDLSQLGGDGGEAAAKPAPGGGGGLLGRDLLTKLKAQIQFSTEGPQVTWEDRPAMCLVLNLEEEYRLHEKPVPPSIDPSWLQLFPMVWAEKAGMGLANQVPPVVVELKSDASPVAVRQYPMSKEAREGIRPHIQRFLDLGILVPCQSPWNTPLLPVKKPGTNDYRPVQDLREVNKRVQDIHPTVPNPYNLLSSLPPSHTWYSVLDLKDAFFCLKLHPNSQPLFAFEWRDPEKGNTGQLTWTRLPQGFKNSPTLFNEALHRDLASFRALNPQVVMLQYVDDLLVAAPTYRDCKEGTRRLLQELSKLGYRVSAKKAQLCREEVTYLGYLLKGGKRWLTPARKATVMKIPTPTTPRQVREFLGKAGFCRLFIPGFASLAAPLYPLTRPKVPFTWTEAHQEAFGRIKEALLSAPALALPDLTKPFALYVDEKEGVARGVLTQTLGPWRRPVAYLSKKLDPVASGWPTCLKAIAAVALLLKDADKLTLGQNVLVIAPHNLESIVRQPPDRWMTNARMTHYQSLLLNERVSFAPPAILNPATLLPVESDDTPIHICSEILAEETGTRPDLRDQPLPGVPAWYTDGSSFIMDGRRQAGAAIVDNKRTVWASNLPEGTSAQKAELIALTQALRLAEGKSINIYTDSRYAFATAHVHGAIYKQRGWLTSAGKDIKNKEEILALLEAIHLPKRVAIIHCPGHQRGTDPVATGNRKADEAAKQAAQSTRILTETTKNAGKRTADGSEFEKRTADGSEFESPKKKAKVE

SEQ ID NO: 1686 - protein, 2125 aa, synthetic construct
MPAAKRVKLDGGDKKYSIGLDIGTNSVGWAVITDEYKVPSKKFKVLGNTDRHSIKKNLIGALLFDSGETAEATRLKRTARRRYTRRKNRICYLQEIFSNEMAKVDDSFFHRLEESFLVEEDKKHERHPIFGNIVDEVAYHEKYPTIYHLRKKLVDSTDKADLRLIYLALAHMIKFRGHFLIEGDLNPDNSDVDKLFIQLVQTYNQLFEENPINASGVDAKAILSARLSKSRRLENLIAQLPGEKKNGLFGNLIALSLGLTPNFKSNFDLAEDAKLQLSKDTYDDDLDNLLAQIGDQYADLFLAAKNLSDAILLSDILRVNTEITKAPLSASMIKRYDEHHQDLTLLKALVRQQLPEKYKEIFFDQSKNGYAGYIDGGASQEEFYKFIKPILEKMDGTEELLVKLNREDLLRKQRTFDNGSIPHQIHLGELHAILRRQEDFYPFLKDNREKIEKILTFRIPYYVGPLARGNSRFAWMTRKSEETITPWNFEEVVDKGASAQSFIERMTNFDKNLPNEKVLPKHSLLYEYFTVYNELTKVKYVTEGMRKPAFLSGEQKKAIVDLLFKTNRKVTVKQLKEDYFKKIECFDSVEISGVEDRFNASLGTYHDLLKIIKDKDFLDNEENEDILEDIVLTLTLFEDREMIEERLKTYAHLFDDKVMKQLKRRRYTGWGRLSRKLINGIRDKQSGKTILDFLKSDGFANRNFMQLIHDDSLTFKEDIQKAQVSGQGDSLHEHIANLAGSPAIKKGILQTVKVVDELVKVMGRHKPENIVIEMARENQTTQKGQKNSRERMKRIEEGIKELGSQILKEHPVENTQLQNEKLYLYYLQNGRDMYVDQELDINRLSDYDVDHIVPQSFLKDDSIDNKVLTRSDKARGKSDNVPSEEVVKKMKNYWRQLLNAKLITQRKFDNLTKAERGGLSELDKAGFIKRQLVETRQITKHVAQILDSRMNTKYDENDKLIREVKVITLKSKLVSDFRKDFQFYKVREINNYHHAHDAYLNAVVGTALIKKYPKLESEFVYGDYKVYDVRKMIAKSEQEIGKATAKYFFYSNIMNFFKTEITLANGEIRKRPLIETNGETGEIVWDKGRDFATVRKVLSMPQVNIVKKTEVQTGGFSKESILPKRNSDKLIARKKDWDPKKYGGFDSPTVAYSVLVVAKVEKGKSKKLKSVKELLGITIMERSSFEKNPIDFLEAKGYKEVKKDLIIKLPKYSLFELENGRKRMLASAGELQKGNELALPSKYVNFLYLASHYEKLKGSPEDNEQKQLFVEQHKHYLDEIIEQISEFSKRVILADANLDKVLSAYNKHRDKPIREQAENIIHLFTLTNLGAPAAFKYFDTTIDRKRYTSTKEVLDATLIHQSITGLYETRIDLSQLGGDGGGGSGGSGGSGGLLGRDLLTKLKAQIQFSTEGPQVTWEDRPAMCLVLNLEEEYRLHEKPVPPSIDPSWLQLFPMVWAEKAGMGLANQVPPVVVELKSDASPVAVRQYPMSKEAREGIRPHIQRFLDLGILVPCQSPWNTPLLPVKKPGTNDYRPVQDLREVNKRVQDIHPTVPNPYNLLSSLPPSHTWYSVLDLKDAFFCLKLHPNSQPLFAFEWRDPEKGNTGQLTWTRLPQGFKNSPTLFNEALHRDLASFRALNPQVVMLQYVDDLLVAAPTYRDCKEGTRRLLQELSKLGYRVSAKKAQLCREEVTYLGYLLKGGKRWLTPARKATVMKIPTPTTPRQVREFLGKAGFCRLFIPGFASLAAPLYPLTRPKVPFTWTEAHQEAFGRIKEALLSAPALALPDLTKPFALYVDEKEGVARGVLTQTLGPWRRPVAYLSKKLDPVASGWPTCLKAIAAVALLLKDADKLTLGQNVLVIAPHNLESIVRQPPDRWMTNARMTHYQSLLLNERVSFAPPAILNPATLLPVESDDTPIHICSEILAEETGTRPDLRDQPLPGVPAWYTDGSSFIMDGRRQAGAAIVDNKRTVWASNLPEGTSAQKAELIALTQALRLAEGKSINIYTDSRYAFATAHVHGAIYKQRGWLTSAGKDIKNKEEILALLEAIHLPKRVAIIHCPGHQRGTDPVATGNRKADEAAKQAAQSTRILTETTKNAGKRTADGSEFEKRTADGSEFESPKKKAKVE

SEQ ID NO: 1687 - protein, 2127 aa, synthetic construct
MPAAKRVKLDGGDKKYSIGLDIGTNSVGWAVITDEYKVPSKKFKVLGNTDRHSIKKNLIGALLFDSGETAEATRLKRTARRRYTRRKNRICYLQEIFSNEMAKVDDSFFHRLEESFLVEEDKKHERHPIFGNIVDEVAYHEKYPTIYHLRKKLVDSTDKADLRLIYLALAHMIKFRGHFLIEGDLNPDNSDVDKLFIQLVQTYNQLFEENPINASGVDAKAILSARLSKSRRLENLIAQLPGEKKNGLFGNLIALSLGLTPNFKSNFDLAEDAKLQLSKDTYDDDLDNLLAQIGDQYADLFLAAKNLSDAILLSDILRVNTEITKAPLSASMIKRYDEHHQDLTLLKALVRQQLPEKYKEIFFDQSKNGYAGYIDGGASQEEFYKFIKPILEKMDGTEELLVKLNREDLLRKQRTFDNGSIPHQIHLGELHAILRRQEDFYPFLKDNREKIEKILTFRIPYYVGPLARGNSRFAWMTRKSEETITPWNFEEVVDKGASAQSFIERMTNFDKNLPNEKVLPKHSLLYEYFTVYNELTKVKYVTEGMRKPAFLSGEQKKAIVDLLFKTNRKVTVKQLKEDYFKKIECFDSVEISGVEDRFNASLGTYHDLLKIIKDKDFLDNEENEDILEDIVLTLTLFEDREMIEERLKTYAHLFDDKVMKQLKRRRYTGWGRLSRKLINGIRDKQSGKTILDFLKSDGFANRNFMQLIHDDSLTFKEDIQKAQVSGQGDSLHEHIANLAGSPAIKKGILQTVKVVDELVKVMGRHKPENIVIEMARENQTTQKGQKNSRERMKRIEEGIKELGSQILKEHPVENTQLQNEKLYLYYLQNGRDMYVDQELDINRLSDYDVDHIVPQSFLKDDSIDNKVLTRSDKARGKSDNVPSEEVVKKMKNYWRQLLNAKLITQRKFDNLTKAERGGLSELDKAGFIKRQLVETRQITKHVAQILDSRMNTKYDENDKLIREVKVITLKSKLVSDFRKDFQFYKVREINNYHHAHDAYLNAVVGTALIKKYPKLESEFVYGDYKVYDVRKMIAKSEQEIGKATAKYFFYSNIMNFFKTEITLANGEIRKRPLIETNGETGEIVWDKGRDFATVRKVLSMPQVNIVKKTEVQTGGFSKESILPKRNSDKLIARKKDWDPKKYGGFDSPTVAYSVLVVAKVEKGKSKKLKSVKELLGITIMERSSFEKNPIDFLEAKGYKEVKKDLIIKLPKYSLFELENGRKRMLASAGELQKGNELALPSKYVNFLYLASHYEKLKGSPEDNEQKQLFVEQHKHYLDEIIEQISEFSKRVILADANLDKVLSAYNKHRDKPIREQAENIIHLFTLTNLGAPAAFKYFDTTIDRKRYTSTKEVLDATLIHQSITGLYETRIDLSQLGGDGGEAAAKPAPGSSGGLLGRDLLTKLKAQIQFSTEGPQVTWEDRPAMCLVLNLEEEYRLHEKPVPPSIDPSWLQLFPMVWAEKAGMGLANQVPPVVVELKSDASPVAVRQYPMSKEAREGIRPHIQRFLDLGILVPCQSPWNTPLLPVKKPGTNDYRPVQDLREVNKRVQDIHPTVPNPYNLLSSLPPSHTWYSVLDLKDAFFCLKLHPNSQPLFAFEWRDPEKGNTGQLTWTRLPQGFKNSPTLFNEALHRDLASFRALNPQVVMLQYVDDLLVAAPTYRDCKEGTRRLLQELSKLGYRVSAKKAQLCREEVTYLGYLLKGGKRWLTPARKATVMKIPTPTTPRQVREFLGKAGFCRLFIPGFASLAAPLYPLTRPKVPFTWTEAHQEAFGRIKEALLSAPALALPDLTKPFALYVDEKEGVARGVLTQTLGPWRRPVAYLSKKLDPVASGWPTCLKAIAAVALLLKDADKLTLGQNVLVIAPHNLESIVRQPPDRWMTNARMTHYQSLLLNERVSFAPPAILNPATLLPVESDDTPIHICSEILAEETGTRPDLRDQPLPGVPAWYTDGSSFIMDGRRQAGAAIVDNKRTVWASNLPEGTSAQKAELIALTQALRLAEGKSINIYTDSRYAFATAHVHGAIYKQRGWLTSAGKDIKNKEEILALLEAIHLPKRVAIIHCPGHQRGTDPVATGNRKADEAAKQAAQSTRILTETTKNAGKRTADGSEFEKRTADGSEFESPKKKAKVE

SEQ ID NO: 1688 - protein, 2127 aa, synthetic construct
MPAAKRVKLDGGDKKYSIGLDIGTNSVGWAVITDEYKVPSKKFKVLGNTDRHSIKKNLIGALLFDSGETAEATRLKRTARRRYTRRKNRICYLQEIFSNEMAKVDDSFFHRLEESFLVEEDKKHERHPIFGNIVDEVAYHEKYPTIYHLRKKLVDSTDKADLRLIYLALAHMIKFRGHFLIEGDLNPDNSDVDKLFIQLVQTYNQLFEENPINASGVDAKAILSARLSKSRRLENLIAQLPGEKKNGLFGNLIALSLGLTPNFKSNFDLAEDAKLQLSKDTYDDDLDNLLAQIGDQYADLFLAAKNLSDAILLSDILRVNTEITKAPLSASMIKRYDEHHQDLTLLKALVRQQLPEKYKEIFFDQSKNGYAGYIDGGASQEEFYKFIKPILEKMDGTEELLVKLNREDLLRKQRTFDNGSIPHQIHLGELHAILRRQEDFYPFLKDNREKIEKILTFRIPYYVGPLARGNSRFAWMTRKSEETITPWNFEEVVDKGASAQSFIERMTNFDKNLPNEKVLPKHSLLYEYFTVYNELTKVKYVTEGMRKPAFLSGEQKKAIVDLLFKTNRKVTVKQLKEDYFKKIECFDSVEISGVEDRFNASLGTYHDLLKIIKDKDFLDNEENEDILEDIVLTLTLFEDREMIEERLKTYAHLFDDKVMKQLKRRRYTGWGRLSRKLINGIRDKQSGKTILDFLKSDGFANRNFMQLIHDDSLTFKEDIQKAQVSGQGDSLHEHIANLAGSPAIKKGILQTVKVVDELVKVMGRHKPENIVIEMARENQTTQKGQKNSRERMKRIEEGIKELGSQILKEHPVENTQLQNEKLYLYYLQNGRDMYVDQELDINRLSDYDVDHIVPQSFLKDDSIDNKVLTRSDKARGKSDNVPSEEVVKKMKNYWRQLLNAKLITQRKFDNLTKAERGGLSELDKAGFIKRQLVETRQITKHVAQILDSRMNTKYDENDKLIREVKVITLKSKLVSDFRKDFQFYKVREINNYHHAHDAYLNAVVGTALIKKYPKLESEFVYGDYKVYDVRKMIAKSEQEIGKATAKYFFYSNIMNFFKTEITLANGEIRKRPLIETNGETGEIVWDKGRDFATVRKVLSMPQVNIVKKTEVQTGGFSKESILPKRNSDKLIARKKDWDPKKYGGFDSPTVAYSVLVVAKVEKGKSKKLKSVKELLGITIMERSSFEKNPIDFLEAKGYKEVKKDLIIKLPKYSLFELENGRKRMLASAGELQKGNELALPSKYVNFLYLASHYEKLKGSPEDNEQKQLFVEQHKHYLDEIIEQISEFSKRVILADANLDKVLSAYNKHRDKPIREQAENIIHLFTLTNLGAPAAFKYFDTTIDRKRYTSTKEVLDATLIHQSITGLYETRIDLSQLGGDGGGGGEAAAKGSSGGLLGRDLLTKLKAQIQFSTEGPQVTWEDRPAMCLVLNLEEEYRLHEKPVPPSIDPSWLQLFPMVWAEKAGMGLANQVPPVVVELKSDASPVAVRQYPMSKEAREGIRPHIQRFLDLGILVPCQSPWNTPLLPVKKPGTNDYRPVQDLREVNKRVQDIHPTVPNPYNLLSSLPPSHTWYSVLDLKDAFFCLKLHPNSQPLFAFEWRDPEKGNTGQLTWTRLPQGFKNSPTLFNEALHRDLASFRALNPQVVMLQYVDDLLVAAPTYRDCKEGTRRLLQELSKLGYRVSAKKAQLCREEVTYLGYLLKGGKRWLTPARKATVMKIPTPTTPRQVREFLGKAGFCRLFIPGFASLAAPLYPLTRPKVPFTWTEAHQEAFGRIKEALLSAPALALPDLTKPFALYVDEKEGVARGVLTQTLGPWRRPVAYLSKKLDPVASGWPTCLKAIAAVALLLKDADKLTLGQNVLVIAPHNLESIVRQPPDRWMTNARMTHYQSLLLNERVSFAPPAILNPATLLPVESDDTPIHICSEILAEETGTRPDLRDQPLPGVPAWYTDGSSFIMDGRRQAGAAIVDNKRTVWASNLPEGTSAQKAELIALTQALRLAEGKSINIYTDSRYAFATAHVHGAIYKQRGWLTSAGKDIKNKEEILALLEAIHLPKRVAIIHCPGHQRGTDPVATGNRKADEAAKQAAQSTRILTETTKNAGKRTADGSEFEKRTADGSEFESPKKKAKVE

SEQ ID NO: 1689 - protein, 2121 aa, synthetic construct
MPAAKRVKLDGGDKKYSIGLDIGTNSVGWAVITDEYKVPSKKFKVLGNTDRHSIKKNLIGALLFDSGETAEATRLKRTARRRYTRRKNRICYLQEIFSNEMAKVDDSFFHRLEESFLVEEDKKHERHPIFGNIVDEVAYHEKYPTIYHLRKKLVDSTDKADLRLIYLALAHMIKFRGHFLIEGDLNPDNSDVDKLFIQLVQTYNQLFEENPINASGVDAKAILSARLSKSRRLENLIAQLPGEKKNGLFGNLIALSLGLTPNFKSNFDLAEDAKLQLSKDTYDDDLDNLLAQIGDQYADLFLAAKNLSDAILLSDILRVNTEITKAPLSASMIKRYDEHHQDLTLLKALVRQQLPEKYKEIFFDQSKNGYAGYIDGGASQEEFYKFIKPILEKMDGTEELLVKLNREDLLRKQRTFDNGSIPHQIHLGELHAILRRQEDFYPFLKDNREKIEKILTFRIPYYVGPLARGNSRFAWMTRKSEETITPWNFEEVVDKGASAQSFIERMTNFDKNLPNEKVLPKHSLLYEYFTVYNELTKVKYVTEGMRKPAFLSGEQKKAIVDLLFKTNRKVTVKQLKEDYFKKIECFDSVEISGVEDRFNASLGTYHDLLKIIKDKDFLDNEENEDILEDIVLTLTLFEDREMIEERLKTYAHLFDDKVMKQLKRRRYTGWGRLSRKLINGIRDKQSGKTILDFLKSDGFANRNFMQLIHDDSLTFKEDIQKAQVSGQGDSLHEHIANLAGSPAIKKGILQTVKVVDELVKVMGRHKPENIVIEMARENQTTQKGQKNSRERMKRIEEGIKELGSQILKEHPVENTQLQNEKLYLYYLQNGRDMYVDQELDINRLSDYDVDHIVPQSFLKDDSIDNKVLTRSDKARGKSDNVPSEEVVKKMKNYWRQLLNAKLITQRKFDNLTKAERGGLSELDKAGFIKRQLVETRQITKHVAQILDSRMNTKYDENDKLIREVKVITLKSKLVSDFRKDFQFYKVREINNYHHAHDAYLNAVVGTALIKKYPKLESEFVYGDYKVYDVRKMIAKSEQEIGKATAKYFFYSNIMNFFKTEITLANGEIRKRPLIETNGETGEIVWDKGRDFATVRKVLSMPQVNIVKKTEVQTGGFSKESILPKRNSDKLIARKKDWDPKKYGGFDSPTVAYSVLVVAKVEKGKSKKLKSVKELLGITIMERSSFEKNPIDFLEAKGYKEVKKDLIIKLPKYSLFELENGRKRMLASAGELQKGNELALPSKYVNFLYLASHYEKLKGSPEDNEQKQLFVEQHKHYLDEIIEQISEFSKRVILADANLDKVLSAYNKHRDKPIREQAENIIHLFTLTNLGAPAAFKYFDTTIDRKRYTSTKEVLDATLIHQSITGLYETRIDLSQLGGDGGEAAAKGGLLGRDLLTKLKAQIQFSTEGPQVTWEDRPAMCLVLNLEEEYRLHEKPVPPSIDPSWLQLFPMVWAEKAGMGLANQVPPVVVELKSDASPVAVRQYPMSKEAREGIRPHIQRFLDLGILVPCQSPWNTPLLPVKKPGTNDYRPVQDLREVNKRVQDIHPTVPNPYNLLSSLPPSHTWYSVLDLKDAFFCLKLHPNSQPLFAFEWRDPEKGNTGQLTWTRLPQGFKNSPTLFNEALHRDLASFRALNPQVVMLQYVDDLLVAAPTYRDCKEGTRRLLQELSKLGYRVSAKKAQLCREEVTYLGYLLKGGKRWLTPARKATVMKIPTPTTPRQVREFLGKAGFCRLFIPGFASLAAPLYPLTRPKVPFTWTEAHQEAFGRIKEALLSAPALALPDLTKPFALYVDEKEGVARGVLTQTLGPWRRPVAYLSKKLDPVASGWPTCLKAIAAVALLLKDADKLTLGQNVLVIAPHNLESIVRQPPDRWMTNARMTHYQSLLLNERVSFAPPAILNPATLLPVESDDTPIHICSEILAEETGTRPDLRDQPLPGVPAWYTDGSSFIMDGRRQAGAAIVDNKRTVWASNLPEGTSAQKAELIALTQALRLAEGKSINIYTDSRYAFATAHVHGAIYKQRGWLTSAGKDIKNKEEILALLEAIHLPKRVAIIHCPGHQRGTDPVATGNRKADEAAKQAAQSTRILTETTKNAGKRTADGSEFEKRTADGSEFESPKKKAKVE

SEQ ID NO: 1690 - protein, 2127 aa, synthetic construct
MPAAKRVKLDGGDKKYSIGLDIGTNSVGWAVITDEYKVPSKKFKVLGNTDRHSIKKNLIGALLFDSGETAEATRLKRTARRRYTRRKNRICYLQEIFSNEMAKVDDSFFHRLEESFLVEEDKKHERHPIFGNIVDEVAYHEKYPTIYHLRKKLVDSTDKADLRLIYLALAHMIKFRGHFLIEGDLNPDNSDVDKLFIQLVQTYNQLFEENPINASGVDAKAILSARLSKSRRLENLIAQLPGEKKNGLFGNLIALSLGLTPNFKSNFDLAEDAKLQLSKDTYDDDLDNLLAQIGDQYADLFLAAKNLSDAILLSDILRVNTEITKAPLSASMIKRYDEHHQDLTLLKALVRQQLPEKYKEIFFDQSKNGYAGYIDGGASQEEFYKFIKPILEKMDGTEELLVKLNREDLLRKQRTFDNGSIPHQIHLGELHAILRRQEDFYPFLKDNREKIEKILTFRIPYYVGPLARGNSRFAWMTRKSEETITPWNFEEVVDKGASAQSFIERMTNFDKNLPNEKVLPKHSLLYEYFTVYNELTKVKYVTEGMRKPAFLSGEQKKAIVDLLFKTNRKVTVKQLKEDYFKKIECFDSVEISGVEDRFNASLGTYHDLLKIIKDKDFLDNEENEDILEDIVLTLTLFEDREMIEERLKTYAHLFDDKVMKQLKRRRYTGWGRLSRKLINGIRDKQSGKTILDFLKSDGFANRNFMQLIHDDSLTFKEDIQKAQVSGQGDSLHEHIANLAGSPAIKKGILQTVKVVDELVKVMGRHKPENIVIEMARENQTTQKGQKNSRERMKRIEEGIKELGSQILKEHPVENTQLQNEKLYLYYLQNGRDMYVDQELDINRLSDYDVDHIVPQSFLKDDSIDNKVLTRSDKARGKSDNVPSEEVVKKMKNYWRQLLNAKLITQRKFDNLTKAERGGLSELDKAGFIKRQLVETRQITKHVAQILDSRMNTKYDENDKLIREVKVITLKSKLVSDFRKDFQFYKVREINNYHHAHDAYLNAVVGTALIKKYPKLESEFVYGDYKVYDVRKMIAKSEQEIGKATAKYFFYSNIMNFFKTEITLANGEIRKRPLIETNGETGEIVWDKGRDFATVRKVLSMPQVNIVKKTEVQTGGFSKESILPKRNSDKLIARKKDWDPKKYGGFDSPTVAYSVLVVAKVEKGKSKKLKSVKELLGITIMERSSFEKNPIDFLEAKGYKEVKKDLIIKLPKYSLFELENGRKRMLASAGELQKGNELALPSKYVNFLYLASHYEKLKGSPEDNEQKQLFVEQHKHYLDEIIEQISEFSKRVILADANLDKVLSAYNKHRDKPIREQAENIIHLFTLTNLGAPAAFKYFDTTIDRKRYTSTKEVLDATLIHQSITGLYETRIDLSQLGGDGGEAAAKGSSGGSGGLLGRDLLTKLKAQIQFSTEGPQVTWEDRPAMCLVLNLEEEYRLHEKPVPPSIDPSWLQLFPMVWAEKAGMGLANQVPPVVVELKSDASPVAVRQYPMSKEAREGIRPHIQRFLDLGILVPCQSPWNTPLLPVKKPGTNDYRPVQDLREVNKRVQDIHPTVPNPYNLLSSLPPSHTWYSVLDLKDAFFCLKLHPNSQPLFAFEWRDPEKGNTGQLTWTRLPQGFKNSPTLFNEALHRDLASFRALNPQVVMLQYVDDLLVAAPTYRDCKEGTRRLLQELSKLGYRVSAKKAQLCREEVTYLGYLLKGGKRWLTPARKATVMKIPTPTTPRQVREFLGKAGFCRLFIPGFASLAAPLYPLTRPKVPFTWTEAHQEAFGRIKEALLSAPALALPDLTKPFALYVDEKEGVARGVLTQTLGPWRRPVAYLSKKLDPVASGWPTCLKAIAAVALLLKDADKLTLGQNVLVIAPHNLESIVRQPPDRWMTNARMTHYQSLLLNERVSFAPPAILNPATLLPVESDDTPIHICSEILAEETGTRPDLRDQPLPGVPAWYTDGSSFIMDGRRQAGAAIVDNKRTVWASNLPEGTSAQKAELIALTQALRLAEGKSINIYTDSRYAFATAHVHGAIYKQRGWLTSAGKDIKNKEEILALLEAIHLPKRVAIIHCPGHQRGTDPVATGNRKADEAAKQAAQSTRILTETTKNAGKRTADGSEFEKRTADGSEFESPKKKAKVE

SEQ ID NO: 1691 - protein, 2125 aa, synthetic construct
MPAAKRVKLDGGDKKYSIGLDIGTNSVGWAVITDEYKVPSKKFKVLGNTDRHSIKKNLIGALLFDSGETAEATRLKRTARRRYTRRKNRICYLQEIFSNEMAKVDDSFFHRLEESFLVEEDKKHERHPIFGNIVDEVAYHEKYPTIYHLRKKLVDSTDKADLRLIYLALAHMIKFRGHFLIEGDLNPDNSDVDKLFIQLVQTYNQLFEENPINASGVDAKAILSARLSKSRRLENLIAQLPGEKKNGLFGNLIALSLGLTPNFKSNFDLAEDAKLQLSKDTYDDDLDNLLAQIGDQYADLFLAAKNLSDAILLSDILRVNTEITKAPLSASMIKRYDEHHQDLTLLKALVRQQLPEKYKEIFFDQSKNGYAGYIDGGASQEEFYKFIKPILEKMDGTEELLVKLNREDLLRKQRTFDNGSIPHQIHLGELHAILRRQEDFYPFLKDNREKIEKILTFRIPYYVGPLARGNSRFAWMTRKSEETITPWNFEEVVDKGASAQSFIERMTNFDKNLPNEKVLPKHSLLYEYFTVYNELTKVKYVTEGMRKPAFLSGEQKKAIVDLLFKTNRKVTVKQLKEDYFKKIECFDSVEISGVEDRFNASLGTYHDLLKIIKDKDFLDNEENEDILEDIVLTLTLFEDREMIEERLKTYAHLFDDKVMKQLKRRRYTGWGRLSRKLINGIRDKQSGKTILDFLKSDGFANRNFMQLIHDDSLTFKEDIQKAQVSGQGDSLHEHIANLAGSPAIKKGILQTVKVVDELVKVMGRHKPENIVIEMARENQTTQKGQKNSRERMKRIEEGIKELGSQILKEHPVENTQLQNEKLYLYYLQNGRDMYVDQELDINRLSDYDVDHIVPQSFLKDDSIDNKVLTRSDKARGKSDNVPSEEVVKKMKNYWRQLLNAKLITQRKFDNLTKAERGGLSELDKAGFIKRQLVETRQITKHVAQILDSRMNTKYDENDKLIREVKVITLKSKLVSDFRKDFQFYKVREINNYHHAHDAYLNAVVGTALIKKYPKLESEFVYGDYKVYDVRKMIAKSEQEIGKATAKYFFYSNIMNFFKTEITLANGEIRKRPLIETNGETGEIVWDKGRDFATVRKVLSMPQVNIVKKTEVQTGGFSKESILPKRNSDKLIARKKDWDPKKYGGFDSPTVAYSVLVVAKVEKGKSKKLKSVKELLGITIMERSSFEKNPIDFLEAKGYKEVKKDLIIKLPKYSLFELENGRKRMLASAGELQKGNELALPSKYVNFLYLASHYEKLKGSPEDNEQKQLFVEQHKHYLDEIIEQISEFSKRVILADANLDKVLSAYNKHRDKPIREQAENIIHLFTLTNLGAPAAFKYFDTTIDRKRYTSTKEVLDATLIHQSITGLYETRIDLSQLGGDGGPAPGGGGSSGGLLGRDLLTKLKAQIQFSTEGPQVTWEDRPAMCLVLNLEEEYRLHEKPVPPSIDPSWLQLFPMVWAEKAGMGLANQVPPVVVELKSDASPVAVRQYPMSKEAREGIRPHIQRFLDLGILVPCQSPWNTPLLPVKKPGTNDYRPVQDLREVNKRVQDIHPTVPNPYNLLSSLPPSHTWYSVLDLKDAFFCLKLHPNSQPLFAFEWRDPEKGNTGQLTWTRLPQGFKNSPTLFNEALHRDLASFRALNPQVVMLQYVDDLLVAAPTYRDCKEGTRRLLQELSKLGYRVSAKKAQLCREEVTYLGYLLKGGKRWLTPARKATVMKIPTPTTPRQVREFLGKAGFCRLFIPGFASLAAPLYPLTRPKVPFTWTEAHQEAFGRIKEALLSAPALALPDLTKPFALYVDEKEGVARGVLTQTLGPWRRPVAYLSKKLDPVASGWPTCLKAIAAVALLLKDADKLTLGQNVLVIAPHNLESIVRQPPDRWMTNARMTHYQSLLLNERVSFAPPAILNPATLLPVESDDTPIHICSEILAEETGTRPDLRDQPLPGVPAWYTDGSSFIMDGRRQAGAAIVDNKRTVWASNLPEGTSAQKAELIALTQALRLAEGKSINIYTDSRYAFATAHVHGAIYKQRGWLTSAGKDIKNKEEILALLEAIHLPKRVAIIHCPGHQRGTDPVATGNRKADEAAKQAAQSTRILTETTKNAGKRTADGSEFEKRTADGSEFESPKKKAKVE

SEQ ID NO: 1692 - protein, 2119 aa, synthetic construct
MPAAKRVKLDGGDKKYSIGLDIGTNSVGWAVITDEYKVPSKKFKVLGNTDRHSIKKNLIGALLFDSGETAEATRLKRTARRRYTRRKNRICYLQEIFSNEMAKVDDSFFHRLEESFLVEEDKKHERHPIFGNIVDEVAYHEKYPTIYHLRKKLVDSTDKADLRLIYLALAHMIKFRGHFLIEGDLNPDNSDVDKLFIQLVQTYNQLFEENPINASGVDAKAILSARLSKSRRLENLIAQLPGEKKNGLFGNLIALSLGLTPNFKSNFDLAEDAKLQLSKDTYDDDLDNLLAQIGDQYADLFLAAKNLSDAILLSDILRVNTEITKAPLSASMIKRYDEHHQDLTLLKALVRQQLPEKYKEIFFDQSKNGYAGYIDGGASQEEFYKFIKPILEKMDGTEELLVKLNREDLLRKQRTFDNGSIPHQIHLGELHAILRRQEDFYPFLKDNREKIEKILTFRIPYYVGPLARGNSRFAWMTRKSEETITPWNFEEVVDKGASAQSFIERMTNFDKNLPNEKVLPKHSLLYEYFTVYNELTKVKYVTEGMRKPAFLSGEQKKAIVDLLFKTNRKVTVKQLKEDYFKKIECFDSVEISGVEDRFNASLGTYHDLLKIIKDKDFLDNEENEDILEDIVLTLTLFEDREMIEERLKTYAHLFDDKVMKQLKRRRYTGWGRLSRKLINGIRDKQSGKTILDFLKSDGFANRNFMQLIHDDSLTFKEDIQKAQVSGQGDSLHEHIANLAGSPAIKKGILQTVKVVDELVKVMGRHKPENIVIEMARENQTTQKGQKNSRERMKRIEEGIKELGSQILKEHPVENTQLQNEKLYLYYLQNGRDMYVDQELDINRLSDYDVDHIVPQSFLKDDSIDNKVLTRSDKARGKSDNVPSEEVVKKMKNYWRQLLNAKLITQRKFDNLTKAERGGLSELDKAGFIKRQLVETRQITKHVAQILDSRMNTKYDENDKLIREVKVITLKSKLVSDFRKDFQFYKVREINNYHHAHDAYLNAVVGTALIKKYPKLESEFVYGDYKVYDVRKMIAKSEQEIGKATAKYFFYSNIMNFFKTEITLANGEIRKRPLIETNGETGEIVWDKGRDFATVRKVLSMPQVNIVKKTEVQTGGFSKESILPKRNSDKLIARKKDWDPKKYGGFDSPTVAYSVLVVAKVEKGKSKKLKSVKELLGITIMERSSFEKNPIDFLEAKGYKEVKKDLIIKLPKYSLFELENGRKRMLASAGELQKGNELALPSKYVNFLYLASHYEKLKGSPEDNEQKQLFVEQHKHYLDEIIEQISEFSKRVILADANLDKVLSAYNKHRDKPIREQAENIIHLFTLTNLGAPAAFKYFDTTIDRKRYTSTKEVLDATLIHQSITGLYETRIDLSQLGGDGGPAPGGLLGRDLLTKLKAQIQFSTEGPQVTWEDRPAMCLVLNLEEEYRLHEKPVPPSIDPSWLQLFPMVWAEKAGMGLANQVPPVVVELKSDASPVAVRQYPMSKEAREGIRPHIQRFLDLGILVPCQSPWNTPLLPVKKPGTNDYRPVQDLREVNKRVQDIHPTVPNPYNLLSSLPPSHTWYSVLDLKDAFFCLKLHPNSQPLFAFEWRDPEKGNTGQLTWTRLPQGFKNSPTLFNEALHRDLASFRALNPQVVMLQYVDDLLVAAPTYRDCKEGTRRLLQELSKLGYRVSAKKAQLCREEVTYLGYLLKGGKRWLTPARKATVMKIPTPTTPRQVREFLGKAGFCRLFIPGFASLAAPLYPLTRPKVPFTWTEAHQEAFGRIKEALLSAPALALPDLTKPFALYVDEKEGVARGVLTQTLGPWRRPVAYLSKKLDPVASGWPTCLKAIAAVALLLKDADKLTLGQNVLVIAPHNLESIVRQPPDRWMTNARMTHYQSLLLNERVSFAPPAILNPATLLPVESDDTPIHICSEILAEETGTRPDLRDQPLPGVPAWYTDGSSFIMDGRRQAGAAIVDNKRTVWASNLPEGTSAQKAELIALTQALRLAEGKSINIYTDSRYAFATAHVHGAIYKQRGWLTSAGKDIKNKEEILALLEAIHLPKRVAIIHCPGHQRGTDPVATGNRKADEAAKQAAQSTRILTETTKNAGKRTADGSEFEKRTADGSEFESPKKKAKVE

SEQ ID NO: 1693 - protein, 2128 aa, synthetic construct
MPAAKRVKLDGGDKKYSIGLDIGTNSVGWAVITDEYKVPSKKFKVLGNTDRHSIKKNLIGALLFDSGETAEATRLKRTARRRYTRRKNRICYLQEIFSNEMAKVDDSFFHRLEESFLVEEDKKHERHPIFGNIVDEVAYHEKYPTIYHLRKKLVDSTDKADLRLIYLALAHMIKFRGHFLIEGDLNPDNSDVDKLFIQLVQTYNQLFEENPINASGVDAKAILSARLSKSRRLENLIAQLPGEKKNGLFGNLIALSLGLTPNFKSNFDLAEDAKLQLSKDTYDDDLDNLLAQIGDQYADLFLAAKNLSDAILLSDILRVNTEITKAPLSASMIKRYDEHHQDLTLLKALVRQQLPEKYKEIFFDQSKNGYAGYIDGGASQEEFYKFIKPILEKMDGTEELLVKLNREDLLRKQRTFDNGSIPHQIHLGELHAILRRQEDFYPFLKDNREKIEKILTFRIPYYVGPLARGNSRFAWMTRKSEETITPWNFEEVVDKGASAQSFIERMTNFDKNLPNEKVLPKHSLLYEYFTVYNELTKVKYVTEGMRKPAFLSGEQKKAIVDLLFKTNRKVTVKQLKEDYFKKIECFDSVEISGVEDRFNASLGTYHDLLKIIKDKDFLDNEENEDILEDIVLTLTLFEDREMIEERLKTYAHLFDDKVMKQLKRRRYTGWGRLSRKLINGIRDKQSGKTILDFLKSDGFANRNFMQLIHDDSLTFKEDIQKAQVSGQGDSLHEHIANLAGSPAIKKGILQTVKVVDELVKVMGRHKPENIVIEMARENQTTQKGQKNSRERMKRIEEGIKELGSQILKEHPVENTQLQNEKLYLYYLQNGRDMYVDQELDINRLSDYDVDHIVPQSFLKDDSIDNKVLTRSDKARGKSDNVPSEEVVKKMKNYWRQLLNAKLITQRKFDNLTKAERGGLSELDKAGFIKRQLVETRQITKHVAQILDSRMNTKYDENDKLIREVKVITLKSKLVSDFRKDFQFYKVREINNYHHAHDAYLNAVVGTALIKKYPKLESEFVYGDYKVYDVRKMIAKSEQEIGKATAKYFFYSNIMNFFKTEITLANGEIRKRPLIETNGETGEIVWDKGRDFATVRKVLSMPQVNIVKKTEVQTGGFSKESILPKRNSDKLIARKKDWDPKKYGGFDSPTVAYSVLVVAKVEKGKSKKLKSVKELLGITIMERSSFEKNPIDFLEAKGYKEVKKDLIIKLPKYSLFELENGRKRMLASAGELQKGNELALPSKYVNFLYLASHYEKLKGSPEDNEQKQLFVEQHKHYLDEIIEQISEFSKRVILADANLDKVLSAYNKHRDKPIREQAENIIHLFTLTNLGAPAAFKYFDTTIDRKRYTSTKEVLDATLIHQSITGLYETRIDLSQLGGDGGGSAGSAAGSGEFGGLLGRDLLTKLKAQIQFSTEGPQVTWEDRPAMCLVLNLEEEYRLHEKPVPPSIDPSWLQLFPMVWAEKAGMGLANQVPPVVVELKSDASPVAVRQYPMSKEAREGIRPHIQRFLDLGILVPCQSPWNTPLLPVKKPGTNDYRPVQDLREVNKRVQDIHPTVPNPYNLLSSLPPSHTWYSVLDLKDAFFCLKLHPNSQPLFAFEWRDPEKGNTGQLTWTRLPQGFKNSPTLFNEALHRDLASFRALNPQVVMLQYVDDLLVAAPTYRDCKEGTRRLLQELSKLGYRVSAKKAQLCREEVTYLGYLLKGGKRWLTPARKATVMKIPTPTTPRQVREFLGKAGFCRLFIPGFASLAAPLYPLTRPKVPFTWTEAHQEAFGRIKEALLSAPALALPDLTKPFALYVDEKEGVARGVLTQTLGPWRRPVAYLSKKLDPVASGWPTCLKAIAAVALLLKDADKLTLGQNVLVIAPHNLESIVRQPPDRWMTNARMTHYQSLLLNERVSFAPPAILNPATLLPVESDDTPIHICSEILAEETGTRPDLRDQPLPGVPAWYTDGSSFIMDGRRQAGAAIVDNKRTVWASNLPEGTSAQKAELIALTQALRLAEGKSINIYTDSRYAFATAHVHGAIYKQRGWLTSAGKDIKNKEEILALLEAIHLPKRVAIIHCPGHQRGTDPVATGNRKADEAAKQAAQSTRILTETTKNAGKRTADGSEFEKRTADGSEFESPKKKAKVE

SEQ ID NO: 1694 - protein, 2125 aa, synthetic construct
MPAAKRVKLDGGDKKYSIGLDIGTNSVGWAVITDEYKVPSKKFKVLGNTDRHSIKKNLIGALLFDSGETAEATRLKRTARRRYTRRKNRICYLQEIFSNEMAKVDDSFFHRLEESFLVEEDKKHERHPIFGNIVDEVAYHEKYPTIYHLRKKLVDSTDKADLRLIYLALAHMIKFRGHFLIEGDLNPDNSDVDKLFIQLVQTYNQLFEENPINASGVDAKAILSARLSKSRRLENLIAQLPGEKKNGLFGNLIALSLGLTPNFKSNFDLAEDAKLQLSKDTYDDDLDNLLAQIGDQYADLFLAAKNLSDAILLSDILRVNTEITKAPLSASMIKRYDEHHQDLTLLKALVRQQLPEKYKEIFFDQSKNGYAGYIDGGASQEEFYKFIKPILEKMDGTEELLVKLNREDLLRKQRTFDNGSIPHQIHLGELHAILRRQEDFYPFLKDNREKIEKILTFRIPYYVGPLARGNSRFAWMTRKSEETITPWNFEEVVDKGASAQSFIERMTNFDKNLPNEKVLPKHSLLYEYFTVYNELTKVKYVTEGMRKPAFLSGEQKKAIVDLLFKTNRKVTVKQLKEDYFKKIECFDSVEISGVEDRFNASLGTYHDLLKIIKDKDFLDNEENEDILEDIVLTLTLFEDREMIEERLKTYAHLFDDKVMKQLKRRRYTGWGRLSRKLINGIRDKQSGKTILDFLKSDGFANRNFMQLIHDDSLTFKEDIQKAQVSGQGDSLHEHIANLAGSPAIKKGILQTVKVVDELVKVMGRHKPENIVIEMARENQTTQKGQKNSRERMKRIEEGIKELGSQILKEHPVENTQLQNEKLYLYYLQNGRDMYVDQELDINRLSDYDVDHIVPQSFLKDDSIDNKVLTRSDKARGKSDNVPSEEVVKKMKNYWRQLLNAKLITQRKFDNLTKAERGGLSELDKAGFIKRQLVETRQITKHVAQILDSRMNTKYDENDKLIREVKVITLKSKLVSDFRKDFQFYKVREINNYHHAHDAYLNAVVGTALIKKYPKLESEFVYGDYKVYDVRKMIAKSEQEIGKATAKYFFYSNIMNFFKTEITLANGEIRKRPLIETNGETGEIVWDKGRDFATVRKVLSMPQVNIVKKTEVQTGGFSKESILPKRNSDKLIARKKDWDPKKYGGFDSPTVAYSVLVVAKVEKGKSKKLKSVKELLGITIMERSSFEKNPIDFLEAKGYKEVKKDLIIKLPKYSLFELENGRKRMLASAGELQKGNELALPSKYVNFLYLASHYEKLKGSPEDNEQKQLFVEQHKHYLDEIIEQISEFSKRVILADANLDKVLSAYNKHRDKPIREQAENIIHLFTLTNLGAPAAFKYFDTTIDRKRYTSTKEVLDATLIHQSITGLYETRIDLSQLGGDGGGSSPAPGGGGGLLGRDLLTKLKAQIQFSTEGPQVTWEDRPAMCLVLNLEEEYRLHEKPVPPSIDPSWLQLFPMVWAEKAGMGLANQVPPVVVELKSDASPVAVRQYPMSKEAREGIRPHIQRFLDLGILVPCQSPWNTPLLPVKKPGTNDYRPVQDLREVNKRVQDIHPTVPNPYNLLSSLPPSHTWYSVLDLKDAFFCLKLHPNSQPLFAFEWRDPEKGNTGQLTWTRLPQGFKNSPTLFNEALHRDLASFRALNPQVVMLQYVDDLLVAAPTYRDCKEGTRRLLQELSKLGYRVSAKKAQLCREEVTYLGYLLKGGKRWLTPARKATVMKIPTPTTPRQVREFLGKAGFCRLFIPGFASLAAPLYPLTRPKVPFTWTEAHQEAFGRIKEALLSAPALALPDLTKPFALYVDEKEGVARGVLTQTLGPWRRPVAYLSKKLDPVASGWPTCLKAIAAVALLLKDADKLTLGQNVLVIAPHNLESIVRQPPDRWMTNARMTHYQSLLLNERVSFAPPAILNPATLLPVESDDTPIHICSEILAEETGTRPDLRDQPLPGVPAWYTDGSSFIMDGRRQAGAAIVDNKRTVWASNLPEGTSAQKAELIALTQALRLAEGKSINIYTDSRYAFATAHVHGAIYKQRGWLTSAGKDIKNKEEILALLEAIHLPKRVAIIHCPGHQRGTDPVATGNRKADEAAKQAAQSTRILTETTKNAGKRTADGSEFEKRTADGSEFESPKKKAKVE

SEQ ID NO: 1695 - protein, 2122 aa, synthetic construct
MPAAKRVKLDGGDKKYSIGLDIGTNSVGWAVITDEYKVPSKKFKVLGNTDRHSIKKNLIGALLFDSGETAEATRLKRTARRRYTRRKNRICYLQEIFSNEMAKVDDSFFHRLEESFLVEEDKKHERHPIFGNIVDEVAYHEKYPTIYHLRKKLVDSTDKADLRLIYLALAHMIKFRGHFLIEGDLNPDNSDVDKLFIQLVQTYNQLFEENPINASGVDAKAILSARLSKSRRLENLIAQLPGEKKNGLFGNLIALSLGLTPNFKSNFDLAEDAKLQLSKDTYDDDLDNLLAQIGDQYADLFLAAKNLSDAILLSDILRVNTEITKAPLSASMIKRYDEHHQDLTLLKALVRQQLPEKYKEIFFDQSKNGYAGYIDGGASQEEFYKFIKPILEKMDGTEELLVKLNREDLLRKQRTFDNGSIPHQIHLGELHAILRRQEDFYPFLKDNREKIEKILTFRIPYYVGPLARGNSRFAWMTRKSEETITPWNFEEVVDKGASAQSFIERMTNFDKNLPNEKVLPKHSLLYEYFTVYNELTKVKYVTEGMRKPAFLSGEQKKAIVDLLFKTNRKVTVKQLKEDYFKKIECFDSVEISGVEDRFNASLGTYHDLLKIIKDKDFLDNEENEDILEDIVLTLTLFEDREMIEERLKTYAHLFDDKVMKQLKRRRYTGWGRLSRKLINGIRDKQSGKTILDFLKSDGFANRNFMQLIHDDSLTFKEDIQKAQVSGQGDSLHEHIANLAGSPAIKKGILQTVKVVDELVKVMGRHKPENIVIEMARENQTTQKGQKNSRERMKRIEEGIKELGSQILKEHPVENTQLQNEKLYLYYLQNGRDMYVDQELDINRLSDYDVDHIVPQSFLKDDSIDNKVLTRSDKARGKSDNVPSEEVVKKMKNYWRQLLNAKLITQRKFDNLTKAERGGLSELDKAGFIKRQLVETRQITKHVAQILDSRMNTKYDENDKLIREVKVITLKSKLVSDFRKDFQFYKVREINNYHHAHDAYLNAVVGTALIKKYPKLESEFVYGDYKVYDVRKMIAKSEQEIGKATAKYFFYSNIMNFFKTEITLANGEIRKRPLIETNGETGEIVWDKGRDFATVRKVLSMPQVNIVKKTEVQTGGFSKESILPKRNSDKLIARKKDWDPKKYGGFDSPTVAYSVLVVAKVEKGKSKKLKSVKELLGITIMERSSFEKNPIDFLEAKGYKEVKKDLIIKLPKYSLFELENGRKRMLASAGELQKGNELALPSKYVNFLYLASHYEKLKGSPEDNEQKQLFVEQHKHYLDEIIEQISEFSKRVILADANLDKVLSAYNKHRDKPIREQAENIIHLFTLTNLGAPAAFKYFDTTIDRKRYTSTKEVLDATLIHQSITGLYETRIDLSQLGGDGGPAPGSSGGLLGRDLLTKLKAQIQFSTEGPQVTWEDRPAMCLVLNLEEEYRLHEKPVPPSIDPSWLQLFPMVWAEKAGMGLANQVPPVVVELKSDASPVAVRQYPMSKEAREGIRPHIQRFLDLGILVPCQSPWNTPLLPVKKPGTNDYRPVQDLREVNKRVQDIHPTVPNPYNLLSSLPPSHTWYSVLDLKDAFFCLKLHPNSQPLFAFEWRDPEKGNTGQLTWTRLPQGFKNSPTLFNEALHRDLASFRALNPQVVMLQYVDDLLVAAPTYRDCKEGTRRLLQELSKLGYRVSAKKAQLCREEVTYLGYLLKGGKRWLTPARKATVMKIPTPTTPRQVREFLGKAGFCRLFIPGFASLAAPLYPLTRPKVPFTWTEAHQEAFGRIKEALLSAPALALPDLTKPFALYVDEKEGVARGVLTQTLGPWRRPVAYLSKKLDPVASGWPTCLKAIAAVALLLKDADKLTLGQNVLVIAPHNLESIVRQPPDRWMTNARMTHYQSLLLNERVSFAPPAILNPATLLPVESDDTPIHICSEILAEETGTRPDLRDQPLPGVPAWYTDGSSFIMDGRRQAGAAIVDNKRTVWASNLPEGTSAQKAELIALTQALRLAEGKSINIYTDSRYAFATAHVHGAIYKQRGWLTSAGKDIKNKEEILALLEAIHLPKRVAIIHCPGHQRGTDPVATGNRKADEAAKQAAQSTRILTETTKNAGKRTADGSEFEKRTADGSEFESPKKKAKVE

SEQ ID NO: 1696 - protein, 2125 aa, synthetic construct
MPAAKRVKLDGGDKKYSIGLDIGTNSVGWAVITDEYKVPSKKFKVLGNTDRHSIKKNLIGALLFDSGETAEATRLKRTARRRYTRRKNRICYLQEIFSNEMAKVDDSFFHRLEESFLVEEDKKHERHPIFGNIVDEVAYHEKYPTIYHLRKKLVDSTDKADLRLIYLALAHMIKFRGHFLIEGDLNPDNSDVDKLFIQLVQTYNQLFEENPINASGVDAKAILSARLSKSRRLENLIAQLPGEKKNGLFGNLIALSLGLTPNFKSNFDLAEDAKLQLSKDTYDDDLDNLLAQIGDQYADLFLAAKNLSDAILLSDILRVNTEITKAPLSASMIKRYDEHHQDLTLLKALVRQQLPEKYKEIFFDQSKNGYAGYIDGGASQEEFYKFIKPILEKMDGTEELLVKLNREDLLRKQRTFDNGSIPHQIHLGELHAILRRQEDFYPFLKDNREKIEKILTFRIPYYVGPLARGNSRFAWMTRKSEETITPWNFEEVVDKGASAQSFIERMTNFDKNLPNEKVLPKHSLLYEYFTVYNELTKVKYVTEGMRKPAFLSGEQKKAIVDLLFKTNRKVTVKQLKEDYFKKIECFDSVEISGVEDRFNASLGTYHDLLKIIKDKDFLDNEENEDILEDIVLTLTLFEDREMIEERLKTYAHLFDDKVMKQLKRRRYTGWGRLSRKLINGIRDKQSGKTILDFLKSDGFANRNFMQLIHDDSLTFKEDIQKAQVSGQGDSLHEHIANLAGSPAIKKGILQTVKVVDELVKVMGRHKPENIVIEMARENQTTQKGQKNSRERMKRIEEGIKELGSQILKEHPVENTQLQNEKLYLYYLQNGRDMYVDQELDINRLSDYDVDHIVPQSFLKDDSIDNKVLTRSDKARGKSDNVPSEEVVKKMKNYWRQLLNAKLITQRKFDNLTKAERGGLSELDKAGFIKRQLVETRQITKHVAQILDSRMNTKYDENDKLIREVKVITLKSKLVSDFRKDFQFYKVREINNYHHAHDAYLNAVVGTALIKKYPKLESEFVYGDYKVYDVRKMIAKSEQEIGKATAKYFFYSNIMNFFKTEITLANGEIRKRPLIETNGETGEIVWDKGRDFATVRKVLSMPQVNIVKKTEVQTGGFSKESILPKRNSDKLIARKKDWDPKKYGGFDSPTVAYSVLVVAKVEKGKSKKLKSVKELLGITIMERSSFEKNPIDFLEAKGYKEVKKDLIIKLPKYSLFELENGRKRMLASAGELQKGNELALPSKYVNFLYLASHYEKLKGSPEDNEQKQLFVEQHKHYLDEIIEQISEFSKRVILADANLDKVLSAYNKHRDKPIREQAENIIHLFTLTNLGAPAAFKYFDTTIDRKRYTSTKEVLDATLIHQSITGLYETRIDLSQLGGDGGPAPAPAPAPGGLLGRDLLTKLKAQIQFSTEGPQVTWEDRPAMCLVLNLEEEYRLHEKPVPPSIDPSWLQLFPMVWAEKAGMGLANQVPPVVVELKSDASPVAVRQYPMSKEAREGIRPHIQRFLDLGILVPCQSPWNTPLLPVKKPGTNDYRPVQDLREVNKRVQDIHPTVPNPYNLLSSLPPSHTWYSVLDLKDAFFCLKLHPNSQPLFAFEWRDPEKGNTGQLTWTRLPQGFKNSPTLFNEALHRDLASFRALNPQVVMLQYVDDLLVAAPTYRDCKEGTRRLLQELSKLGYRVSAKKAQLCREEVTYLGYLLKGGKRWLTPARKATVMKIPTPTTPRQVREFLGKAGFCRLFIPGFASLAAPLYPLTRPKVPFTWTEAHQEAFGRIKEALLSAPALALPDLTKPFALYVDEKEGVARGVLTQTLGPWRRPVAYLSKKLDPVASGWPTCLKAIAAVALLLKDADKLTLGQNVLVIAPHNLESIVRQPPDRWMTNARMTHYQSLLLNERVSFAPPAILNPATLLPVESDDTPIHICSEILAEETGTRPDLRDQPLPGVPAWYTDGSSFIMDGRRQAGAAIVDNKRTVWASNLPEGTSAQKAELIALTQALRLAEGKSINIYTDSRYAFATAHVHGAIYKQRGWLTSAGKDIKNKEEILALLEAIHLPKRVAIIHCPGHQRGTDPVATGNRKADEAAKQAAQSTRILTETTKNAGKRTADGSEFEKRTADGSEFESPKKKAKVE

SEQ ID NO: 1697 - protein, 2119 aa, synthetic construct
MPAAKRVKLDGGDKKYSIGLDIGTNSVGWAVITDEYKVPSKKFKVLGNTDRHSIKKNLIGALLFDSGETAEATRLKRTARRRYTRRKNRICYLQEIFSNEMAKVDDSFFHRLEESFLVEEDKKHERHPIFGNIVDEVAYHEKYPTIYHLRKKLVDSTDKADLRLIYLALAHMIKFRGHFLIEGDLNPDNSDVDKLFIQLVQTYNQLFEENPINASGVDAKAILSARLSKSRRLENLIAQLPGEKKNGLFGNLIALSLGLTPNFKSNFDLAEDAKLQLSKDTYDDDLDNLLAQIGDQYADLFLAAKNLSDAILLSDILRVNTEITKAPLSASMIKRYDEHHQDLTLLKALVRQQLPEKYKEIFFDQSKNGYAGYIDGGASQEEFYKFIKPILEKMDGTEELLVKLNREDLLRKQRTFDNGSIPHQIHLGELHAILRRQEDFYPFLKDNREKIEKILTFRIPYYVGPLARGNSRFAWMTRKSEETITPWNFEEVVDKGASAQSFIERMTNFDKNLPNEKVLPKHSLLYEYFTVYNELTKVKYVTEGMRKPAFLSGEQKKAIVDLLFKTNRKVTVKQLKEDYFKKIECFDSVEISGVEDRFNASLGTYHDLLKIIKDKDFLDNEENEDILEDIVLTLTLFEDREMIEERLKTYAHLFDDKVMKQLKRRRYTGWGRLSRKLINGIRDKQSGKTILDFLKSDGFANRNFMQLIHDDSLTFKEDIQKAQVSGQGDSLHEHIANLAGSPAIKKGILQTVKVVDELVKVMGRHKPENIVIEMARENQTTQKGQKNSRERMKRIEEGIKELGSQILKEHPVENTQLQNEKLYLYYLQNGRDMYVDQELDINRLSDYDVDHIVPQSFLKDDSIDNKVLTRSDKARGKSDNVPSEEVVKKMKNYWRQLLNAKLITQRKFDNLTKAERGGLSELDKAGFIKRQLVETRQITKHVAQILDSRMNTKYDENDKLIREVKVITLKSKLVSDFRKDFQFYKVREINNYHHAHDAYLNAVVGTALIKKYPKLESEFVYGDYKVYDVRKMIAKSEQEIGKATAKYFFYSNIMNFFKTEITLANGEIRKRPLIETNGETGEIVWDKGRDFATVRKVLSMPQVNIVKKTEVQTGGFSKESILPKRNSDKLIARKKDWDPKKYGGFDSPTVAYSVLVVAKVEKGKSKKLKSVKELLGITIMERSSFEKNPIDFLEAKGYKEVKKDLIIKLPKYSLFELENGRKRMLASAGELQKGNELALPSKYVNFLYLASHYEKLKGSPEDNEQKQLFVEQHKHYLDEIIEQISEFSKRVILADANLDKVLSAYNKHRDKPIREQAENIIHLFTLTNLGAPAAFKYFDTTIDRKRYTSTKEVLDATLIHQSITGLYETRIDLSQLGGDGGGSSGGLLGRDLLTKLKAQIQFSTEGPQVTWEDRPAMCLVLNLEEEYRLHEKPVPPSIDPSWLQLFPMVWAEKAGMGLANQVPPVVVELKSDASPVAVRQYPMSKEAREGIRPHIQRFLDLGILVPCQSPWNTPLLPVKKPGTNDYRPVQDLREVNKRVQDIHPTVPNPYNLLSSLPPSHTWYSVLDLKDAFFCLKLHPNSQPLFAFEWRDPEKGNTGQLTWTRLPQGFKNSPTLFNEALHRDLASFRALNPQVVMLQYVDDLLVAAPTYRDCKEGTRRLLQELSKLGYRVSAKKAQLCREEVTYLGYLLKGGKRWLTPARKATVMKIPTPTTPRQVREFLGKAGFCRLFIPGFASLAAPLYPLTRPKVPFTWTEAHQEAFGRIKEALLSAPALALPDLTKPFALYVDEKEGVARGVLTQTLGPWRRPVAYLSKKLDPVASGWPTCLKAIAAVALLLKDADKLTLGQNVLVIAPHNLESIVRQPPDRWMTNARMTHYQSLLLNERVSFAPPAILNPATLLPVESDDTPIHICSEILAEETGTRPDLRDQPLPGVPAWYTDGSSFIMDGRRQAGAAIVDNKRTVWASNLPEGTSAQKAELIALTQALRLAEGKSINIYTDSRYAFATAHVHGAIYKQRGWLTSAGKDIKNKEEILALLEAIHLPKRVAIIHCPGHQRGTDPVATGNRKADEAAKQAAQSTRILTETTKNAGKRTADGSEFEKRTADGSEFESPKKKAKVE

SEQ ID NO: 1698 - protein, 2122 aa, synthetic construct
MPAAKRVKLDGGDKKYSIGLDIGTNSVGWAVITDEYKVPSKKFKVLGNTDRHSIKKNLIGALLFDSGETAEATRLKRTARRRYTRRKNRICYLQEIFSNEMAKVDDSFFHRLEESFLVEEDKKHERHPIFGNIVDEVAYHEKYPTIYHLRKKLVDSTDKADLRLIYLALAHMIKFRGHFLIEGDLNPDNSDVDKLFIQLVQTYNQLFEENPINASGVDAKAILSARLSKSRRLENLIAQLPGEKKNGLFGNLIALSLGLTPNFKSNFDLAEDAKLQLSKDTYDDDLDNLLAQIGDQYADLFLAAKNLSDAILLSDILRVNTEITKAPLSASMIKRYDEHHQDLTLLKALVRQQLPEKYKEIFFDQSKNGYAGYIDGGASQEEFYKFIKPILEKMDGTEELLVKLNREDLLRKQRTFDNGSIPHQIHLGELHAILRRQEDFYPFLKDNREKIEKILTFRIPYYVGPLARGNSRFAWMTRKSEETITPWNFEEVVDKGASAQSFIERMTNFDKNLPNEKVLPKHSLLYEYFTVYNELTKVKYVTEGMRKPAFLSGEQKKAIVDLLFKTNRKVTVKQLKEDYFKKIECFDSVEISGVEDRFNASLGTYHDLLKIIKDKDFLDNEENEDILEDIVLTLTLFEDREMIEERLKTYAHLFDDKVMKQLKRRRYTGWGRLSRKLINGIRDKQSGKTILDFLKSDGFANRNFMQLIHDDSLTFKEDIQKAQVSGQGDSLHEHIANLAGSPAIKKGILQTVKVVDELVKVMGRHKPENIVIEMARENQTTQKGQKNSRERMKRIEEGIKELGSQILKEHPVENTQLQNEKLYLYYLQNGRDMYVDQELDINRLSDYDVDHIVPQSFLKDDSIDNKVLTRSDKARGKSDNVPSEEVVKKMKNYWRQLLNAKLITQRKFDNLTKAERGGLSELDKAGFIKRQLVETRQITKHVAQILDSRMNTKYDENDKLIREVKVITLKSKLVSDFRKDFQFYKVREINNYHHAHDAYLNAVVGTALIKKYPKLESEFVYGDYKVYDVRKMIAKSEQEIGKATAKYFFYSNIMNFFKTEITLANGEIRKRPLIETNGETGEIVWDKGRDFATVRKVLSMPQVNIVKKTEVQTGGFSKESILPKRNSDKLIARKKDWDPKKYGGFDSPTVAYSVLVVAKVEKGKSKKLKSVKELLGITIMERSSFEKNPIDFLEAKGYKEVKKDLIIKLPKYSLFELENGRKRMLASAGELQKGNELALPSKYVNFLYLASHYEKLKGSPEDNEQKQLFVEQHKHYLDEIIEQISEFSKRVILADANLDKVLSAYNKHRDKPIREQAENIIHLFTLTNLGAPAAFKYFDTTIDRKRYTSTKEVLDATLIHQSITGLYETRIDLSQLGGDGGGSSGGGGGLLGRDLLTKLKAQIQFSTEGPQVTWEDRPAMCLVLNLEEEYRLHEKPVPPSIDPSWLQLFPMVWAEKAGMGLANQVPPVVVELKSDASPVAVRQYPMSKEAREGIRPHIQRFLDLGILVPCQSPWNTPLLPVKKPGTNDYRPVQDLREVNKRVQDIHPTVPNPYNLLSSLPPSHTWYSVLDLKDAFFCLKLHPNSQPLFAFEWRDPEKGNTGQLTWTRLPQGFKNSPTLFNEALHRDLASFRALNPQVVMLQYVDDLLVAAPTYRDCKEGTRRLLQELSKLGYRVSAKKAQLCREEVTYLGYLLKGGKRWLTPARKATVMKIPTPTTPRQVREFLGKAGFCRLFIPGFASLAAPLYPLTRPKVPFTWTEAHQEAFGRIKEALLSAPALALPDLTKPFALYVDEKEGVARGVLTQTLGPWRRPVAYLSKKLDPVASGWPTCLKAIAAVALLLKDADKLTLGQNVLVIAPHNLESIVRQPPDRWMTNARMTHYQSLLLNERVSFAPPAILNPATLLPVESDDTPIHICSEILAEETGTRPDLRDQPLPGVPAWYTDGSSFIMDGRRQAGAAIVDNKRTVWASNLPEGTSAQKAELIALTQALRLAEGKSINIYTDSRYAFATAHVHGAIYKQRGWLTSAGKDIKNKEEILALLEAIHLPKRVAIIHCPGHQRGTDPVATGNRKADEAAKQAAQSTRILTETTKNAGKRTADGSEFEKRTADGSEFESPKKKAKVE

SEQ ID NO: 1699 - protein, 2127 aa, synthetic construct
MPAAKRVKLDGGDKKYSIGLDIGTNSVGWAVITDEYKVPSKKFKVLGNTDRHSIKKNLIGALLFDSGETAEATRLKRTARRRYTRRKNRICYLQEIFSNEMAKVDDSFFHRLEESFLVEEDKKHERHPIFGNIVDEVAYHEKYPTIYHLRKKLVDSTDKADLRLIYLALAHMIKFRGHFLIEGDLNPDNSDVDKLFIQLVQTYNQLFEENPINASGVDAKAILSARLSKSRRLENLIAQLPGEKKNGLFGNLIALSLGLTPNFKSNFDLAEDAKLQLSKDTYDDDLDNLLAQIGDQYADLFLAAKNLSDAILLSDILRVNTEITKAPLSASMIKRYDEHHQDLTLLKALVRQQLPEKYKEIFFDQSKNGYAGYIDGGASQEEFYKFIKPILEKMDGTEELLVKLNREDLLRKQRTFDNGSIPHQIHLGELHAILRRQEDFYPFLKDNREKIEKILTFRIPYYVGPLARGNSRFAWMTRKSEETITPWNFEEVVDKGASAQSFIERMTNFDKNLPNEKVLPKHSLLYEYFTVYNELTKVKYVTEGMRKPAFLSGEQKKAIVDLLFKTNRKVTVKQLKEDYFKKIECFDSVEISGVEDRFNASLGTYHDLLKIIKDKDFLDNEENEDILEDIVLTLTLFEDREMIEERLKTYAHLFDDKVMKQLKRRRYTGWGRLSRKLINGIRDKQSGKTILDFLKSDGFANRNFMQLIHDDSLTFKEDIQKAQVSGQGDSLHEHIANLAGSPAIKKGILQTVKVVDELVKVMGRHKPENIVIEMARENQTTQKGQKNSRERMKRIEEGIKELGSQILKEHPVENTQLQNEKLYLYYLQNGRDMYVDQELDINRLSDYDVDHIVPQSFLKDDSIDNKVLTRSDKARGKSDNVPSEEVVKKMKNYWRQLLNAKLITQRKFDNLTKAERGGLSELDKAGFIKRQLVETRQITKHVAQILDSRMNTKYDENDKLIREVKVITLKSKLVSDFRKDFQFYKVREINNYHHAHDAYLNAVVGTALIKKYPKLESEFVYGDYKVYDVRKMIAKSEQEIGKATAKYFFYSNIMNFFKTEITLANGEIRKRPLIETNGETGEIVWDKGRDFATVRKVLSMPQVNIVKKTEVQTGGFSKESILPKRNSDKLIARKKDWDPKKYGGFDSPTVAYSVLVVAKVEKGKSKKLKSVKELLGITIMERSSFEKNPIDFLEAKGYKEVKKDLIIKLPKYSLFELENGRKRMLASAGELQKGNELALPSKYVNFLYLASHYEKLKGSPEDNEQKQLFVEQHKHYLDEIIEQISEFSKRVILADANLDKVLSAYNKHRDKPIREQAENIIHLFTLTNLGAPAAFKYFDTTIDRKRYTSTKEVLDATLIHQSITGLYETRIDLSQLGGDGGPAPEAAAKGSSGGLLGRDLLTKLKAQIQFSTEGPQVTWEDRPAMCLVLNLEEEYRLHEKPVPPSIDPSWLQLFPMVWAEKAGMGLANQVPPVVVELKSDASPVAVRQYPMSKEAREGIRPHIQRFLDLGILVPCQSPWNTPLLPVKKPGTNDYRPVQDLREVNKRVQDIHPTVPNPYNLLSSLPPSHTWYSVLDLKDAFFCLKLHPNSQPLFAFEWRDPEKGNTGQLTWTRLPQGFKNSPTLFNEALHRDLASFRALNPQVVMLQYVDDLLVAAPTYRDCKEGTRRLLQELSKLGYRVSAKKAQLCREEVTYLGYLLKGGKRWLTPARKATVMKIPTPTTPRQVREFLGKAGFCRLFIPGFASLAAPLYPLTRPKVPFTWTEAHQEAFGRIKEALLSAPALALPDLTKPFALYVDEKEGVARGVLTQTLGPWRRPVAYLSKKLDPVASGWPTCLKAIAAVALLLKDADKLTLGQNVLVIAPHNLESIVRQPPDRWMTNARMTHYQSLLLNERVSFAPPAILNPATLLPVESDDTPIHICSEILAEETGTRPDLRDQPLPGVPAWYTDGSSFIMDGRRQAGAAIVDNKRTVWASNLPEGTSAQKAELIALTQALRLAEGKSINIYTDSRYAFATAHVHGAIYKQRGWLTSAGKDIKNKEEILALLEAIHLPKRVAIIHCPGHQRGTDPVATGNRKADEAAKQAAQSTRILTETTKNAGKRTADGSEFEKRTADGSEFESPKKKAKVE

SEQ ID NO: 1700 - protein, 2127 aa, synthetic construct
MPAAKRVKLDGGDKKYSIGLDIGTNSVGWAVITDEYKVPSKKFKVLGNTDRHSIKKNLIGALLFDSGETAEATRLKRTARRRYTRRKNRICYLQEIFSNEMAKVDDSFFHRLEESFLVEEDKKHERHPIFGNIVDEVAYHEKYPTIYHLRKKLVDSTDKADLRLIYLALAHMIKFRGHFLIEGDLNPDNSDVDKLFIQLVQTYNQLFEENPINASGVDAKAILSARLSKSRRLENLIAQLPGEKKNGLFGNLIALSLGLTPNFKSNFDLAEDAKLQLSKDTYDDDLDNLLAQIGDQYADLFLAAKNLSDAILLSDILRVNTEITKAPLSASMIKRYDEHHQDLTLLKALVRQQLPEKYKEIFFDQSKNGYAGYIDGGASQEEFYKFIKPILEKMDGTEELLVKLNREDLLRKQRTFDNGSIPHQIHLGELHAILRRQEDFYPFLKDNREKIEKILTFRIPYYVGPLARGNSRFAWMTRKSEETITPWNFEEVVDKGASAQSFIERMTNFDKNLPNEKVLPKHSLLYEYFTVYNELTKVKYVTEGMRKPAFLSGEQKKAIVDLLFKTNRKVTVKQLKEDYFKKIECFDSVEISGVEDRFNASLGTYHDLLKIIKDKDFLDNEENEDILEDIVLTLTLFEDREMIEERLKTYAHLFDDKVMKQLKRRRYTGWGRLSRKLINGIRDKQSGKTILDFLKSDGFANRNFMQLIHDDSLTFKEDIQKAQVSGQGDSLHEHIANLAGSPAIKKGILQTVKVVDELVKVMGRHKPENIVIEMARENQTTQKGQKNSRERMKRIEEGIKELGSQILKEHPVENTQLQNEKLYLYYLQNGRDMYVDQELDINRLSDYDVDHIVPQSFLKDDSIDNKVLTRSDKARGKSDNVPSEEVVKKMKNYWRQLLNAKLITQRKFDNLTKAERGGLSELDKAGFIKRQLVETRQITKHVAQILDSRMNTKYDENDKLIREVKVITLKSKLVSDFRKDFQFYKVREINNYHHAHDAYLNAVVGTALIKKYPKLESEFVYGDYKVYDVRKMIAKSEQEIGKATAKYFFYSNIMNFFKTEITLANGEIRKRPLIETNGETGEIVWDKGRDFATVRKVLSMPQVNIVKKTEVQTGGFSKESILPKRNSDKLIARKKDWDPKKYGGFDSPTVAYSVLVVAKVEKGKSKKLKSVKELLGITIMERSSFEKNPIDFLEAKGYKEVKKDLIIKLPKYSLFELENGRKRMLASAGELQKGNELALPSKYVNFLYLASHYEKLKGSPEDNEQKQLFVEQHKHYLDEIIEQISEFSKRVILADANLDKVLSAYNKHRDKPIREQAENIIHLFTLTNLGAPAAFKYFDTTIDRKRYTSTKEVLDATLIHQSITGLYETRIDLSQLGGDGGEAAAKGSSGGGGGLLGRDLLTKLKAQIQFSTEGPQVTWEDRPAMCLVLNLEEEYRLHEKPVPPSIDPSWLQLFPMVWAEKAGMGLANQVPPVVVELKSDASPVAVRQYPMSKEAREGIRPHIQRFLDLGILVPCQSPWNTPLLPVKKPGTNDYRPVQDLREVNKRVQDIHPTVPNPYNLLSSLPPSHTWYSVLDLKDAFFCLKLHPNSQPLFAFEWRDPEKGNTGQLTWTRLPQGFKNSPTLFNEALHRDLASFRALNPQVVMLQYVDDLLVAAPTYRDCKEGTRRLLQELSKLGYRVSAKKAQLCREEVTYLGYLLKGGKRWLTPARKATVMKIPTPTTPRQVREFLGKAGFCRLFIPGFASLAAPLYPLTRPKVPFTWTEAHQEAFGRIKEALLSAPALALPDLTKPFALYVDEKEGVARGVLTQTLGPWRRPVAYLSKKLDPVASGWPTCLKAIAAVALLLKDADKLTLGQNVLVIAPHNLESIVRQPPDRWMTNARMTHYQSLLLNERVSFAPPAILNPATLLPVESDDTPIHICSEILAEETGTRPDLRDQPLPGVPAWYTDGSSFIMDGRRQAGAAIVDNKRTVWASNLPEGTSAQKAELIALTQALRLAEGKSINIYTDSRYAFATAHVHGAIYKQRGWLTSAGKDIKNKEEILALLEAIHLPKRVAIIHCPGHQRGTDPVATGNRKADEAAKQAAQSTRILTETTKNAGKRTADGSEFEKRTADGSEFESPKKKAKVE

SEQ ID NO: 1701 - protein, 2129 aa, synthetic construct
MPAAKRVKLDGGDKKYSIGLDIGTNSVGWAVITDEYKVPSKKFKVLGNTDRHSIKKNLIGALLFDSGETAEATRLKRTARRRYTRRKNRICYLQEIFSNEMAKVDDSFFHRLEESFLVEEDKKHERHPIFGNIVDEVAYHEKYPTIYHLRKKLVDSTDKADLRLIYLALAHMIKFRGHFLIEGDLNPDNSDVDKLFIQLVQTYNQLFEENPINASGVDAKAILSARLSKSRRLENLIAQLPGEKKNGLFGNLIALSLGLTPNFKSNFDLAEDAKLQLSKDTYDDDLDNLLAQIGDQYADLFLAAKNLSDAILLSDILRVNTEITKAPLSASMIKRYDEHHQDLTLLKALVRQQLPEKYKEIFFDQSKNGYAGYIDGGASQEEFYKFIKPILEKMDGTEELLVKLNREDLLRKQRTFDNGSIPHQIHLGELHAILRRQEDFYPFLKDNREKIEKILTFRIPYYVGPLARGNSRFAWMTRKSEETITPWNFEEVVDKGASAQSFIERMTNFDKNLPNEKVLPKHSLLYEYFTVYNELTKVKYVTEGMRKPAFLSGEQKKAIVDLLFKTNRKVTVKQLKEDYFKKIECFDSVEISGVEDRFNASLGTYHDLLKIIKDKDFLDNEENEDILEDIVLTLTLFEDREMIEERLKTYAHLFDDKVMKQLKRRRYTGWGRLSRKLINGIRDKQSGKTILDFLKSDGFANRNFMQLIHDDSLTFKEDIQKAQVSGQGDSLHEHIANLAGSPAIKKGILQTVKVVDELVKVMGRHKPENIVIEMARENQTTQKGQKNSRERMKRIEEGIKELGSQILKEHPVENTQLQNEKLYLYYLQNGRDMYVDQELDINRLSDYDVDHIVPQSFLKDDSIDNKVLTRSDKARGKSDNVPSEEVVKKMKNYWRQLLNAKLITQRKFDNLTKAERGGLSELDKAGFIKRQLVETRQITKHVAQILDSRMNTKYDENDKLIREVKVITLKSKLVSDFRKDFQFYKVREINNYHHAHDAYLNAVVGTALIKKYPKLESEFVYGDYKVYDVRKMIAKSEQEIGKATAKYFFYSNIMNFFKTEITLANGEIRKRPLIETNGETGEIVWDKGRDFATVRKVLSMPQVNIVKKTEVQTGGFSKESILPKRNSDKLIARKKDWDPKKYGGFDSPTVAYSVLVVAKVEKGKSKKLKSVKELLGITIMERSSFEKNPIDFLEAKGYKEVKKDLIIKLPKYSLFELENGRKRMLASAGELQKGNELALPSKYVNFLYLASHYEKLKGSPEDNEQKQLFVEQHKHYLDEIIEQISEFSKRVILADANLDKVLSAYNKHRDKPIREQAENIIHLFTLTNLGAPAAFKYFDTTIDRKRYTSTKEVLDATLIHQSITGLYETRIDLSQLGGDGGPAPAPAPAPAPAPGGLLGRDLLTKLKAQIQFSTEGPQVTWEDRPAMCLVLNLEEEYRLHEKPVPPSIDPSWLQLFPMVWAEKAGMGLANQVPPVVVELKSDASPVAVRQYPMSKEAREGIRPHIQRFLDLGILVPCQSPWNTPLLPVKKPGTNDYRPVQDLREVNKRVQDIHPTVPNPYNLLSSLPPSHTWYSVLDLKDAFFCLKLHPNSQPLFAFEWRDPEKGNTGQLTWTRLPQGFKNSPTLFNEALHRDLASFRALNPQVVMLQYVDDLLVAAPTYRDCKEGTRRLLQELSKLGYRVSAKKAQLCREEVTYLGYLLKGGKRWLTPARKATVMKIPTPTTPRQVREFLGKAGFCRLFIPGFASLAAPLYPLTRPKVPFTWTEAHQEAFGRIKEALLSAPALALPDLTKPFALYVDEKEGVARGVLTQTLGPWRRPVAYLSKKLDPVASGWPTCLKAIAAVALLLKDADKLTLGQNVLVIAPHNLESIVRQPPDRWMTNARMTHYQSLLLNERVSFAPPAILNPATLLPVESDDTPIHICSEILAEETGTRPDLRDQPLPGVPAWYTDGSSFIMDGRRQAGAAIVDNKRTVWASNLPEGTSAQKAELIALTQALRLAEGKSINIYTDSRYAFATAHVHGAIYKQRGWLTSAGKDIKNKEEILALLEAIHLPKRVAIIHCPGHQRGTDPVATGNRKADEAAKQAAQSTRILTETTKNAGKRTADGSEFEKRTADGSEFESPKKKAKVE

SEQ ID NO: 1702 - protein, 2127 aa, synthetic construct
MPAAKRVKLDGGDKKYSIGLDIGTNSVGWAVITDEYKVPSKKFKVLGNTDRHSIKKNLIGALLFDSGETAEATRLKRTARRRYTRRKNRICYLQEIFSNEMAKVDDSFFHRLEESFLVEEDKKHERHPIFGNIVDEVAYHEKYPTIYHLRKKLVDSTDKADLRLIYLALAHMIKFRGHFLIEGDLNPDNSDVDKLFIQLVQTYNQLFEENPINASGVDAKAILSARLSKSRRLENLIAQLPGEKKNGLFGNLIALSLGLTPNFKSNFDLAEDAKLQLSKDTYDDDLDNLLAQIGDQYADLFLAAKNLSDAILLSDILRVNTEITKAPLSASMIKRYDEHHQDLTLLKALVRQQLPEKYKEIFFDQSKNGYAGYIDGGASQEEFYKFIKPILEKMDGTEELLVKLNREDLLRKQRTFDNGSIPHQIHLGELHAILRRQEDFYPFLKDNREKIEKILTFRIPYYVGPLARGNSRFAWMTRKSEETITPWNFEEVVDKGASAQSFIERMTNFDKNLPNEKVLPKHSLLYEYFTVYNELTKVKYVTEGMRKPAFLSGEQKKAIVDLLFKTNRKVTVKQLKEDYFKKIECFDSVEISGVEDRFNASLGTYHDLLKIIKDKDFLDNEENEDILEDIVLTLTLFEDREMIEERLKTYAHLFDDKVMKQLKRRRYTGWGRLSRKLINGIRDKQSGKTILDFLKSDGFANRNFMQLIHDDSLTFKEDIQKAQVSGQGDSLHEHIANLAGSPAIKKGILQTVKVVDELVKVMGRHKPENIVIEMARENQTTQKGQKNSRERMKRIEEGIKELGSQILKEHPVENTQLQNEKLYLYYLQNGRDMYVDQELDINRLSDYDVDHIVPQSFLKDDSIDNKVLTRSDKARGKSDNVPSEEVVKKMKNYWRQLLNAKLITQRKFDNLTKAERGGLSELDKAGFIKRQLVETRQITKHVAQILDSRMNTKYDENDKLIREVKVITLKSKLVSDFRKDFQFYKVREINNYHHAHDAYLNAVVGTALIKKYPKLESEFVYGDYKVYDVRKMIAKSEQEIGKATAKYFFYSNIMNFFKTEITLANGEIRKRPLIETNGETGEIVWDKGRDFATVRKVLSMPQVNIVKKTEVQTGGFSKESILPKRNSDKLIARKKDWDPKKYGGFDSPTVAYSVLVVAKVEKGKSKKLKSVKELLGITIMERSSFEKNPIDFLEAKGYKEVKKDLIIKLPKYSLFELENGRKRMLASAGELQKGNELALPSKYVNFLYLASHYEKLKGSPEDNEQKQLFVEQHKHYLDEIIEQISEFSKRVILADANLDKVLSAYNKHRDKPIREQAENIIHLFTLTNLGAPAAFKYFDTTIDRKRYTSTKEVLDATLIHQSITGLYETRIDLSQLGGDGGGGGEAAAKGGSGGLLGRDLLTKLKAQIQFSTEGPQVTWEDRPAMCLVLNLEEEYRLHEKPVPPSIDPSWLQLFPMVWAEKAGMGLANQVPPVVVELKSDASPVAVRQYPMSKEAREGIRPHIQRFLDLGILVPCQSPWNTPLLPVKKPGTNDYRPVQDLREVNKRVQDIHPTVPNPYNLLSSLPPSHTWYSVLDLKDAFFCLKLHPNSQPLFAFEWRDPEKGNTGQLTWTRLPQGFKNSPTLFNEALHRDLASFRALNPQVVMLQYVDDLLVAAPTYRDCKEGTRRLLQELSKLGYRVSAKKAQLCREEVTYLGYLLKGGKRWLTPARKATVMKIPTPTTPRQVREFLGKAGFCRLFIPGFASLAAPLYPLTRPKVPFTWTEAHQEAFGRIKEALLSAPALALPDLTKPFALYVDEKEGVARGVLTQTLGPWRRPVAYLSKKLDPVASGWPTCLKAIAAVALLLKDADKLTLGQNVLVIAPHNLESIVRQPPDRWMTNARMTHYQSLLLNERVSFAPPAILNPATLLPVESDDTPIHICSEILAEETGTRPDLRDQPLPGVPAWYTDGSSFIMDGRRQAGAAIVDNKRTVWASNLPEGTSAQKAELIALTQALRLAEGKSINIYTDSRYAFATAHVHGAIYKQRGWLTSAGKDIKNKEEILALLEAIHLPKRVAIIHCPGHQRGTDPVATGNRKADEAAKQAAQSTRILTETTKNAGKRTADGSEFEKRTADGSEFESPKKKAKVE

SEQ ID NO: 1703 - protein, 2122 aa, synthetic construct
MPAAKRVKLDGGDKKYSIGLDIGTNSVGWAVITDEYKVPSKKFKVLGNTDRHSIKKNLIGALLFDSGETAEATRLKRTARRRYTRRKNRICYLQEIFSNEMAKVDDSFFHRLEESFLVEEDKKHERHPIFGNIVDEVAYHEKYPTIYHLRKKLVDSTDKADLRLIYLALAHMIKFRGHFLIEGDLNPDNSDVDKLFIQLVQTYNQLFEENPINASGVDAKAILSARLSKSRRLENLIAQLPGEKKNGLFGNLIALSLGLTPNFKSNFDLAEDAKLQLSKDTYDDDLDNLLAQIGDQYADLFLAAKNLSDAILLSDILRVNTEITKAPLSASMIKRYDEHHQDLTLLKALVRQQLPEKYKEIFFDQSKNGYAGYIDGGASQEEFYKFIKPILEKMDGTEELLVKLNREDLLRKQRTFDNGSIPHQIHLGELHAILRRQEDFYPFLKDNREKIEKILTFRIPYYVGPLARGNSRFAWMTRKSEETITPWNFEEVVDKGASAQSFIERMTNFDKNLPNEKVLPKHSLLYEYFTVYNELTKVKYVTEGMRKPAFLSGEQKKAIVDLLFKTNRKVTVKQLKEDYFKKIECFDSVEISGVEDRFNASLGTYHDLLKIIKDKDFLDNEENEDILEDIVLTLTLFEDREMIEERLKTYAHLFDDKVMKQLKRRRYTGWGRLSRKLINGIRDKQSGKTILDFLKSDGFANRNFMQLIHDDSLTFKEDIQKAQVSGQGDSLHEHIANLAGSPAIKKGILQTVKVVDELVKVMGRHKPENIVIEMARENQTTQKGQKNSRERMKRIEEGIKELGSQILKEHPVENTQLQNEKLYLYYLQNGRDMYVDQELDINRLSDYDVDHIVPQSFLKDDSIDNKVLTRSDKARGKSDNVPSEEVVKKMKNYWRQLLNAKLITQRKFDNLTKAERGGLSELDKAGFIKRQLVETRQITKHVAQILDSRMNTKYDENDKLIREVKVITLKSKLVSDFRKDFQFYKVREINNYHHAHDAYLNAVVGTALIKKYPKLESEFVYGDYKVYDVRKMIAKSEQEIGKATAKYFFYSNIMNFFKTEITLANGEIRKRPLIETNGETGEIVWDKGRDFATVRKVLSMPQVNIVKKTEVQTGGFSKESILPKRNSDKLIARKKDWDPKKYGGFDSPTVAYSVLVVAKVEKGKSKKLKSVKELLGITIMERSSFEKNPIDFLEAKGYKEVKKDLIIKLPKYSLFELENGRKRMLASAGELQKGNELALPSKYVNFLYLASHYEKLKGSPEDNEQKQLFVEQHKHYLDEIIEQISEFSKRVILADANLDKVLSAYNKHRDKPIREQAENIIHLFTLTNLGAPAAFKYFDTTIDRKRYTSTKEVLDATLIHQSITGLYETRIDLSQLGGDGGGGSPAPGGLLGRDLLTKLKAQIQFSTEGPQVTWEDRPAMCLVLNLEEEYRLHEKPVPPSIDPSWLQLFPMVWAEKAGMGLANQVPPVVVELKSDASPVAVRQYPMSKEAREGIRPHIQRFLDLGILVPCQSPWNTPLLPVKKPGTNDYRPVQDLREVNKRVQDIHPTVPNPYNLLSSLPPSHTWYSVLDLKDAFFCLKLHPNSQPLFAFEWRDPEKGNTGQLTWTRLPQGFKNSPTLFNEALHRDLASFRALNPQVVMLQYVDDLLVAAPTYRDCKEGTRRLLQELSKLGYRVSAKKAQLCREEVTYLGYLLKGGKRWLTPARKATVMKIPTPTTPRQVREFLGKAGFCRLFIPGFASLAAPLYPLTRPKVPFTWTEAHQEAFGRIKEALLSAPALALPDLTKPFALYVDEKEGVARGVLTQTLGPWRRPVAYLSKKLDPVASGWPTCLKAIAAVALLLKDADKLTLGQNVLVIAPHNLESIVRQPPDRWMTNARMTHYQSLLLNERVSFAPPAILNPATLLPVESDDTPIHICSEILAEETGTRPDLRDQPLPGVPAWYTDGSSFIMDGRRQAGAAIVDNKRTVWASNLPEGTSAQKAELIALTQALRLAEGKSINIYTDSRYAFATAHVHGAIYKQRGWLTSAGKDIKNKEEILALLEAIHLPKRVAIIHCPGHQRGTDPVATGNRKADEAAKQAAQSTRILTETTKNAGKRTADGSEFEKRTADGSEFESPKKKAKVE

SEQ ID NO: 1704 - protein, 2127 aa, synthetic construct
MPAAKRVKLDGGDKKYSIGLDIGTNSVGWAVITDEYKVPSKKFKVLGNTDRHSIKKNLIGALLFDSGETAEATRLKRTARRRYTRRKNRICYLQEIFSNEMAKVDDSFFHRLEESFLVEEDKKHERHPIFGNIVDEVAYHEKYPTIYHLRKKLVDSTDKADLRLIYLALAHMIKFRGHFLIEGDLNPDNSDVDKLFIQLVQTYNQLFEENPINASGVDAKAILSARLSKSRRLENLIAQLPGEKKNGLFGNLIALSLGLTPNFKSNFDLAEDAKLQLSKDTYDDDLDNLLAQIGDQYADLFLAAKNLSDAILLSDILRVNTEITKAPLSASMIKRYDEHHQDLTLLKALVRQQLPEKYKEIFFDQSKNGYAGYIDGGASQEEFYKFIKPILEKMDGTEELLVKLNREDLLRKQRTFDNGSIPHQIHLGELHAILRRQEDFYPFLKDNREKIEKILTFRIPYYVGPLARGNSRFAWMTRKSEETITPWNFEEVVDKGASAQSFIERMTNFDKNLPNEKVLPKHSLLYEYFTVYNELTKVKYVTEGMRKPAFLSGEQKKAIVDLLFKTNRKVTVKQLKEDYFKKIECFDSVEISGVEDRFNASLGTYHDLLKIIKDKDFLDNEENEDILEDIVLTLTLFEDREMIEERLKTYAHLFDDKVMKQLKRRRYTGWGRLSRKLINGIRDKQSGKTILDFLKSDGFANRNFMQLIHDDSLTFKEDIQKAQVSGQGDSLHEHIANLAGSPAIKKGILQTVKVVDELVKVMGRHKPENIVIEMARENQTTQKGQKNSRERMKRIEEGIKELGSQILKEHPVENTQLQNEKLYLYYLQNGRDMYVDQELDINRLSDYDVDHIVPQSFLKDDSIDNKVLTRSDKARGKSDNVPSEEVVKKMKNYWRQLLNAKLITQRKFDNLTKAERGGLSELDKAGFIKRQLVETRQITKHVAQILDSRMNTKYDENDKLIREVKVITLKSKLVSDFRKDFQFYKVREINNYHHAHDAYLNAVVGTALIKKYPKLESEFVYGDYKVYDVRKMIAKSEQEIGKATAKYFFYSNIMNFFKTEITLANGEIRKRPLIETNGETGEIVWDKGRDFATVRKVLSMPQVNIVKKTEVQTGGFSKESILPKRNSDKLIARKKDWDPKKYGGFDSPTVAYSVLVVAKVEKGKSKKLKSVKELLGITIMERSSFEKNPIDFLEAKGYKEVKKDLIIKLPKYSLFELENGRKRMLASAGELQKGNELALPSKYVNFLYLASHYEKLKGSPEDNEQKQLFVEQHKHYLDEIIEQISEFSKRVILADANLDKVLSAYNKHRDKPIREQAENIIHLFTLTNLGAPAAFKYFDTTIDRKRYTSTKEVLDATLIHQSITGLYETRIDLSQLGGDGGGGSEAAAKPAPGGLLGRDLLTKLKAQIQFSTEGPQVTWEDRPAMCLVLNLEEEYRLHEKPVPPSIDPSWLQLFPMVWAEKAGMGLANQVPPVVVELKSDASPVAVRQYPMSKEAREGIRPHIQRFLDLGILVPCQSPWNTPLLPVKKPGTNDYRPVQDLREVNKRVQDIHPTVPNPYNLLSSLPPSHTWYSVLDLKDAFFCLKLHPNSQPLFAFEWRDPEKGNTGQLTWTRLPQGFKNSPTLFNEALHRDLASFRALNPQVVMLQYVDDLLVAAPTYRDCKEGTRRLLQELSKLGYRVSAKKAQLCREEVTYLGYLLKGGKRWLTPARKATVMKIPTPTTPRQVREFLGKAGFCRLFIPGFASLAAPLYPLTRPKVPFTWTEAHQEAFGRIKEALLSAPALALPDLTKPFALYVDEKEGVARGVLTQTLGPWRRPVAYLSKKLDPVASGWPTCLKAIAAVALLLKDADKLTLGQNVLVIAPHNLESIVRQPPDRWMTNARMTHYQSLLLNERVSFAPPAILNPATLLPVESDDTPIHICSEILAEETGTRPDLRDQPLPGVPAWYTDGSSFIMDGRRQAGAAIVDNKRTVWASNLPEGTSAQKAELIALTQALRLAEGKSINIYTDSRYAFATAHVHGAIYKQRGWLTSAGKDIKNKEEILALLEAIHLPKRVAIIHCPGHQRGTDPVATGNRKADEAAKQAAQSTRILTETTKNAGKRTADGSEFEKRTADGSEFESPKKKAKVE

SEQ ID NO: 1705 - protein, 2121 aa, synthetic construct
MPAAKRVKLDGGDKKYSIGLDIGTNSVGWAVITDEYKVPSKKFKVLGNTDRHSIKKNLIGALLFDSGETAEATRLKRTARRRYTRRKNRICYLQEIFSNEMAKVDDSFFHRLEESFLVEEDKKHERHPIFGNIVDEVAYHEKYPTIYHLRKKLVDSTDKADLRLIYLALAHMIKFRGHFLIEGDLNPDNSDVDKLFIQLVQTYNQLFEENPINASGVDAKAILSARLSKSRRLENLIAQLPGEKKNGLFGNLIALSLGLTPNFKSNFDLAEDAKLQLSKDTYDDDLDNLLAQIGDQYADLFLAAKNLSDAILLSDILRVNTEITKAPLSASMIKRYDEHHQDLTLLKALVRQQLPEKYKEIFFDQSKNGYAGYIDGGASQEEFYKFIKPILEKMDGTEELLVKLNREDLLRKQRTFDNGSIPHQIHLGELHAILRRQEDFYPFLKDNREKIEKILTFRIPYYVGPLARGNSRFAWMTRKSEETITPWNFEEVVDKGASAQSFIERMTNFDKNLPNEKVLPKHSLLYEYFTVYNELTKVKYVTEGMRKPAFLSGEQKKAIVDLLFKTNRKVTVKQLKEDYFKKIECFDSVEISGVEDRFNASLGTYHDLLKIIKDKDFLDNEENEDILEDIVLTLTLFEDREMIEERLKTYAHLFDDKVMKQLKRRRYTGWGRLSRKLINGIRDKQSGKTILDFLKSDGFANRNFMQLIHDDSLTFKEDIQKAQVSGQGDSLHEHIANLAGSPAIKKGILQTVKVVDELVKVMGRHKPENIVIEMARENQTTQKGQKNSRERMKRIEEGIKELGSQILKEHPVENTQLQNEKLYLYYLQNGRDMYVDQELDINRLSDYDVDHIVPQSFLKDDSIDNKVLTRSDKARGKSDNVPSEEVVKKMKNYWRQLLNAKLITQRKFDNLTKAERGGLSELDKAGFIKRQLVETRQITKHVAQILDSRMNTKYDENDKLIREVKVITLKSKLVSDFRKDFQFYKVREINNYHHAHDAYLNAVVGTALIKKYPKLESEFVYGDYKVYDVRKMIAKSEQEIGKATAKYFFYSNIMNFFKTEITLANGEIRKRPLIETNGETGEIVWDKGRDFATVRKVLSMPQVNIVKKTEVQTGGFSKESILPKRNSDKLIARKKDWDPKKYGGFDSPTVAYSVLVVAKVEKGKSKKLKSVKELLGITIMERSSFEKNPIDFLEAKGYKEVKKDLIIKLPKYSLFELENGRKRMLASAGELQKGNELALPSKYVNFLYLASHYEKLKGSPEDNEQKQLFVEQHKHYLDEIIEQISEFSKRVILADANLDKVLSAYNKHRDKPIREQAENIIHLFTLTNLGAPAAFKYFDTTIDRKRYTSTKEVLDATLIHQSITGLYETRIDLSQLGGDGGGGGGSGGLLGRDLLTKLKAQIQFSTEGPQVTWEDRPAMCLVLNLEEEYRLHEKPVPPSIDPSWLQLFPMVWAEKAGMGLANQVPPVVVELKSDASPVAVRQYPMSKEAREGIRPHIQRFLDLGILVPCQSPWNTPLLPVKKPGTNDYRPVQDLREVNKRVQDIHPTVPNPYNLLSSLPPSHTWYSVLDLKDAFFCLKLHPNSQPLFAFEWRDPEKGNTGQLTWTRLPQGFKNSPTLFNEALHRDLASFRALNPQVVMLQYVDDLLVAAPTYRDCKEGTRRLLQELSKLGYRVSAKKAQLCREEVTYLGYLLKGGKRWLTPARKATVMKIPTPTTPRQVREFLGKAGFCRLFIPGFASLAAPLYPLTRPKVPFTWTEAHQEAFGRIKEALLSAPALALPDLTKPFALYVDEKEGVARGVLTQTLGPWRRPVAYLSKKLDPVASGWPTCLKAIAAVALLLKDADKLTLGQNVLVIAPHNLESIVRQPPDRWMTNARMTHYQSLLLNERVSFAPPAILNPATLLPVESDDTPIHICSEILAEETGTRPDLRDQPLPGVPAWYTDGSSFIMDGRRQAGAAIVDNKRTVWASNLPEGTSAQKAELIALTQALRLAEGKSINIYTDSRYAFATAHVHGAIYKQRGWLTSAGKDIKNKEEILALLEAIHLPKRVAIIHCPGHQRGTDPVATGNRKADEAAKQAAQSTRILTETTKNAGKRTADGSEFEKRTADGSEFESPKKKAKVE

SEQ ID NO: 1706 - protein, 2146 aa, synthetic construct
MPAAKRVKLDGGDKKYSIGLDIGTNSVGWAVITDEYKVPSKKFKVLGNTDRHSIKKNLIGALLFDSGETAEATRLKRTARRRYTRRKNRICYLQEIFSNEMAKVDDSFFHRLEESFLVEEDKKHERHPIFGNIVDEVAYHEKYPTIYHLRKKLVDSTDKADLRLIYLALAHMIKFRGHFLIEGDLNPDNSDVDKLFIQLVQTYNQLFEENPINASGVDAKAILSARLSKSRRLENLIAQLPGEKKNGLFGNLIALSLGLTPNFKSNFDLAEDAKLQLSKDTYDDDLDNLLAQIGDQYADLFLAAKNLSDAILLSDILRVNTEITKAPLSASMIKRYDEHHQDLTLLKALVRQQLPEKYKEIFFDQSKNGYAGYIDGGASQEEFYKFIKPILEKMDGTEELLVKLNREDLLRKQRTFDNGSIPHQIHLGELHAILRRQEDFYPFLKDNREKIEKILTFRIPYYVGPLARGNSRFAWMTRKSEETITPWNFEEVVDKGASAQSFIERMTNFDKNLPNEKVLPKHSLLYEYFTVYNELTKVKYVTEGMRKPAFLSGEQKKAIVDLLFKTNRKVTVKQLKEDYFKKIECFDSVEISGVEDRFNASLGTYHDLLKIIKDKDFLDNEENEDILEDIVLTLTLFEDREMIEERLKTYAHLFDDKVMKQLKRRRYTGWGRLSRKLINGIRDKQSGKTILDFLKSDGFANRNFMQLIHDDSLTFKEDIQKAQVSGQGDSLHEHIANLAGSPAIKKGILQTVKVVDELVKVMGRHKPENIVIEMARENQTTQKGQKNSRERMKRIEEGIKELGSQILKEHPVENTQLQNEKLYLYYLQNGRDMYVDQELDINRLSDYDVDHIVPQSFLKDDSIDNKVLTRSDKARGKSDNVPSEEVVKKMKNYWRQLLNAKLITQRKFDNLTKAERGGLSELDKAGFIKRQLVETRQITKHVAQILDSRMNTKYDENDKLIREVKVITLKSKLVSDFRKDFQFYKVREINNYHHAHDAYLNAVVGTALIKKYPKLESEFVYGDYKVYDVRKMIAKSEQEIGKATAKYFFYSNIMNFFKTEITLANGEIRKRPLIETNGETGEIVWDKGRDFATVRKVLSMPQVNIVKKTEVQTGGFSKESILPKRNSDKLIARKKDWDPKKYGGFDSPTVAYSVLVVAKVEKGKSKKLKSVKELLGITIMERSSFEKNPIDFLEAKGYKEVKKDLIIKLPKYSLFELENGRKRMLASAGELQKGNELALPSKYVNFLYLASHYEKLKGSPEDNEQKQLFVEQHKHYLDEIIEQISEFSKRVILADANLDKVLSAYNKHRDKPIREQAENIIHLFTLTNLGAPAAFKYFDTTIDRKRYTSTKEVLDATLIHQSITGLYETRIDLSQLGGDGGEAAAKEAAAKEAAAKEAAAKEAAAKEAAAKGGLLGRDLLTKLKAQIQFSTEGPQVTWEDRPAMCLVLNLEEEYRLHEKPVPPSIDPSWLQLFPMVWAEKAGMGLANQVPPVVVELKSDASPVAVRQYPMSKEAREGIRPHIQRFLDLGILVPCQSPWNTPLLPVKKPGTNDYRPVQDLREVNKRVQDIHPTVPNPYNLLSSLPPSHTWYSVLDLKDAFFCLKLHPNSQPLFAFEWRDPEKGNTGQLTWTRLPQGFKNSPTLFNEALHRDLASFRALNPQVVMLQYVDDLLVAAPTYRDCKEGTRRLLQELSKLGYRVSAKKAQLCREEVTYLGYLLKGGKRWLTPARKATVMKIPTPTTPRQVREFLGKAGFCRLFIPGFASLAAPLYPLTRPKVPFTWTEAHQEAFGRIKEALLSAPALALPDLTKPFALYVDEKEGVARGVLTQTLGPWRRPVAYLSKKLDPVASGWPTCLKAIAAVALLLKDADKLTLGQNVLVIAPHNLESIVRQPPDRWMTNARMTHYQSLLLNERVSFAPPAILNPATLLPVESDDTPIHICSEILAEETGTRPDLRDQPLPGVPAWYTDGSSFIMDGRRQAGAAIVDNKRTVWASNLPEGTSAQKAELIALTQALRLAEGKSINIYTDSRYAFATAHVHGAIYKQRGWLTSAGKDIKNKEEILALLEAIHLPKRVAIIHCPGHQRGTDPVATGNRKADEAAKQAAQSTRILTETTKNAGKRTADGSEFEKRTADGSEFESPKKKAKVE

SEQ ID NO: 1707 - protein, 2122 aa, synthetic construct
MPAAKRVKLDGGDKKYSIGLDIGTNSVGWAVITDEYKVPSKKFKVLGNTDRHSIKKNLIGALLFDSGETAEATRLKRTARRRYTRRKNRICYLQEIFSNEMAKVDDSFFHRLEESFLVEEDKKHERHPIFGNIVDEVAYHEKYPTIYHLRKKLVDSTDKADLRLIYLALAHMIKFRGHFLIEGDLNPDNSDVDKLFIQLVQTYNQLFEENPINASGVDAKAILSARLSKSRRLENLIAQLPGEKKNGLFGNLIALSLGLTPNFKSNFDLAEDAKLQLSKDTYDDDLDNLLAQIGDQYADLFLAAKNLSDAILLSDILRVNTEITKAPLSASMIKRYDEHHQDLTLLKALVRQQLPEKYKEIFFDQSKNGYAGYIDGGASQEEFYKFIKPILEKMDGTEELLVKLNREDLLRKQRTFDNGSIPHQIHLGELHAILRRQEDFYPFLKDNREKIEKILTFRIPYYVGPLARGNSRFAWMTRKSEETITPWNFEEVVDKGASAQSFIERMTNFDKNLPNEKVLPKHSLLYEYFTVYNELTKVKYVTEGMRKPAFLSGEQKKAIVDLLFKTNRKVTVKQLKEDYFKKIECFDSVEISGVEDRFNASLGTYHDLLKIIKDKDFLDNEENEDILEDIVLTLTLFEDREMIEERLKTYAHLFDDKVMKQLKRRRYTGWGRLSRKLINGIRDKQSGKTILDFLKSDGFANRNFMQLIHDDSLTFKEDIQKAQVSGQGDSLHEHIANLAGSPAIKKGILQTVKVVDELVKVMGRHKPENIVIEMARENQTTQKGQKNSRERMKRIEEGIKELGSQILKEHPVENTQLQNEKLYLYYLQNGRDMYVDQELDINRLSDYDVDHIVPQSFLKDDSIDNKVLTRSDKARGKSDNVPSEEVVKKMKNYWRQLLNAKLITQRKFDNLTKAERGGLSELDKAGFIKRQLVETRQITKHVAQILDSRMNTKYDENDKLIREVKVITLKSKLVSDFRKDFQFYKVREINNYHHAHDAYLNAVVGTALIKKYPKLESEFVYGDYKVYDVRKMIAKSEQEIGKATAKYFFYSNIMNFFKTEITLANGEIRKRPLIETNGETGEIVWDKGRDFATVRKVLSMPQVNIVKKTEVQTGGFSKESILPKRNSDKLIARKKDWDPKKYGGFDSPTVAYSVLVVAKVEKGKSKKLKSVKELLGITIMERSSFEKNPIDFLEAKGYKEVKKDLIIKLPKYSLFELENGRKRMLASAGELQKGNELALPSKYVNFLYLASHYEKLKGSPEDNEQKQLFVEQHKHYLDEIIEQISEFSKRVILADANLDKVLSAYNKHRDKPIREQAENIIHLFTLTNLGAPAAFKYFDTTIDRKRYTSTKEVLDATLIHQSITGLYETRIDLSQLGGDGGGGGGGGGGLLGRDLLTKLKAQIQFSTEGPQVTWEDRPAMCLVLNLEEEYRLHEKPVPPSIDPSWLQLFPMVWAEKAGMGLANQVPPVVVELKSDASPVAVRQYPMSKEAREGIRPHIQRFLDLGILVPCQSPWNTPLLPVKKPGTNDYRPVQDLREVNKRVQDIHPTVPNPYNLLSSLPPSHTWYSVLDLKDAFFCLKLHPNSQPLFAFEWRDPEKGNTGQLTWTRLPQGFKNSPTLFNEALHRDLASFRALNPQVVMLQYVDDLLVAAPTYRDCKEGTRRLLQELSKLGYRVSAKKAQLCREEVTYLGYLLKGGKRWLTPARKATVMKIPTPTTPRQVREFLGKAGFCRLFIPGFASLAAPLYPLTRPKVPFTWTEAHQEAFGRIKEALLSAPALALPDLTKPFALYVDEKEGVARGVLTQTLGPWRRPVAYLSKKLDPVASGWPTCLKAIAAVALLLKDADKLTLGQNVLVIAPHNLESIVRQPPDRWMTNARMTHYQSLLLNERVSFAPPAILNPATLLPVESDDTPIHICSEILAEETGTRPDLRDQPLPGVPAWYTDGSSFIMDGRRQAGAAIVDNKRTVWASNLPEGTSAQKAELIALTQALRLAEGKSINIYTDSRYAFATAHVHGAIYKQRGWLTSAGKDIKNKEEILALLEAIHLPKRVAIIHCPGHQRGTDPVATGNRKADEAAKQAAQSTRILTETTKNAGKRTADGSEFEKRTADGSEFESPKKKAKVE

SEQ ID NO: 1708 - protein, 2127 aa, synthetic construct
MPAAKRVKLDGGDKKYSIGLDIGTNSVGWAVITDEYKVPSKKFKVLGNTDRHSIKKNLIGALLFDSGETAEATRLKRTARRRYTRRKNRICYLQEIFSNEMAKVDDSFFHRLEESFLVEEDKKHERHPIFGNIVDEVAYHEKYPTIYHLRKKLVDSTDKADLRLIYLALAHMIKFRGHFLIEGDLNPDNSDVDKLFIQLVQTYNQLFEENPINASGVDAKAILSARLSKSRRLENLIAQLPGEKKNGLFGNLIALSLGLTPNFKSNFDLAEDAKLQLSKDTYDDDLDNLLAQIGDQYADLFLAAKNLSDAILLSDILRVNTEITKAPLSASMIKRYDEHHQDLTLLKALVRQQLPEKYKEIFFDQSKNGYAGYIDGGASQEEFYKFIKPILEKMDGTEELLVKLNREDLLRKQRTFDNGSIPHQIHLGELHAILRRQEDFYPFLKDNREKIEKILTFRIPYYVGPLARGNSRFAWMTRKSEETITPWNFEEVVDKGASAQSFIERMTNFDKNLPNEKVLPKHSLLYEYFTVYNELTKVKYVTEGMRKPAFLSGEQKKAIVDLLFKTNRKVTVKQLKEDYFKKIECFDSVEISGVEDRFNASLGTYHDLLKIIKDKDFLDNEENEDILEDIVLTLTLFEDREMIEERLKTYAHLFDDKVMKQLKRRRYTGWGRLSRKLINGIRDKQSGKTILDFLKSDGFANRNFMQLIHDDSLTFKEDIQKAQVSGQGDSLHEHIANLAGSPAIKKGILQTVKVVDELVKVMGRHKPENIVIEMARENQTTQKGQKNSRERMKRIEEGIKELGSQILKEHPVENTQLQNEKLYLYYLQNGRDMYVDQELDINRLSDYDVDHIVPQSFLKDDSIDNKVLTRSDKARGKSDNVPSEEVVKKMKNYWRQLLNAKLITQRKFDNLTKAERGGLSELDKAGFIKRQLVETRQITKHVAQILDSRMNTKYDENDKLIREVKVITLKSKLVSDFRKDFQFYKVREINNYHHAHDAYLNAVVGTALIKKYPKLESEFVYGDYKVYDVRKMIAKSEQEIGKATAKYFFYSNIMNFFKTEITLANGEIRKRPLIETNGETGEIVWDKGRDFATVRKVLSMPQVNIVKKTEVQTGGFSKESILPKRNSDKLIARKKDWDPKKYGGFDSPTVAYSVLVVAKVEKGKSKKLKSVKELLGITIMERSSFEKNPIDFLEAKGYKEVKKDLIIKLPKYSLFELENGRKRMLASAGELQKGNELALPSKYVNFLYLASHYEKLKGSPEDNEQKQLFVEQHKHYLDEIIEQISEFSKRVILADANLDKVLSAYNKHRDKPIREQAENIIHLFTLTNLGAPAAFKYFDTTIDRKRYTSTKEVLDATLIHQSITGLYETRIDLSQLGGDGGGSSGGGEAAAKGGLLGRDLLTKLKAQIQFSTEGPQVTWEDRPAMCLVLNLEEEYRLHEKPVPPSIDPSWLQLFPMVWAEKAGMGLANQVPPVVVELKSDASPVAVRQYPMSKEAREGIRPHIQRFLDLGILVPCQSPWNTPLLPVKKPGTNDYRPVQDLREVNKRVQDIHPTVPNPYNLLSSLPPSHTWYSVLDLKDAFFCLKLHPNSQPLFAFEWRDPEKGNTGQLTWTRLPQGFKNSPTLFNEALHRDLASFRALNPQVVMLQYVDDLLVAAPTYRDCKEGTRRLLQELSKLGYRVSAKKAQLCREEVTYLGYLLKGGKRWLTPARKATVMKIPTPTTPRQVREFLGKAGFCRLFIPGFASLAAPLYPLTRPKVPFTWTEAHQEAFGRIKEALLSAPALALPDLTKPFALYVDEKEGVARGVLTQTLGPWRRPVAYLSKKLDPVASGWPTCLKAIAAVALLLKDADKLTLGQNVLVIAPHNLESIVRQPPDRWMTNARMTHYQSLLLNERVSFAPPAILNPATLLPVESDDTPIHICSEILAEETGTRPDLRDQPLPGVPAWYTDGSSFIMDGRRQAGAAIVDNKRTVWASNLPEGTSAQKAELIALTQALRLAEGKSINIYTDSRYAFATAHVHGAIYKQRGWLTSAGKDIKNKEEILALLEAIHLPKRVAIIHCPGHQRGTDPVATGNRKADEAAKQAAQSTRILTETTKNAGKRTADGSEFEKRTADGSEFESPKKKAKVE

SEQ ID NO: 1709 - protein, 2124 aa, synthetic construct
MPAAKRVKLDGGDKKYSIGLDIGTNSVGWAVITDEYKVPSKKFKVLGNTDRHSIKKNLIGALLFDSGETAEATRLKRTARRRYTRRKNRICYLQEIFSNEMAKVDDSFFHRLEESFLVEEDKKHERHPIFGNIVDEVAYHEKYPTIYHLRKKLVDSTDKADLRLIYLALAHMIKFRGHFLIEGDLNPDNSDVDKLFIQLVQTYNQLFEENPINASGVDAKAILSARLSKSRRLENLIAQLPGEKKNGLFGNLIALSLGLTPNFKSNFDLAEDAKLQLSKDTYDDDLDNLLAQIGDQYADLFLAAKNLSDAILLSDILRVNTEITKAPLSASMIKRYDEHHQDLTLLKALVRQQLPEKYKEIFFDQSKNGYAGYIDGGASQEEFYKFIKPILEKMDGTEELLVKLNREDLLRKQRTFDNGSIPHQIHLGELHAILRRQEDFYPFLKDNREKIEKILTFRIPYYVGPLARGNSRFAWMTRKSEETITPWNFEEVVDKGASAQSFIERMTNFDKNLPNEKVLPKHSLLYEYFTVYNELTKVKYVTEGMRKPAFLSGEQKKAIVDLLFKTNRKVTVKQLKEDYFKKIECFDSVEISGVEDRFNASLGTYHDLLKIIKDKDFLDNEENEDILEDIVLTLTLFEDREMIEERLKTYAHLFDDKVMKQLKRRRYTGWGRLSRKLINGIRDKQSGKTILDFLKSDGFANRNFMQLIHDDSLTFKEDIQKAQVSGQGDSLHEHIANLAGSPAIKKGILQTVKVVDELVKVMGRHKPENIVIEMARENQTTQKGQKNSRERMKRIEEGIKELGSQILKEHPVENTQLQNEKLYLYYLQNGRDMYVDQELDINRLSDYDVDHIVPQSFLKDDSIDNKVLTRSDKARGKSDNVPSEEVVKKMKNYWRQLLNAKLITQRKFDNLTKAERGGLSELDKAGFIKRQLVETRQITKHVAQILDSRMNTKYDENDKLIREVKVITLKSKLVSDFRKDFQFYKVREINNYHHAHDAYLNAVVGTALIKKYPKLESEFVYGDYKVYDVRKMIAKSEQEIGKATAKYFFYSNIMNFFKTEITLANGEIRKRPLIETNGETGEIVWDKGRDFATVRKVLSMPQVNIVKKTEVQTGGFSKESILPKRNSDKLIARKKDWDPKKYGGFDSPTVAYSVLVVAKVEKGKSKKLKSVKELLGITIMERSSFEKNPIDFLEAKGYKEVKKDLIIKLPKYSLFELENGRKRMLASAGELQKGNELALPSKYVNFLYLASHYEKLKGSPEDNEQKQLFVEQHKHYLDEIIEQISEFSKRVILADANLDKVLSAYNKHRDKPIREQAENIIHLFTLTNLGAPAAFKYFDTTIDRKRYTSTKEVLDATLIHQSITGLYETRIDLSQLGGDGGGSSEAAAKGGLLGRDLLTKLKAQIQFSTEGPQVTWEDRPAMCLVLNLEEEYRLHEKPVPPSIDPSWLQLFPMVWAEKAGMGLANQVPPVVVELKSDASPVAVRQYPMSKEAREGIRPHIQRFLDLGILVPCQSPWNTPLLPVKKPGTNDYRPVQDLREVNKRVQDIHPTVPNPYNLLSSLPPSHTWYSVLDLKDAFFCLKLHPNSQPLFAFEWRDPEKGNTGQLTWTRLPQGFKNSPTLFNEALHRDLASFRALNPQVVMLQYVDDLLVAAPTYRDCKEGTRRLLQELSKLGYRVSAKKAQLCREEVTYLGYLLKGGKRWLTPARKATVMKIPTPTTPRQVREFLGKAGFCRLFIPGFASLAAPLYPLTRPKVPFTWTEAHQEAFGRIKEALLSAPALALPDLTKPFALYVDEKEGVARGVLTQTLGPWRRPVAYLSKKLDPVASGWPTCLKAIAAVALLLKDADKLTLGQNVLVIAPHNLESIVRQPPDRWMTNARMTHYQSLLLNERVSFAPPAILNPATLLPVESDDTPIHICSEILAEETGTRPDLRDQPLPGVPAWYTDGSSFIMDGRRQAGAAIVDNKRTVWASNLPEGTSAQKAELIALTQALRLAEGKSINIYTDSRYAFATAHVHGAIYKQRGWLTSAGKDIKNKEEILALLEAIHLPKRVAIIHCPGHQRGTDPVATGNRKADEAAKQAAQSTRILTETTKNAGKRTADGSEFEKRTADGSEFESPKKKAKVE

SEQ ID NO: 1710 - protein, 2125 aa, synthetic construct
MPAAKRVKLDGGDKKYSIGLDIGTNSVGWAVITDEYKVPSKKFKVLGNTDRHSIKKNLIGALLFDSGETAEATRLKRTARRRYTRRKNRICYLQEIFSNEMAKVDDSFFHRLEESFLVEEDKKHERHPIFGNIVDEVAYHEKYPTIYHLRKKLVDSTDKADLRLIYLALAHMIKFRGHFLIEGDLNPDNSDVDKLFIQLVQTYNQLFEENPINASGVDAKAILSARLSKSRRLENLIAQLPGEKKNGLFGNLIALSLGLTPNFKSNFDLAEDAKLQLSKDTYDDDLDNLLAQIGDQYADLFLAAKNLSDAILLSDILRVNTEITKAPLSASMIKRYDEHHQDLTLLKALVRQQLPEKYKEIFFDQSKNGYAGYIDGGASQEEFYKFIKPILEKMDGTEELLVKLNREDLLRKQRTFDNGSIPHQIHLGELHAILRRQEDFYPFLKDNREKIEKILTFRIPYYVGPLARGNSRFAWMTRKSEETITPWNFEEVVDKGASAQSFIERMTNFDKNLPNEKVLPKHSLLYEYFTVYNELTKVKYVTEGMRKPAFLSGEQKKAIVDLLFKTNRKVTVKQLKEDYFKKIECFDSVEISGVEDRFNASLGTYHDLLKIIKDKDFLDNEENEDILEDIVLTLTLFEDREMIEERLKTYAHLFDDKVMKQLKRRRYTGWGRLSRKLINGIRDKQSGKTILDFLKSDGFANRNFMQLIHDDSLTFKEDIQKAQVSGQGDSLHEHIANLAGSPAIKKGILQTVKVVDELVKVMGRHKPENIVIEMARENQTTQKGQKNSRERMKRIEEGIKELGSQILKEHPVENTQLQNEKLYLYYLQNGRDMYVDQELDINRLSDYDVDHIVPQSFLKDDSIDNKVLTRSDKARGKSDNVPSEEVVKKMKNYWRQLLNAKLITQRKFDNLTKAERGGLSELDKAGFIKRQLVETRQITKHVAQILDSRMNTKYDENDKLIREVKVITLKSKLVSDFRKDFQFYKVREINNYHHAHDAYLNAVVGTALIKKYPKLESEFVYGDYKVYDVRKMIAKSEQEIGKATAKYFFYSNIMNFFKTEITLANGEIRKRPLIETNGETGEIVWDKGRDFATVRKVLSMPQVNIVKKTEVQTGGFSKESILPKRNSDKLIARKKDWDPKKYGGFDSPTVAYSVLVVAKVEKGKSKKLKSVKELLGITIMERSSFEKNPIDFLEAKGYKEVKKDLIIKLPKYSLFELENGRKRMLASAGELQKGNELALPSKYVNFLYLASHYEKLKGSPEDNEQKQLFVEQHKHYLDEIIEQISEFSKRVILADANLDKVLSAYNKHRDKPIREQAENIIHLFTLTNLGAPAAFKYFDTTIDRKRYTSTKEVLDATLIHQSITGLYETRIDLSQLGGDGGGGGPAPGGSGGLLGRDLLTKLKAQIQFSTEGPQVTWEDRPAMCLVLNLEEEYRLHEKPVPPSIDPSWLQLFPMVWAEKAGMGLANQVPPVVVELKSDASPVAVRQYPMSKEAREGIRPHIQRFLDLGILVPCQSPWNTPLLPVKKPGTNDYRPVQDLREVNKRVQDIHPTVPNPYNLLSSLPPSHTWYSVLDLKDAFFCLKLHPNSQPLFAFEWRDPEKGNTGQLTWTRLPQGFKNSPTLFNEALHRDLASFRALNPQVVMLQYVDDLLVAAPTYRDCKEGTRRLLQELSKLGYRVSAKKAQLCREEVTYLGYLLKGGKRWLTPARKATVMKIPTPTTPRQVREFLGKAGFCRLFIPGFASLAAPLYPLTRPKVPFTWTEAHQEAFGRIKEALLSAPALALPDLTKPFALYVDEKEGVARGVLTQTLGPWRRPVAYLSKKLDPVASGWPTCLKAIAAVALLLKDADKLTLGQNVLVIAPHNLESIVRQPPDRWMTNARMTHYQSLLLNERVSFAPPAILNPATLLPVESDDTPIHICSEILAEETGTRPDLRDQPLPGVPAWYTDGSSFIMDGRRQAGAAIVDNKRTVWASNLPEGTSAQKAELIALTQALRLAEGKSINIYTDSRYAFATAHVHGAIYKQRGWLTSAGKDIKNKEEILALLEAIHLPKRVAIIHCPGHQRGTDPVATGNRKADEAAKQAAQSTRILTETTKNAGKRTADGSEFEKRTADGSEFESPKKKAKVE

SEQ ID NO: 1711 - protein, 2127 aa, synthetic construct
MPAAKRVKLDGGDKKYSIGLDIGTNSVGWAVITDEYKVPSKKFKVLGNTDRHSIKKNLIGALLFDSGETAEATRLKRTARRRYTRRKNRICYLQEIFSNEMAKVDDSFFHRLEESFLVEEDKKHERHPIFGNIVDEVAYHEKYPTIYHLRKKLVDSTDKADLRLIYLALAHMIKFRGHFLIEGDLNPDNSDVDKLFIQLVQTYNQLFEENPINASGVDAKAILSARLSKSRRLENLIAQLPGEKKNGLFGNLIALSLGLTPNFKSNFDLAEDAKLQLSKDTYDDDLDNLLAQIGDQYADLFLAAKNLSDAILLSDILRVNTEITKAPLSASMIKRYDEHHQDLTLLKALVRQQLPEKYKEIFFDQSKNGYAGYIDGGASQEEFYKFIKPILEKMDGTEELLVKLNREDLLRKQRTFDNGSIPHQIHLGELHAILRRQEDFYPFLKDNREKIEKILTFRIPYYVGPLARGNSRFAWMTRKSEETITPWNFEEVVDKGASAQSFIERMTNFDKNLPNEKVLPKHSLLYEYFTVYNELTKVKYVTEGMRKPAFLSGEQKKAIVDLLFKTNRKVTVKQLKEDYFKKIECFDSVEISGVEDRFNASLGTYHDLLKIIKDKDFLDNEENEDILEDIVLTLTLFEDREMIEERLKTYAHLFDDKVMKQLKRRRYTGWGRLSRKLINGIRDKQSGKTILDFLKSDGFANRNFMQLIHDDSLTFKEDIQKAQVSGQGDSLHEHIANLAGSPAIKKGILQTVKVVDELVKVMGRHKPENIVIEMARENQTTQKGQKNSRERMKRIEEGIKELGSQILKEHPVENTQLQNEKLYLYYLQNGRDMYVDQELDINRLSDYDVDHIVPQSFLKDDSIDNKVLTRSDKARGKSDNVPSEEVVKKMKNYWRQLLNAKLITQRKFDNLTKAERGGLSELDKAGFIKRQLVETRQITKHVAQILDSRMNTKYDENDKLIREVKVITLKSKLVSDFRKDFQFYKVREINNYHHAHDAYLNAVVGTALIKKYPKLESEFVYGDYKVYDVRKMIAKSEQEIGKATAKYFFYSNIMNFFKTEITLANGEIRKRPLIETNGETGEIVWDKGRDFATVRKVLSMPQVNIVKKTEVQTGGFSKESILPKRNSDKLIARKKDWDPKKYGGFDSPTVAYSVLVVAKVEKGKSKKLKSVKELLGITIMERSSFEKNPIDFLEAKGYKEVKKDLIIKLPKYSLFELENGRKRMLASAGELQKGNELALPSKYVNFLYLASHYEKLKGSPEDNEQKQLFVEQHKHYLDEIIEQISEFSKRVILADANLDKVLSAYNKHRDKPIREQAENIIHLFTLTNLGAPAAFKYFDTTIDRKRYTSTKEVLDATLIHQSITGLYETRIDLSQLGGDGGGSSEAAAKPAPGGLLGRDLLTKLKAQIQFSTEGPQVTWEDRPAMCLVLNLEEEYRLHEKPVPPSIDPSWLQLFPMVWAEKAGMGLANQVPPVVVELKSDASPVAVRQYPMSKEAREGIRPHIQRFLDLGILVPCQSPWNTPLLPVKKPGTNDYRPVQDLREVNKRVQDIHPTVPNPYNLLSSLPPSHTWYSVLDLKDAFFCLKLHPNSQPLFAFEWRDPEKGNTGQLTWTRLPQGFKNSPTLFNEALHRDLASFRALNPQVVMLQYVDDLLVAAPTYRDCKEGTRRLLQELSKLGYRVSAKKAQLCREEVTYLGYLLKGGKRWLTPARKATVMKIPTPTTPRQVREFLGKAGFCRLFIPGFASLAAPLYPLTRPKVPFTWTEAHQEAFGRIKEALLSAPALALPDLTKPFALYVDEKEGVARGVLTQTLGPWRRPVAYLSKKLDPVASGWPTCLKAIAAVALLLKDADKLTLGQNVLVIAPHNLESIVRQPPDRWMTNARMTHYQSLLLNERVSFAPPAILNPATLLPVESDDTPIHICSEILAEETGTRPDLRDQPLPGVPAWYTDGSSFIMDGRRQAGAAIVDNKRTVWASNLPEGTSAQKAELIALTQALRLAEGKSINIYTDSRYAFATAHVHGAIYKQRGWLTSAGKDIKNKEEILALLEAIHLPKRVAIIHCPGHQRGTDPVATGNRKADEAAKQAAQSTRILTETTKNAGKRTADGSEFEKRTADGSEFESPKKKAKVE

SEQ ID NO: 1712 - protein, 2131 aa, synthetic construct
MPAAKRVKLDGGDKKYSIGLDIGTNSVGWAVITDEYKVPSKKFKVLGNTDRHSIKKNLIGALLFDSGETAEATRLKRTARRRYTRRKNRICYLQEIFSNEMAKVDDSFFHRLEESFLVEEDKKHERHPIFGNIVDEVAYHEKYPTIYHLRKKLVDSTDKADLRLIYLALAHMIKFRGHFLIEGDLNPDNSDVDKLFIQLVQTYNQLFEENPINASGVDAKAILSARLSKSRRLENLIAQLPGEKKNGLFGNLIALSLGLTPNFKSNFDLAEDAKLQLSKDTYDDDLDNLLAQIGDQYADLFLAAKNLSDAILLSDILRVNTEITKAPLSASMIKRYDEHHQDLTLLKALVRQQLPEKYKEIFFDQSKNGYAGYIDGGASQEEFYKFIKPILEKMDGTEELLVKLNREDLLRKQRTFDNGSIPHQIHLGELHAILRRQEDFYPFLKDNREKIEKILTFRIPYYVGPLARGNSRFAWMTRKSEETITPWNFEEVVDKGASAQSFIERMTNFDKNLPNEKVLPKHSLLYEYFTVYNELTKVKYVTEGMRKPAFLSGEQKKAIVDLLFKTNRKVTVKQLKEDYFKKIECFDSVEISGVEDRFNASLGTYHDLLKIIKDKDFLDNEENEDILEDIVLTLTLFEDREMIEERLKTYAHLFDDKVMKQLKRRRYTGWGRLSRKLINGIRDKQSGKTILDFLKSDGFANRNFMQLIHDDSLTFKEDIQKAQVSGQGDSLHEHIANLAGSPAIKKGILQTVKVVDELVKVMGRHKPENIVIEMARENQTTQKGQKNSRERMKRIEEGIKELGSQILKEHPVENTQLQNEKLYLYYLQNGRDMYVDQELDINRLSDYDVDHIVPQSFLKDDSIDNKVLTRSDKARGKSDNVPSEEVVKKMKNYWRQLLNAKLITQRKFDNLTKAERGGLSELDKAGFIKRQLVETRQITKHVAQILDSRMNTKYDENDKLIREVKVITLKSKLVSDFRKDFQFYKVREINNYHHAHDAYLNAVVGTALIKKYPKLESEFVYGDYKVYDVRKMIAKSEQEIGKATAKYFFYSNIMNFFKTEITLANGEIRKRPLIETNGETGEIVWDKGRDFATVRKVLSMPQVNIVKKTEVQTGGFSKESILPKRNSDKLIARKKDWDPKKYGGFDSPTVAYSVLVVAKVEKGKSKKLKSVKELLGITIMERSSFEKNPIDFLEAKGYKEVKKDLIIKLPKYSLFELENGRKRMLASAGELQKGNELALPSKYVNFLYLASHYEKLKGSPEDNEQKQLFVEQHKHYLDEIIEQISEFSKRVILADANLDKVLSAYNKHRDKPIREQAENIIHLFTLTNLGAPAAFKYFDTTIDRKRYTSTKEVLDATLIHQSITGLYETRIDLSQLGGDGGEAAAKGGGGSEAAAKGGLLGRDLLTKLKAQIQFSTEGPQVTWEDRPAMCLVLNLEEEYRLHEKPVPPSIDPSWLQLFPMVWAEKAGMGLANQVPPVVVELKSDASPVAVRQYPMSKEAREGIRPHIQRFLDLGILVPCQSPWNTPLLPVKKPGTNDYRPVQDLREVNKRVQDIHPTVPNPYNLLSSLPPSHTWYSVLDLKDAFFCLKLHPNSQPLFAFEWRDPEKGNTGQLTWTRLPQGFKNSPTLFNEALHRDLASFRALNPQVVMLQYVDDLLVAAPTYRDCKEGTRRLLQELSKLGYRVSAKKAQLCREEVTYLGYLLKGGKRWLTPARKATVMKIPTPTTPRQVREFLGKAGFCRLFIPGFASLAAPLYPLTRPKVPFTWTEAHQEAFGRIKEALLSAPALALPDLTKPFALYVDEKEGVARGVLTQTLGPWRRPVAYLSKKLDPVASGWPTCLKAIAAVALLLKDADKLTLGQNVLVIAPHNLESIVRQPPDRWMTNARMTHYQSLLLNERVSFAPPAILNPATLLPVESDDTPIHICSEILAEETGTRPDLRDQPLPGVPAWYTDGSSFIMDGRRQAGAAIVDNKRTVWASNLPEGTSAQKAELIALTQALRLAEGKSINIYTDSRYAFATAHVHGAIYKQRGWLTSAGKDIKNKEEILALLEAIHLPKRVAIIHCPGHQRGTDPVATGNRKADEAAKQAAQSTRILTETTKNAGKRTADGSEFEKRTADGSEFESPKKKAKVE

SEQ ID NO: 1713 - protein, 2127 aa, synthetic construct
MPAAKRVKLDGGDKKYSIGLDIGTNSVGWAVITDEYKVPSKKFKVLGNTDRHSIKKNLIGALLFDSGETAEATRLKRTARRRYTRRKNRICYLQEIFSNEMAKVDDSFFHRLEESFLVEEDKKHERHPIFGNIVDEVAYHEKYPTIYHLRKKLVDSTDKADLRLIYLALAHMIKFRGHFLIEGDLNPDNSDVDKLFIQLVQTYNQLFEENPINASGVDAKAILSARLSKSRRLENLIAQLPGEKKNGLFGNLIALSLGLTPNFKSNFDLAEDAKLQLSKDTYDDDLDNLLAQIGDQYADLFLAAKNLSDAILLSDILRVNTEITKAPLSASMIKRYDEHHQDLTLLKALVRQQLPEKYKEIFFDQSKNGYAGYIDGGASQEEFYKFIKPILEKMDGTEELLVKLNREDLLRKQRTFDNGSIPHQIHLGELHAILRRQEDFYPFLKDNREKIEKILTFRIPYYVGPLARGNSRFAWMTRKSEETITPWNFEEVVDKGASAQSFIERMTNFDKNLPNEKVLPKHSLLYEYFTVYNELTKVKYVTEGMRKPAFLSGEQKKAIVDLLFKTNRKVTVKQLKEDYFKKIECFDSVEISGVEDRFNASLGTYHDLLKIIKDKDFLDNEENEDILEDIVLTLTLFEDREMIEERLKTYAHLFDDKVMKQLKRRRYTGWGRLSRKLINGIRDKQSGKTILDFLKSDGFANRNFMQLIHDDSLTFKEDIQKAQVSGQGDSLHEHIANLAGSPAIKKGILQTVKVVDELVKVMGRHKPENIVIEMARENQTTQKGQKNSRERMKRIEEGIKELGSQILKEHPVENTQLQNEKLYLYYLQNGRDMYVDQELDINRLSDYDVDHIVPQSFLKDDSIDNKVLTRSDKARGKSDNVPSEEVVKKMKNYWRQLLNAKLITQRKFDNLTKAERGGLSELDKAGFIKRQLVETRQITKHVAQILDSRMNTKYDENDKLIREVKVITLKSKLVSDFRKDFQFYKVREINNYHHAHDAYLNAVVGTALIKKYPKLESEFVYGDYKVYDVRKMIAKSEQEIGKATAKYFFYSNIMNFFKTEITLANGEIRKRPLIETNGETGEIVWDKGRDFATVRKVLSMPQVNIVKKTEVQTGGFSKESILPKRNSDKLIARKKDWDPKKYGGFDSPTVAYSVLVVAKVEKGKSKKLKSVKELLGITIMERSSFEKNPIDFLEAKGYKEVKKDLIIKLPKYSLFELENGRKRMLASAGELQKGNELALPSKYVNFLYLASHYEKLKGSPEDNEQKQLFVEQHKHYLDEIIEQISEFSKRVILADANLDKVLSAYNKHRDKPIREQAENIIHLFTLTNLGAPAAFKYFDTTIDRKRYTSTKEVLDATLIHQSITGLYETRIDLSQLGGDGGGSSGGSEAAAKGGLLGRDLLTKLKAQIQFSTEGPQVTWEDRPAMCLVLNLEEEYRLHEKPVPPSIDPSWLQLFPMVWAEKAGMGLANQVPPVVVELKSDASPVAVRQYPMSKEAREGIRPHIQRFLDLGILVPCQSPWNTPLLPVKKPGTNDYRPVQDLREVNKRVQDIHPTVPNPYNLLSSLPPSHTWYSVLDLKDAFFCLKLHPNSQPLFAFEWRDPEKGNTGQLTWTRLPQGFKNSPTLFNEALHRDLASFRALNPQVVMLQYVDDLLVAAPTYRDCKEGTRRLLQELSKLGYRVSAKKAQLCREEVTYLGYLLKGGKRWLTPARKATVMKIPTPTTPRQVREFLGKAGFCRLFIPGFASLAAPLYPLTRPKVPFTWTEAHQEAFGRIKEALLSAPALALPDLTKPFALYVDEKEGVARGVLTQTLGPWRRPVAYLSKKLDPVASGWPTCLKAIAAVALLLKDADKLTLGQNVLVIAPHNLESIVRQPPDRWMTNARMTHYQSLLLNERVSFAPPAILNPATLLPVESDDTPIHICSEILAEETGTRPDLRDQPLPGVPAWYTDGSSFIMDGRRQAGAAIVDNKRTVWASNLPEGTSAQKAELIALTQALRLAEGKSINIYTDSRYAFATAHVHGAIYKQRGWLTSAGKDIKNKEEILALLEAIHLPKRVAIIHCPGHQRGTDPVATGNRKADEAAKQAAQSTRILTETTKNAGKRTADGSEFEKRTADGSEFESPKKKAKVE

SEQ ID NO: 1714 - protein, 2125 aa, synthetic construct
MPAAKRVKLDGGDKKYSIGLDIGTNSVGWAVITDEYKVPSKKFKVLGNTDRHSIKKNLIGALLFDSGETAEATRLKRTARRRYTRRKNRICYLQEIFSNEMAKVDDSFFHRLEESFLVEEDKKHERHPIFGNIVDEVAYHEKYPTIYHLRKKLVDSTDKADLRLIYLALAHMIKFRGHFLIEGDLNPDNSDVDKLFIQLVQTYNQLFEENPINASGVDAKAILSARLSKSRRLENLIAQLPGEKKNGLFGNLIALSLGLTPNFKSNFDLAEDAKLQLSKDTYDDDLDNLLAQIGDQYADLFLAAKNLSDAILLSDILRVNTEITKAPLSASMIKRYDEHHQDLTLLKALVRQQLPEKYKEIFFDQSKNGYAGYIDGGASQEEFYKFIKPILEKMDGTEELLVKLNREDLLRKQRTFDNGSIPHQIHLGELHAILRRQEDFYPFLKDNREKIEKILTFRIPYYVGPLARGNSRFAWMTRKSEETITPWNFEEVVDKGASAQSFIERMTNFDKNLPNEKVLPKHSLLYEYFTVYNELTKVKYVTEGMRKPAFLSGEQKKAIVDLLFKTNRKVTVKQLKEDYFKKIECFDSVEISGVEDRFNASLGTYHDLLKIIKDKDFLDNEENEDILEDIVLTLTLFEDREMIEERLKTYAHLFDDKVMKQLKRRRYTGWGRLSRKLINGIRDKQSGKTILDFLKSDGFANRNFMQLIHDDSLTFKEDIQKAQVSGQGDSLHEHIANLAGSPAIKKGILQTVKVVDELVKVMGRHKPENIVIEMARENQTTQKGQKNSRERMKRIEEGIKELGSQILKEHPVENTQLQNEKLYLYYLQNGRDMYVDQELDINRLSDYDVDHIVPQSFLKDDSIDNKVLTRSDKARGKSDNVPSEEVVKKMKNYWRQLLNAKLITQRKFDNLTKAERGGLSELDKAGFIKRQLVETRQITKHVAQILDSRMNTKYDENDKLIREVKVITLKSKLVSDFRKDFQFYKVREINNYHHAHDAYLNAVVGTALIKKYPKLESEFVYGDYKVYDVRKMIAKSEQEIGKATAKYFFYSNIMNFFKTEITLANGEIRKRPLIETNGETGEIVWDKGRDFATVRKVLSMPQVNIVKKTEVQTGGFSKESILPKRNSDKLIARKKDWDPKKYGGFDSPTVAYSVLVVAKVEKGKSKKLKSVKELLGITIMERSSFEKNPIDFLEAKGYKEVKKDLIIKLPKYSLFELENGRKRMLASAGELQKGNELALPSKYVNFLYLASHYEKLKGSPEDNEQKQLFVEQHKHYLDEIIEQISEFSKRVILADANLDKVLSAYNKHRDKPIREQAENIIHLFTLTNLGAPAAFKYFDTTIDRKRYTSTKEVLDATLIHQSITGLYETRIDLSQLGGDGGGSSGSSGSSGGLLGRDLLTKLKAQIQFSTEGPQVTWEDRPAMCLVLNLEEEYRLHEKPVPPSIDPSWLQLFPMVWAEKAGMGLANQVPPVVVELKSDASPVAVRQYPMSKEAREGIRPHIQRFLDLGILVPCQSPWNTPLLPVKKPGTNDYRPVQDLREVNKRVQDIHPTVPNPYNLLSSLPPSHTWYSVLDLKDAFFCLKLHPNSQPLFAFEWRDPEKGNTGQLTWTRLPQGFKNSPTLFNEALHRDLASFRALNPQVVMLQYVDDLLVAAPTYRDCKEGTRRLLQELSKLGYRVSAKKAQLCREEVTYLGYLLKGGKRWLTPARKATVMKIPTPTTPRQVREFLGKAGFCRLFIPGFASLAAPLYPLTRPKVPFTWTEAHQEAFGRIKEALLSAPALALPDLTKPFALYVDEKEGVARGVLTQTLGPWRRPVAYLSKKLDPVASGWPTCLKAIAAVALLLKDADKLTLGQNVLVIAPHNLESIVRQPPDRWMTNARMTHYQSLLLNERVSFAPPAILNPATLLPVESDDTPIHICSEILAEETGTRPDLRDQPLPGVPAWYTDGSSFIMDGRRQAGAAIVDNKRTVWASNLPEGTSAQKAELIALTQALRLAEGKSINIYTDSRYAFATAHVHGAIYKQRGWLTSAGKDIKNKEEILALLEAIHLPKRVAIIHCPGHQRGTDPVATGNRKADEAAKQAAQSTRILTETTKNAGKRTADGSEFEKRTADGSEFESPKKKAKVE

SEQ ID NO: 1715 - protein, 2127 aa, synthetic construct
MPAAKRVKLDGGDKKYSIGLDIGTNSVGWAVITDEYKVPSKKFKVLGNTDRHSIKKNLIGALLFDSGETAEATRLKRTARRRYTRRKNRICYLQEIFSNEMAKVDDSFFHRLEESFLVEEDKKHERHPIFGNIVDEVAYHEKYPTIYHLRKKLVDSTDKADLRLIYLALAHMIKFRGHFLIEGDLNPDNSDVDKLFIQLVQTYNQLFEENPINASGVDAKAILSARLSKSRRLENLIAQLPGEKKNGLFGNLIALSLGLTPNFKSNFDLAEDAKLQLSKDTYDDDLDNLLAQIGDQYADLFLAAKNLSDAILLSDILRVNTEITKAPLSASMIKRYDEHHQDLTLLKALVRQQLPEKYKEIFFDQSKNGYAGYIDGGASQEEFYKFIKPILEKMDGTEELLVKLNREDLLRKQRTFDNGSIPHQIHLGELHAILRRQEDFYPFLKDNREKIEKILTFRIPYYVGPLARGNSRFAWMTRKSEETITPWNFEEVVDKGASAQSFIERMTNFDKNLPNEKVLPKHSLLYEYFTVYNELTKVKYVTEGMRKPAFLSGEQKKAIVDLLFKTNRKVTVKQLKEDYFKKIECFDSVEISGVEDRFNASLGTYHDLLKIIKDKDFLDNEENEDILEDIVLTLTLFEDREMIEERLKTYAHLFDDKVMKQLKRRRYTGWGRLSRKLINGIRDKQSGKTILDFLKSDGFANRNFMQLIHDDSLTFKEDIQKAQVSGQGDSLHEHIANLAGSPAIKKGILQTVKVVDELVKVMGRHKPENIVIEMARENQTTQKGQKNSRERMKRIEEGIKELGSQILKEHPVENTQLQNEKLYLYYLQNGRDMYVDQELDINRLSDYDVDHIVPQSFLKDDSIDNKVLTRSDKARGKSDNVPSEEVVKKMKNYWRQLLNAKLITQRKFDNLTKAERGGLSELDKAGFIKRQLVETRQITKHVAQILDSRMNTKYDENDKLIREVKVITLKSKLVSDFRKDFQFYKVREINNYHHAHDAYLNAVVGTALIKKYPKLESEFVYGDYKVYDVRKMIAKSEQEIGKATAKYFFYSNIMNFFKTEITLANGEIRKRPLIETNGETGEIVWDKGRDFATVRKVLSMPQVNIVKKTEVQTGGFSKESILPKRNSDKLIARKKDWDPKKYGGFDSPTVAYSVLVVAKVEKGKSKKLKSVKELLGITIMERSSFEKNPIDFLEAKGYKEVKKDLIIKLPKYSLFELENGRKRMLASAGELQKGNELALPSKYVNFLYLASHYEKLKGSPEDNEQKQLFVEQHKHYLDEIIEQISEFSKRVILADANLDKVLSAYNKHRDKPIREQAENIIHLFTLTNLGAPAAFKYFDTTIDRKRYTSTKEVLDATLIHQSITGLYETRIDLSQLGGDGGEAAAKGGSGSSGGLLGRDLLTKLKAQIQFSTEGPQVTWEDRPAMCLVLNLEEEYRLHEKPVPPSIDPSWLQLFPMVWAEKAGMGLANQVPPVVVELKSDASPVAVRQYPMSKEAREGIRPHIQRFLDLGILVPCQSPWNTPLLPVKKPGTNDYRPVQDLREVNKRVQDIHPTVPNPYNLLSSLPPSHTWYSVLDLKDAFFCLKLHPNSQPLFAFEWRDPEKGNTGQLTWTRLPQGFKNSPTLFNEALHRDLASFRALNPQVVMLQYVDDLLVAAPTYRDCKEGTRRLLQELSKLGYRVSAKKAQLCREEVTYLGYLLKGGKRWLTPARKATVMKIPTPTTPRQVREFLGKAGFCRLFIPGFASLAAPLYPLTRPKVPFTWTEAHQEAFGRIKEALLSAPALALPDLTKPFALYVDEKEGVARGVLTQTLGPWRRPVAYLSKKLDPVASGWPTCLKAIAAVALLLKDADKLTLGQNVLVIAPHNLESIVRQPPDRWMTNARMTHYQSLLLNERVSFAPPAILNPATLLPVESDDTPIHICSEILAEETGTRPDLRDQPLPGVPAWYTDGSSFIMDGRRQAGAAIVDNKRTVWASNLPEGTSAQKAELIALTQALRLAEGKSINIYTDSRYAFATAHVHGAIYKQRGWLTSAGKDIKNKEEILALLEAIHLPKRVAIIHCPGHQRGTDPVATGNRKADEAAKQAAQSTRILTETTKNAGKRTADGSEFEKRTADGSEFESPKKKAKVE

SEQ ID NO: 1716 - protein, 2127 aa, synthetic construct
MPAAKRVKLDGGDKKYSIGLDIGTNSVGWAVITDEYKVPSKKFKVLGNTDRHSIKKNLIGALLFDSGETAEATRLKRTARRRYTRRKNRICYLQEIFSNEMAKVDDSFFHRLEESFLVEEDKKHERHPIFGNIVDEVAYHEKYPTIYHLRKKLVDSTDKADLRLIYLALAHMIKFRGHFLIEGDLNPDNSDVDKLFIQLVQTYNQLFEENPINASGVDAKAILSARLSKSRRLENLIAQLPGEKKNGLFGNLIALSLGLTPNFKSNFDLAEDAKLQLSKDTYDDDLDNLLAQIGDQYADLFLAAKNLSDAILLSDILRVNTEITKAPLSASMIKRYDEHHQDLTLLKALVRQQLPEKYKEIFFDQSKNGYAGYIDGGASQEEFYKFIKPILEKMDGTEELLVKLNREDLLRKQRTFDNGSIPHQIHLGELHAILRRQEDFYPFLKDNREKIEKILTFRIPYYVGPLARGNSRFAWMTRKSEETITPWNFEEVVDKGASAQSFIERMTNFDKNLPNEKVLPKHSLLYEYFTVYNELTKVKYVTEGMRKPAFLSGEQKKAIVDLLFKTNRKVTVKQLKEDYFKKIECFDSVEISGVEDRFNASLGTYHDLLKIIKDKDFLDNEENEDILEDIVLTLTLFEDREMIEERLKTYAHLFDDKVMKQLKRRRYTGWGRLSRKLINGIRDKQSGKTILDFLKSDGFANRNFMQLIHDDSLTFKEDIQKAQVSGQGDSLHEHIANLAGSPAIKKGILQTVKVVDELVKVMGRHKPENIVIEMARENQTTQKGQKNSRERMKRIEEGIKELGSQILKEHPVENTQLQNEKLYLYYLQNGRDMYVDQELDINRLSDYDVDHIVPQSFLKDDSIDNKVLTRSDKARGKSDNVPSEEVVKKMKNYWRQLLNAKLITQRKFDNLTKAERGGLSELDKAGFIKRQLVETRQITKHVAQILDSRMNTKYDENDKLIREVKVITLKSKLVSDFRKDFQFYKVREINNYHHAHDAYLNAVVGTALIKKYPKLESEFVYGDYKVYDVRKMIAKSEQEIGKATAKYFFYSNIMNFFKTEITLANGEIRKRPLIETNGETGEIVWDKGRDFATVRKVLSMPQVNIVKKTEVQTGGFSKESILPKRNSDKLIARKKDWDPKKYGGFDSPTVAYSVLVVAKVEKGKSKKLKSVKELLGITIMERSSFEKNPIDFLEAKGYKEVKKDLIIKLPKYSLFELENGRKRMLASAGELQKGNELALPSKYVNFLYLASHYEKLKGSPEDNEQKQLFVEQHKHYLDEIIEQISEFSKRVILADANLDKVLSAYNKHRDKPIREQAENIIHLFTLTNLGAPAAFKYFDTTIDRKRYTSTKEVLDATLIHQSITGLYETRIDLSQLGGDGGGGSGSSEAAAKGGLLGRDLLTKLKAQIQFSTEGPQVTWEDRPAMCLVLNLEEEYRLHEKPVPPSIDPSWLQLFPMVWAEKAGMGLANQVPPVVVELKSDASPVAVRQYPMSKEAREGIRPHIQRFLDLGILVPCQSPWNTPLLPVKKPGTNDYRPVQDLREVNKRVQDIHPTVPNPYNLLSSLPPSHTWYSVLDLKDAFFCLKLHPNSQPLFAFEWRDPEKGNTGQLTWTRLPQGFKNSPTLFNEALHRDLASFRALNPQVVMLQYVDDLLVAAPTYRDCKEGTRRLLQELSKLGYRVSAKKAQLCREEVTYLGYLLKGGKRWLTPARKATVMKIPTPTTPRQVREFLGKAGFCRLFIPGFASLAAPLYPLTRPKVPFTWTEAHQEAFGRIKEALLSAPALALPDLTKPFALYVDEKEGVARGVLTQTLGPWRRPVAYLSKKLDPVASGWPTCLKAIAAVALLLKDADKLTLGQNVLVIAPHNLESIVRQPPDRWMTNARMTHYQSLLLNERVSFAPPAILNPATLLPVESDDTPIHICSEILAEETGTRPDLRDQPLPGVPAWYTDGSSFIMDGRRQAGAAIVDNKRTVWASNLPEGTSAQKAELIALTQALRLAEGKSINIYTDSRYAFATAHVHGAIYKQRGWLTSAGKDIKNKEEILALLEAIHLPKRVAIIHCPGHQRGTDPVATGNRKADEAAKQAAQSTRILTETTKNAGKRTADGSEFEKRTADGSEFESPKKKAKVE

SEQ ID NO: 1717 - protein, 2127 aa, synthetic construct
MPAAKRVKLDGGDKKYSIGLDIGTNSVGWAVITDEYKVPSKKFKVLGNTDRHSIKKNLIGALLFDSGETAEATRLKRTARRRYTRRKNRICYLQEIFSNEMAKVDDSFFHRLEESFLVEEDKKHERHPIFGNIVDEVAYHEKYPTIYHLRKKLVDSTDKADLRLIYLALAHMIKFRGHFLIEGDLNPDNSDVDKLFIQLVQTYNQLFEENPINASGVDAKAILSARLSKSRRLENLIAQLPGEKKNGLFGNLIALSLGLTPNFKSNFDLAEDAKLQLSKDTYDDDLDNLLAQIGDQYADLFLAAKNLSDAILLSDILRVNTEITKAPLSASMIKRYDEHHQDLTLLKALVRQQLPEKYKEIFFDQSKNGYAGYIDGGASQEEFYKFIKPILEKMDGTEELLVKLNREDLLRKQRTFDNGSIPHQIHLGELHAILRRQEDFYPFLKDNREKIEKILTFRIPYYVGPLARGNSRFAWMTRKSEETITPWNFEEVVDKGASAQSFIERMTNFDKNLPNEKVLPKHSLLYEYFTVYNELTKVKYVTEGMRKPAFLSGEQKKAIVDLLFKTNRKVTVKQLKEDYFKKIECFDSVEISGVEDRFNASLGTYHDLLKIIKDKDFLDNEENEDILEDIVLTLTLFEDREMIEERLKTYAHLFDDKVMKQLKRRRYTGWGRLSRKLINGIRDKQSGKTILDFLKSDGFANRNFMQLIHDDSLTFKEDIQKAQVSGQGDSLHEHIANLAGSPAIKKGILQTVKVVDELVKVMGRHKPENIVIEMARENQTTQKGQKNSRERMKRIEEGIKELGSQILKEHPVENTQLQNEKLYLYYLQNGRDMYVDQELDINRLSDYDVDHIVPQSFLKDDSIDNKVLTRSDKARGKSDNVPSEEVVKKMKNYWRQLLNAKLITQRKFDNLTKAERGGLSELDKAGFIKRQLVETRQITKHVAQILDSRMNTKYDENDKLIREVKVITLKSKLVSDFRKDFQFYKVREINNYHHAHDAYLNAVVGTALIKKYPKLESEFVYGDYKVYDVRKMIAKSEQEIGKATAKYFFYSNIMNFFKTEITLANGEIRKRPLIETNGETGEIVWDKGRDFATVRKVLSMPQVNIVKKTEVQTGGFSKESILPKRNSDKLIARKKDWDPKKYGGFDSPTVAYSVLVVAKVEKGKSKKLKSVKELLGITIMERSSFEKNPIDFLEAKGYKEVKKDLIIKLPKYSLFELENGRKRMLASAGELQKGNELALPSKYVNFLYLASHYEKLKGSPEDNEQKQLFVEQHKHYLDEIIEQISEFSKRVILADANLDKVLSAYNKHRDKPIREQAENIIHLFTLTNLGAPAAFKYFDTTIDRKRYTSTKEVLDATLIHQSITGLYETRIDLSQLGGDGGGGSEAAAKGGGGGLLGRDLLTKLKAQIQFSTEGPQVTWEDRPAMCLVLNLEEEYRLHEKPVPPSIDPSWLQLFPMVWAEKAGMGLANQVPPVVVELKSDASPVAVRQYPMSKEAREGIRPHIQRFLDLGILVPCQSPWNTPLLPVKKPGTNDYRPVQDLREVNKRVQDIHPTVPNPYNLLSSLPPSHTWYSVLDLKDAFFCLKLHPNSQPLFAFEWRDPEKGNTGQLTWTRLPQGFKNSPTLFNEALHRDLASFRALNPQVVMLQYVDDLLVAAPTYRDCKEGTRRLLQELSKLGYRVSAKKAQLCREEVTYLGYLLKGGKRWLTPARKATVMKIPTPTTPRQVREFLGKAGFCRLFIPGFASLAAPLYPLTRPKVPFTWTEAHQEAFGRIKEALLSAPALALPDLTKPFALYVDEKEGVARGVLTQTLGPWRRPVAYLSKKLDPVASGWPTCLKAIAAVALLLKDADKLTLGQNVLVIAPHNLESIVRQPPDRWMTNARMTHYQSLLLNERVSFAPPAILNPATLLPVESDDTPIHICSEILAEETGTRPDLRDQPLPGVPAWYTDGSSFIMDGRRQAGAAIVDNKRTVWASNLPEGTSAQKAELIALTQALRLAEGKSINIYTDSRYAFATAHVHGAIYKQRGWLTSAGKDIKNKEEILALLEAIHLPKRVAIIHCPGHQRGTDPVATGNRKADEAAKQAAQSTRILTETTKNAGKRTADGSEFEKRTADGSEFESPKKKAKVE

SEQ ID NO: 1718 - protein, 2127 aa, synthetic construct
MPAAKRVKLDGGDKKYSIGLDIGTNSVGWAVITDEYKVPSKKFKVLGNTDRHSIKKNLIGALLFDSGETAEATRLKRTARRRYTRRKNRICYLQEIFSNEMAKVDDSFFHRLEESFLVEEDKKHERHPIFGNIVDEVAYHEKYPTIYHLRKKLVDSTDKADLRLIYLALAHMIKFRGHFLIEGDLNPDNSDVDKLFIQLVQTYNQLFEENPINASGVDAKAILSARLSKSRRLENLIAQLPGEKKNGLFGNLIALSLGLTPNFKSNFDLAEDAKLQLSKDTYDDDLDNLLAQIGDQYADLFLAAKNLSDAILLSDILRVNTEITKAPLSASMIKRYDEHHQDLTLLKALVRQQLPEKYKEIFFDQSKNGYAGYIDGGASQEEFYKFIKPILEKMDGTEELLVKLNREDLLRKQRTFDNGSIPHQIHLGELHAILRRQEDFYPFLKDNREKIEKILTFRIPYYVGPLARGNSRFAWMTRKSEETITPWNFEEVVDKGASAQSFIERMTNFDKNLPNEKVLPKHSLLYEYFTVYNELTKVKYVTEGMRKPAFLSGEQKKAIVDLLFKTNRKVTVKQLKEDYFKKIECFDSVEISGVEDRFNASLGTYHDLLKIIKDKDFLDNEENEDILEDIVLTLTLFEDREMIEERLKTYAHLFDDKVMKQLKRRRYTGWGRLSRKLINGIRDKQSGKTILDFLKSDGFANRNFMQLIHDDSLTFKEDIQKAQVSGQGDSLHEHIANLAGSPAIKKGILQTVKVVDELVKVMGRHKPENIVIEMARENQTTQKGQKNSRERMKRIEEGIKELGSQILKEHPVENTQLQNEKLYLYYLQNGRDMYVDQELDINRLSDYDVDHIVPQSFLKDDSIDNKVLTRSDKARGKSDNVPSEEVVKKMKNYWRQLLNAKLITQRKFDNLTKAERGGLSELDKAGFIKRQLVETRQITKHVAQILDSRMNTKYDENDKLIREVKVITLKSKLVSDFRKDFQFYKVREINNYHHAHDAYLNAVVGTALIKKYPKLESEFVYGDYKVYDVRKMIAKSEQEIGKATAKYFFYSNIMNFFKTEITLANGEIRKRPLIETNGETGEIVWDKGRDFATVRKVLSMPQVNIVKKTEVQTGGFSKESILPKRNSDKLIARKKDWDPKKYGGFDSPTVAYSVLVVAKVEKGKSKKLKSVKELLGITIMERSSFEKNPIDFLEAKGYKEVKKDLIIKLPKYSLFELENGRKRMLASAGELQKGNELALPSKYVNFLYLASHYEKLKGSPEDNEQKQLFVEQHKHYLDEIIEQISEFSKRVILADANLDKVLSAYNKHRDKPIREQAENIIHLFTLTNLGAPAAFKYFDTTIDRKRYTSTKEVLDATLIHQSITGLYETRIDLSQLGGDGGPAPGGSEAAAKGGLLGRDLLTKLKAQIQFSTEGPQVTWEDRPAMCLVLNLEEEYRLHEKPVPPSIDPSWLQLFPMVWAEKAGMGLANQVPPVVVELKSDASPVAVRQYPMSKEAREGIRPHIQRFLDLGILVPCQSPWNTPLLPVKKPGTNDYRPVQDLREVNKRVQDIHPTVPNPYNLLSSLPPSHTWYSVLDLKDAFFCLKLHPNSQPLFAFEWRDPEKGNTGQLTWTRLPQGFKNSPTLFNEALHRDLASFRALNPQVVMLQYVDDLLVAAPTYRDCKEGTRRLLQELSKLGYRVSAKKAQLCREEVTYLGYLLKGGKRWLTPARKATVMKIPTPTTPRQVREFLGKAGFCRLFIPGFASLAAPLYPLTRPKVPFTWTEAHQEAFGRIKEALLSAPALALPDLTKPFALYVDEKEGVARGVLTQTLGPWRRPVAYLSKKLDPVASGWPTCLKAIAAVALLLKDADKLTLGQNVLVIAPHNLESIVRQPPDRWMTNARMTHYQSLLLNERVSFAPPAILNPATLLPVESDDTPIHICSEILAEETGTRPDLRDQPLPGVPAWYTDGSSFIMDGRRQAGAAIVDNKRTVWASNLPEGTSAQKAELIALTQALRLAEGKSINIYTDSRYAFATAHVHGAIYKQRGWLTSAGKDIKNKEEILALLEAIHLPKRVAIIHCPGHQRGTDPVATGNRKADEAAKQAAQSTRILTETTKNAGKRTADGSEFEKRTADGSEFESPKKKAKVE

SEQ ID NO: 1719 - protein, 2125 aa, synthetic construct
MPAAKRVKLDGGDKKYSIGLDIGTNSVGWAVITDEYKVPSKKFKVLGNTDRHSIKKNLIGALLFDSGETAEATRLKRTARRRYTRRKNRICYLQEIFSNEMAKVDDSFFHRLEESFLVEEDKKHERHPIFGNIVDEVAYHEKYPTIYHLRKKLVDSTDKADLRLIYLALAHMIKFRGHFLIEGDLNPDNSDVDKLFIQLVQTYNQLFEENPINASGVDAKAILSARLSKSRRLENLIAQLPGEKKNGLFGNLIALSLGLTPNFKSNFDLAEDAKLQLSKDTYDDDLDNLLAQIGDQYADLFLAAKNLSDAILLSDILRVNTEITKAPLSASMIKRYDEHHQDLTLLKALVRQQLPEKYKEIFFDQSKNGYAGYIDGGASQEEFYKFIKPILEKMDGTEELLVKLNREDLLRKQRTFDNGSIPHQIHLGELHAILRRQEDFYPFLKDNREKIEKILTFRIPYYVGPLARGNSRFAWMTRKSEETITPWNFEEVVDKGASAQSFIERMTNFDKNLPNEKVLPKHSLLYEYFTVYNELTKVKYVTEGMRKPAFLSGEQKKAIVDLLFKTNRKVTVKQLKEDYFKKIECFDSVEISGVEDRFNASLGTYHDLLKIIKDKDFLDNEENEDILEDIVLTLTLFEDREMIEERLKTYAHLFDDKVMKQLKRRRYTGWGRLSRKLINGIRDKQSGKTILDFLKSDGFANRNFMQLIHDDSLTFKEDIQKAQVSGQGDSLHEHIANLAGSPAIKKGILQTVKVVDELVKVMGRHKPENIVIEMARENQTTQKGQKNSRERMKRIEEGIKELGSQILKEHPVENTQLQNEKLYLYYLQNGRDMYVDQELDINRLSDYDVDHIVPQSFLKDDSIDNKVLTRSDKARGKSDNVPSEEVVKKMKNYWRQLLNAKLITQRKFDNLTKAERGGLSELDKAGFIKRQLVETRQITKHVAQILDSRMNTKYDENDKLIREVKVITLKSKLVSDFRKDFQFYKVREINNYHHAHDAYLNAVVGTALIKKYPKLESEFVYGDYKVYDVRKMIAKSEQEIGKATAKYFFYSNIMNFFKTEITLANGEIRKRPLIETNGETGEIVWDKGRDFATVRKVLSMPQVNIVKKTEVQTGGFSKESILPKRNSDKLIARKKDWDPKKYGGFDSPTVAYSVLVVAKVEKGKSKKLKSVKELLGITIMERSSFEKNPIDFLEAKGYKEVKKDLIIKLPKYSLFELENGRKRMLASAGELQKGNELALPSKYVNFLYLASHYEKLKGSPEDNEQKQLFVEQHKHYLDEIIEQISEFSKRVILADANLDKVLSAYNKHRDKPIREQAENIIHLFTLTNLGAPAAFKYFDTTIDRKRYTSTKEVLDATLIHQSITGLYETRIDLSQLGGDGGPAPGSSGGGGGLLGRDLLTKLKAQIQFSTEGPQVTWEDRPAMCLVLNLEEEYRLHEKPVPPSIDPSWLQLFPMVWAEKAGMGLANQVPPVVVELKSDASPVAVRQYPMSKEAREGIRPHIQRFLDLGILVPCQSPWNTPLLPVKKPGTNDYRPVQDLREVNKRVQDIHPTVPNPYNLLSSLPPSHTWYSVLDLKDAFFCLKLHPNSQPLFAFEWRDPEKGNTGQLTWTRLPQGFKNSPTLFNEALHRDLASFRALNPQVVMLQYVDDLLVAAPTYRDCKEGTRRLLQELSKLGYRVSAKKAQLCREEVTYLGYLLKGGKRWLTPARKATVMKIPTPTTPRQVREFLGKAGFCRLFIPGFASLAAPLYPLTRPKVPFTWTEAHQEAFGRIKEALLSAPALALPDLTKPFALYVDEKEGVARGVLTQTLGPWRRPVAYLSKKLDPVASGWPTCLKAIAAVALLLKDADKLTLGQNVLVIAPHNLESIVRQPPDRWMTNARMTHYQSLLLNERVSFAPPAILNPATLLPVESDDTPIHICSEILAEETGTRPDLRDQPLPGVPAWYTDGSSFIMDGRRQAGAAIVDNKRTVWASNLPEGTSAQKAELIALTQALRLAEGKSINIYTDSRYAFATAHVHGAIYKQRGWLTSAGKDIKNKEEILALLEAIHLPKRVAIIHCPGHQRGTDPVATGNRKADEAAKQAAQSTRILTETTKNAGKRTADGSEFEKRTADGSEFESPKKKAKVE

SEQ ID NO: 1720 - protein, 2126 aa, synthetic construct
MPAAKRVKLDGGDKKYSIGLDIGTNSVGWAVITDEYKVPSKKFKVLGNTDRHSIKKNLIGALLFDSGETAEATRLKRTARRRYTRRKNRICYLQEIFSNEMAKVDDSFFHRLEESFLVEEDKKHERHPIFGNIVDEVAYHEKYPTIYHLRKKLVDSTDKADLRLIYLALAHMIKFRGHFLIEGDLNPDNSDVDKLFIQLVQTYNQLFEENPINASGVDAKAILSARLSKSRRLENLIAQLPGEKKNGLFGNLIALSLGLTPNFKSNFDLAEDAKLQLSKDTYDDDLDNLLAQIGDQYADLFLAAKNLSDAILLSDILRVNTEITKAPLSASMIKRYDEHHQDLTLLKALVRQQLPEKYKEIFFDQSKNGYAGYIDGGASQEEFYKFIKPILEKMDGTEELLVKLNREDLLRKQRTFDNGSIPHQIHLGELHAILRRQEDFYPFLKDNREKIEKILTFRIPYYVGPLARGNSRFAWMTRKSEETITPWNFEEVVDKGASAQSFIERMTNFDKNLPNEKVLPKHSLLYEYFTVYNELTKVKYVTEGMRKPAFLSGEQKKAIVDLLFKTNRKVTVKQLKEDYFKKIECFDSVEISGVEDRFNASLGTYHDLLKIIKDKDFLDNEENEDILEDIVLTLTLFEDREMIEERLKTYAHLFDDKVMKQLKRRRYTGWGRLSRKLINGIRDKQSGKTILDFLKSDGFANRNFMQLIHDDSLTFKEDIQKAQVSGQGDSLHEHIANLAGSPAIKKGILQTVKVVDELVKVMGRHKPENIVIEMARENQTTQKGQKNSRERMKRIEEGIKELGSQILKEHPVENTQLQNEKLYLYYLQNGRDMYVDQELDINRLSDYDVDHIVPQSFLKDDSIDNKVLTRSDKARGKSDNVPSEEVVKKMKNYWRQLLNAKLITQRKFDNLTKAERGGLSELDKAGFIKRQLVETRQITKHVAQILDSRMNTKYDENDKLIREVKVITLKSKLVSDFRKDFQFYKVREINNYHHAHDAYLNAVVGTALIKKYPKLESEFVYGDYKVYDVRKMIAKSEQEIGKATAKYFFYSNIMNFFKTEITLANGEIRKRPLIETNGETGEIVWDKGRDFATVRKVLSMPQVNIVKKTEVQTGGFSKESILPKRNSDKLIARKKDWDPKKYGGFDSPTVAYSVLVVAKVEKGKSKKLKSVKELLGITIMERSSFEKNPIDFLEAKGYKEVKKDLIIKLPKYSLFELENGRKRMLASAGELQKGNELALPSKYVNFLYLASHYEKLKGSPEDNEQKQLFVEQHKHYLDEIIEQISEFSKRVILADANLDKVLSAYNKHRDKPIREQAENIIHLFTLTNLGAPAAFKYFDTTIDRKRYTSTKEVLDATLIHQSITGLYETRIDLSQLGGDGGGGGGSGGGGSGGLLGRDLLTKLKAQIQFSTEGPQVTWEDRPAMCLVLNLEEEYRLHEKPVPPSIDPSWLQLFPMVWAEKAGMGLANQVPPVVVELKSDASPVAVRQYPMSKEAREGIRPHIQRFLDLGILVPCQSPWNTPLLPVKKPGTNDYRPVQDLREVNKRVQDIHPTVPNPYNLLSSLPPSHTWYSVLDLKDAFFCLKLHPNSQPLFAFEWRDPEKGNTGQLTWTRLPQGFKNSPTLFNEALHRDLASFRALNPQVVMLQYVDDLLVAAPTYRDCKEGTRRLLQELSKLGYRVSAKKAQLCREEVTYLGYLLKGGKRWLTPARKATVMKIPTPTTPRQVREFLGKAGFCRLFIPGFASLAAPLYPLTRPKVPFTWTEAHQEAFGRIKEALLSAPALALPDLTKPFALYVDEKEGVARGVLTQTLGPWRRPVAYLSKKLDPVASGWPTCLKAIAAVALLLKDADKLTLGQNVLVIAPHNLESIVRQPPDRWMTNARMTHYQSLLLNERVSFAPPAILNPATLLPVESDDTPIHICSEILAEETGTRPDLRDQPLPGVPAWYTDGSSFIMDGRRQAGAAIVDNKRTVWASNLPEGTSAQKAELIALTQALRLAEGKSINIYTDSRYAFATAHVHGAIYKQRGWLTSAGKDIKNKEEILALLEAIHLPKRVAIIHCPGHQRGTDPVATGNRKADEAAKQAAQSTRILTETTKNAGKRTADGSEFEKRTADGSEFESPKKKAKVE

SEQ ID NO: 1721 - protein, 2127 aa, synthetic construct
MPAAKRVKLDGGDKKYSIGLDIGTNSVGWAVITDEYKVPSKKFKVLGNTDRHSIKKNLIGALLFDSGETAEATRLKRTARRRYTRRKNRICYLQEIFSNEMAKVDDSFFHRLEESFLVEEDKKHERHPIFGNIVDEVAYHEKYPTIYHLRKKLVDSTDKADLRLIYLALAHMIKFRGHFLIEGDLNPDNSDVDKLFIQLVQTYNQLFEENPINASGVDAKAILSARLSKSRRLENLIAQLPGEKKNGLFGNLIALSLGLTPNFKSNFDLAEDAKLQLSKDTYDDDLDNLLAQIGDQYADLFLAAKNLSDAILLSDILRVNTEITKAPLSASMIKRYDEHHQDLTLLKALVRQQLPEKYKEIFFDQSKNGYAGYIDGGASQEEFYKFIKPILEKMDGTEELLVKLNREDLLRKQRTFDNGSIPHQIHLGELHAILRRQEDFYPFLKDNREKIEKILTFRIPYYVGPLARGNSRFAWMTRKSEETITPWNFEEVVDKGASAQSFIERMTNFDKNLPNEKVLPKHSLLYEYFTVYNELTKVKYVTEGMRKPAFLSGEQKKAIVDLLFKTNRKVTVKQLKEDYFKKIECFDSVEISGVEDRFNASLGTYHDLLKIIKDKDFLDNEENEDILEDIVLTLTLFEDREMIEERLKTYAHLFDDKVMKQLKRRRYTGWGRLSRKLINGIRDKQSGKTILDFLKSDGFANRNFMQLIHDDSLTFKEDIQKAQVSGQGDSLHEHIANLAGSPAIKKGILQTVKVVDELVKVMGRHKPENIVIEMARENQTTQKGQKNSRERMKRIEEGIKELGSQILKEHPVENTQLQNEKLYLYYLQNGRDMYVDQELDINRLSDYDVDHIVPQSFLKDDSIDNKVLTRSDKARGKSDNVPSEEVVKKMKNYWRQLLNAKLITQRKFDNLTKAERGGLSELDKAGFIKRQLVETRQITKHVAQILDSRMNTKYDENDKLIREVKVITLKSKLVSDFRKDFQFYKVREINNYHHAHDAYLNAVVGTALIKKYPKLESEFVYGDYKVYDVRKMIAKSEQEIGKATAKYFFYSNIMNFFKTEITLANGEIRKRPLIETNGETGEIVWDKGRDFATVRKVLSMPQVNIVKKTEVQTGGFSKESILPKRNSDKLIARKKDWDPKKYGGFDSPTVAYSVLVVAKVEKGKSKKLKSVKELLGITIMERSSFEKNPIDFLEAKGYKEVKKDLIIKLPKYSLFELENGRKRMLASAGELQKGNELALPSKYVNFLYLASHYEKLKGSPEDNEQKQLFVEQHKHYLDEIIEQISEFSKRVILADANLDKVLSAYNKHRDKPIREQAENIIHLFTLTNLGAPAAFKYFDTTIDRKRYTSTKEVLDATLIHQSITGLYETRIDLSQLGGDGGGSSPAPEAAAKGGLLGRDLLTKLKAQIQFSTEGPQVTWEDRPAMCLVLNLEEEYRLHEKPVPPSIDPSWLQLFPMVWAEKAGMGLANQVPPVVVELKSDASPVAVRQYPMSKEAREGIRPHIQRFLDLGILVPCQSPWNTPLLPVKKPGTNDYRPVQDLREVNKRVQDIHPTVPNPYNLLSSLPPSHTWYSVLDLKDAFFCLKLHPNSQPLFAFEWRDPEKGNTGQLTWTRLPQGFKNSPTLFNEALHRDLASFRALNPQVVMLQYVDDLLVAAPTYRDCKEGTRRLLQELSKLGYRVSAKKAQLCREEVTYLGYLLKGGKRWLTPARKATVMKIPTPTTPRQVREFLGKAGFCRLFIPGFASLAAPLYPLTRPKVPFTWTEAHQEAFGRIKEALLSAPALALPDLTKPFALYVDEKEGVARGVLTQTLGPWRRPVAYLSKKLDPVASGWPTCLKAIAAVALLLKDADKLTLGQNVLVIAPHNLESIVRQPPDRWMTNARMTHYQSLLLNERVSFAPPAILNPATLLPVESDDTPIHICSEILAEETGTRPDLRDQPLPGVPAWYTDGSSFIMDGRRQAGAAIVDNKRTVWASNLPEGTSAQKAELIALTQALRLAEGKSINIYTDSRYAFATAHVHGAIYKQRGWLTSAGKDIKNKEEILALLEAIHLPKRVAIIHCPGHQRGTDPVATGNRKADEAAKQAAQSTRILTETTKNAGKRTADGSEFEKRTADGSEFESPKKKAKVE

SEQ ID NO: 1722 - protein, 2127 aa, synthetic construct
MPAAKRVKLDGGDKKYSIGLDIGTNSVGWAVITDEYKVPSKKFKVLGNTDRHSIKKNLIGALLFDSGETAEATRLKRTARRRYTRRKNRICYLQEIFSNEMAKVDDSFFHRLEESFLVEEDKKHERHPIFGNIVDEVAYHEKYPTIYHLRKKLVDSTDKADLRLIYLALAHMIKFRGHFLIEGDLNPDNSDVDKLFIQLVQTYNQLFEENPINASGVDAKAILSARLSKSRRLENLIAQLPGEKKNGLFGNLIALSLGLTPNFKSNFDLAEDAKLQLSKDTYDDDLDNLLAQIGDQYADLFLAAKNLSDAILLSDILRVNTEITKAPLSASMIKRYDEHHQDLTLLKALVRQQLPEKYKEIFFDQSKNGYAGYIDGGASQEEFYKFIKPILEKMDGTEELLVKLNREDLLRKQRTFDNGSIPHQIHLGELHAILRRQEDFYPFLKDNREKIEKILTFRIPYYVGPLARGNSRFAWMTRKSEETITPWNFEEVVDKGASAQSFIERMTNFDKNLPNEKVLPKHSLLYEYFTVYNELTKVKYVTEGMRKPAFLSGEQKKAIVDLLFKTNRKVTVKQLKEDYFKKIECFDSVEISGVEDRFNASLGTYHDLLKIIKDKDFLDNEENEDILEDIVLTLTLFEDREMIEERLKTYAHLFDDKVMKQLKRRRYTGWGRLSRKLINGIRDKQSGKTILDFLKSDGFANRNFMQLIHDDSLTFKEDIQKAQVSGQGDSLHEHIANLAGSPAIKKGILQTVKVVDELVKVMGRHKPENIVIEMARENQTTQKGQKNSRERMKRIEEGIKELGSQILKEHPVENTQLQNEKLYLYYLQNGRDMYVDQELDINRLSDYDVDHIVPQSFLKDDSIDNKVLTRSDKARGKSDNVPSEEVVKKMKNYWRQLLNAKLITQRKFDNLTKAERGGLSELDKAGFIKRQLVETRQITKHVAQILDSRMNTKYDENDKLIREVKVITLKSKLVSDFRKDFQFYKVREINNYHHAHDAYLNAVVGTALIKKYPKLESEFVYGDYKVYDVRKMIAKSEQEIGKATAKYFFYSNIMNFFKTEITLANGEIRKRPLIETNGETGEIVWDKGRDFATVRKVLSMPQVNIVKKTEVQTGGFSKESILPKRNSDKLIARKKDWDPKKYGGFDSPTVAYSVLVVAKVEKGKSKKLKSVKELLGITIMERSSFEKNPIDFLEAKGYKEVKKDLIIKLPKYSLFELENGRKRMLASAGELQKGNELALPSKYVNFLYLASHYEKLKGSPEDNEQKQLFVEQHKHYLDEIIEQISEFSKRVILADANLDKVLSAYNKHRDKPIREQAENIIHLFTLTNLGAPAAFKYFDTTIDRKRYTSTKEVLDATLIHQSITGLYETRIDLSQLGGDGGGGSEAAAKGSSGGLLGRDLLTKLKAQIQFSTEGPQVTWEDRPAMCLVLNLEEEYRLHEKPVPPSIDPSWLQLFPMVWAEKAGMGLANQVPPVVVELKSDASPVAVRQYPMSKEAREGIRPHIQRFLDLGILVPCQSPWNTPLLPVKKPGTNDYRPVQDLREVNKRVQDIHPTVPNPYNLLSSLPPSHTWYSVLDLKDAFFCLKLHPNSQPLFAFEWRDPEKGNTGQLTWTRLPQGFKNSPTLFNEALHRDLASFRALNPQVVMLQYVDDLLVAAPTYRDCKEGTRRLLQELSKLGYRVSAKKAQLCREEVTYLGYLLKGGKRWLTPARKATVMKIPTPTTPRQVREFLGKAGFCRLFIPGFASLAAPLYPLTRPKVPFTWTEAHQEAFGRIKEALLSAPALALPDLTKPFALYVDEKEGVARGVLTQTLGPWRRPVAYLSKKLDPVASGWPTCLKAIAAVALLLKDADKLTLGQNVLVIAPHNLESIVRQPPDRWMTNARMTHYQSLLLNERVSFAPPAILNPATLLPVESDDTPIHICSEILAEETGTRPDLRDQPLPGVPAWYTDGSSFIMDGRRQAGAAIVDNKRTVWASNLPEGTSAQKAELIALTQALRLAEGKSINIYTDSRYAFATAHVHGAIYKQRGWLTSAGKDIKNKEEILALLEAIHLPKRVAIIHCPGHQRGTDPVATGNRKADEAAKQAAQSTRILTETTKNAGKRTADGSEFEKRTADGSEFESPKKKAKVE

SEQ ID NO: 1723 - protein, 2127 aa, synthetic construct
MPAAKRVKLDGGDKKYSIGLDIGTNSVGWAVITDEYKVPSKKFKVLGNTDRHSIKKNLIGALLFDSGETAEATRLKRTARRRYTRRKNRICYLQEIFSNEMAKVDDSFFHRLEESFLVEEDKKHERHPIFGNIVDEVAYHEKYPTIYHLRKKLVDSTDKADLRLIYLALAHMIKFRGHFLIEGDLNPDNSDVDKLFIQLVQTYNQLFEENPINASGVDAKAILSARLSKSRRLENLIAQLPGEKKNGLFGNLIALSLGLTPNFKSNFDLAEDAKLQLSKDTYDDDLDNLLAQIGDQYADLFLAAKNLSDAILLSDILRVNTEITKAPLSASMIKRYDEHHQDLTLLKALVRQQLPEKYKEIFFDQSKNGYAGYIDGGASQEEFYKFIKPILEKMDGTEELLVKLNREDLLRKQRTFDNGSIPHQIHLGELHAILRRQEDFYPFLKDNREKIEKILTFRIPYYVGPLARGNSRFAWMTRKSEETITPWNFEEVVDKGASAQSFIERMTNFDKNLPNEKVLPKHSLLYEYFTVYNELTKVKYVTEGMRKPAFLSGEQKKAIVDLLFKTNRKVTVKQLKEDYFKKIECFDSVEISGVEDRFNASLGTYHDLLKIIKDKDFLDNEENEDILEDIVLTLTLFEDREMIEERLKTYAHLFDDKVMKQLKRRRYTGWGRLSRKLINGIRDKQSGKTILDFLKSDGFANRNFMQLIHDDSLTFKEDIQKAQVSGQGDSLHEHIANLAGSPAIKKGILQTVKVVDELVKVMGRHKPENIVIEMARENQTTQKGQKNSRERMKRIEEGIKELGSQILKEHPVENTQLQNEKLYLYYLQNGRDMYVDQELDINRLSDYDVDHIVPQSFLKDDSIDNKVLTRSDKARGKSDNVPSEEVVKKMKNYWRQLLNAKLITQRKFDNLTKAERGGLSELDKAGFIKRQLVETRQITKHVAQILDSRMNTKYDENDKLIREVKVITLKSKLVSDFRKDFQFYKVREINNYHHAHDAYLNAVVGTALIKKYPKLESEFVYGDYKVYDVRKMIAKSEQEIGKATAKYFFYSNIMNFFKTEITLANGEIRKRPLIETNGETGEIVWDKGRDFATVRKVLSMPQVNIVKKTEVQTGGFSKESILPKRNSDKLIARKKDWDPKKYGGFDSPTVAYSVLVVAKVEKGKSKKLKSVKELLGITIMERSSFEKNPIDFLEAKGYKEVKKDLIIKLPKYSLFELENGRKRMLASAGELQKGNELALPSKYVNFLYLASHYEKLKGSPEDNEQKQLFVEQHKHYLDEIIEQISEFSKRVILADANLDKVLSAYNKHRDKPIREQAENIIHLFTLTNLGAPAAFKYFDTTIDRKRYTSTKEVLDATLIHQSITGLYETRIDLSQLGGDGGEAAAKPAPGGSGGLLGRDLLTKLKAQIQFSTEGPQVTWEDRPAMCLVLNLEEEYRLHEKPVPPSIDPSWLQLFPMVWAEKAGMGLANQVPPVVVELKSDASPVAVRQYPMSKEAREGIRPHIQRFLDLGILVPCQSPWNTPLLPVKKPGTNDYRPVQDLREVNKRVQDIHPTVPNPYNLLSSLPPSHTWYSVLDLKDAFFCLKLHPNSQPLFAFEWRDPEKGNTGQLTWTRLPQGFKNSPTLFNEALHRDLASFRALNPQVVMLQYVDDLLVAAPTYRDCKEGTRRLLQELSKLGYRVSAKKAQLCREEVTYLGYLLKGGKRWLTPARKATVMKIPTPTTPRQVREFLGKAGFCRLFIPGFASLAAPLYPLTRPKVPFTWTEAHQEAFGRIKEALLSAPALALPDLTKPFALYVDEKEGVARGVLTQTLGPWRRPVAYLSKKLDPVASGWPTCLKAIAAVALLLKDADKLTLGQNVLVIAPHNLESIVRQPPDRWMTNARMTHYQSLLLNERVSFAPPAILNPATLLPVESDDTPIHICSEILAEETGTRPDLRDQPLPGVPAWYTDGSSFIMDGRRQAGAAIVDNKRTVWASNLPEGTSAQKAELIALTQALRLAEGKSINIYTDSRYAFATAHVHGAIYKQRGWLTSAGKDIKNKEEILALLEAIHLPKRVAIIHCPGHQRGTDPVATGNRKADEAAKQAAQSTRILTETTKNAGKRTADGSEFEKRTADGSEFESPKKKAKVE

SEQ ID NO: 1724 - protein, 2125 aa, synthetic construct
MPAAKRVKLDGGDKKYSIGLDIGTNSVGWAVITDEYKVPSKKFKVLGNTDRHSIKKNLIGALLFDSGETAEATRLKRTARRRYTRRKNRICYLQEIFSNEMAKVDDSFFHRLEESFLVEEDKKHERHPIFGNIVDEVAYHEKYPTIYHLRKKLVDSTDKADLRLIYLALAHMIKFRGHFLIEGDLNPDNSDVDKLFIQLVQTYNQLFEENPINASGVDAKAILSARLSKSRRLENLIAQLPGEKKNGLFGNLIALSLGLTPNFKSNFDLAEDAKLQLSKDTYDDDLDNLLAQIGDQYADLFLAAKNLSDAILLSDILRVNTEITKAPLSASMIKRYDEHHQDLTLLKALVRQQLPEKYKEIFFDQSKNGYAGYIDGGASQEEFYKFIKPILEKMDGTEELLVKLNREDLLRKQRTFDNGSIPHQIHLGELHAILRRQEDFYPFLKDNREKIEKILTFRIPYYVGPLARGNSRFAWMTRKSEETITPWNFEEVVDKGASAQSFIERMTNFDKNLPNEKVLPKHSLLYEYFTVYNELTKVKYVTEGMRKPAFLSGEQKKAIVDLLFKTNRKVTVKQLKEDYFKKIECFDSVEISGVEDRFNASLGTYHDLLKIIKDKDFLDNEENEDILEDIVLTLTLFEDREMIEERLKTYAHLFDDKVMKQLKRRRYTGWGRLSRKLINGIRDKQSGKTILDFLKSDGFANRNFMQLIHDDSLTFKEDIQKAQVSGQGDSLHEHIANLAGSPAIKKGILQTVKVVDELVKVMGRHKPENIVIEMARENQTTQKGQKNSRERMKRIEEGIKELGSQILKEHPVENTQLQNEKLYLYYLQNGRDMYVDQELDINRLSDYDVDHIVPQSFLKDDSIDNKVLTRSDKARGKSDNVPSEEVVKKMKNYWRQLLNAKLITQRKFDNLTKAERGGLSELDKAGFIKRQLVETRQITKHVAQILDSRMNTKYDENDKLIREVKVITLKSKLVSDFRKDFQFYKVREINNYHHAHDAYLNAVVGTALIKKYPKLESEFVYGDYKVYDVRKMIAKSEQEIGKATAKYFFYSNIMNFFKTEITLANGEIRKRPLIETNGETGEIVWDKGRDFATVRKVLSMPQVNIVKKTEVQTGGFSKESILPKRNSDKLIARKKDWDPKKYGGFDSPTVAYSVLVVAKVEKGKSKKLKSVKELLGITIMERSSFEKNPIDFLEAKGYKEVKKDLIIKLPKYSLFELENGRKRMLASAGELQKGNELALPSKYVNFLYLASHYEKLKGSPEDNEQKQLFVEQHKHYLDEIIEQISEFSKRVILADANLDKVLSAYNKHRDKPIREQAENIIHLFTLTNLGAPAAFKYFDTTIDRKRYTSTKEVLDATLIHQSITGLYETRIDLSQLGGDGGGGSGSSGGGGGLLGRDLLTKLKAQIQFSTEGPQVTWEDRPAMCLVLNLEEEYRLHEKPVPPSIDPSWLQLFPMVWAEKAGMGLANQVPPVVVELKSDASPVAVRQYPMSKEAREGIRPHIQRFLDLGILVPCQSPWNTPLLPVKKPGTNDYRPVQDLREVNKRVQDIHPTVPNPYNLLSSLPPSHTWYSVLDLKDAFFCLKLHPNSQPLFAFEWRDPEKGNTGQLTWTRLPQGFKNSPTLFNEALHRDLASFRALNPQVVMLQYVDDLLVAAPTYRDCKEGTRRLLQELSKLGYRVSAKKAQLCREEVTYLGYLLKGGKRWLTPARKATVMKIPTPTTPRQVREFLGKAGFCRLFIPGFASLAAPLYPLTRPKVPFTWTEAHQEAFGRIKEALLSAPALALPDLTKPFALYVDEKEGVARGVLTQTLGPWRRPVAYLSKKLDPVASGWPTCLKAIAAVALLLKDADKLTLGQNVLVIAPHNLESIVRQPPDRWMTNARMTHYQSLLLNERVSFAPPAILNPATLLPVESDDTPIHICSEILAEETGTRPDLRDQPLPGVPAWYTDGSSFIMDGRRQAGAAIVDNKRTVWASNLPEGTSAQKAELIALTQALRLAEGKSINIYTDSRYAFATAHVHGAIYKQRGWLTSAGKDIKNKEEILALLEAIHLPKRVAIIHCPGHQRGTDPVATGNRKADEAAKQAAQSTRILTETTKNAGKRTADGSEFEKRTADGSEFESPKKKAKVE

SEQ ID NO: 1725 - protein, 2127 aa, synthetic construct
MPAAKRVKLDGGDKKYSIGLDIGTNSVGWAVITDEYKVPSKKFKVLGNTDRHSIKKNLIGALLFDSGETAEATRLKRTARRRYTRRKNRICYLQEIFSNEMAKVDDSFFHRLEESFLVEEDKKHERHPIFGNIVDEVAYHEKYPTIYHLRKKLVDSTDKADLRLIYLALAHMIKFRGHFLIEGDLNPDNSDVDKLFIQLVQTYNQLFEENPINASGVDAKAILSARLSKSRRLENLIAQLPGEKKNGLFGNLIALSLGLTPNFKSNFDLAEDAKLQLSKDTYDDDLDNLLAQIGDQYADLFLAAKNLSDAILLSDILRVNTEITKAPLSASMIKRYDEHHQDLTLLKALVRQQLPEKYKEIFFDQSKNGYAGYIDGGASQEEFYKFIKPILEKMDGTEELLVKLNREDLLRKQRTFDNGSIPHQIHLGELHAILRRQEDFYPFLKDNREKIEKILTFRIPYYVGPLARGNSRFAWMTRKSEETITPWNFEEVVDKGASAQSFIERMTNFDKNLPNEKVLPKHSLLYEYFTVYNELTKVKYVTEGMRKPAFLSGEQKKAIVDLLFKTNRKVTVKQLKEDYFKKIECFDSVEISGVEDRFNASLGTYHDLLKIIKDKDFLDNEENEDILEDIVLTLTLFEDREMIEERLKTYAHLFDDKVMKQLKRRRYTGWGRLSRKLINGIRDKQSGKTILDFLKSDGFANRNFMQLIHDDSLTFKEDIQKAQVSGQGDSLHEHIANLAGSPAIKKGILQTVKVVDELVKVMGRHKPENIVIEMARENQTTQKGQKNSRERMKRIEEGIKELGSQILKEHPVENTQLQNEKLYLYYLQNGRDMYVDQELDINRLSDYDVDHIVPQSFLKDDSIDNKVLTRSDKARGKSDNVPSEEVVKKMKNYWRQLLNAKLITQRKFDNLTKAERGGLSELDKAGFIKRQLVETRQITKHVAQILDSRMNTKYDENDKLIREVKVITLKSKLVSDFRKDFQFYKVREINNYHHAHDAYLNAVVGTALIKKYPKLESEFVYGDYKVYDVRKMIAKSEQEIGKATAKYFFYSNIMNFFKTEITLANGEIRKRPLIETNGETGEIVWDKGRDFATVRKVLSMPQVNIVKKTEVQTGGFSKESILPKRNSDKLIARKKDWDPKKYGGFDSPTVAYSVLVVAKVEKGKSKKLKSVKELLGITIMERSSFEKNPIDFLEAKGYKEVKKDLIIKLPKYSLFELENGRKRMLASAGELQKGNELALPSKYVNFLYLASHYEKLKGSPEDNEQKQLFVEQHKHYLDEIIEQISEFSKRVILADANLDKVLSAYNKHRDKPIREQAENIIHLFTLTNLGAPAAFKYFDTTIDRKRYTSTKEVLDATLIHQSITGLYETRIDLSQLGGDGGGSSEAAAKGGSGGLLGRDLLTKLKAQIQFSTEGPQVTWEDRPAMCLVLNLEEEYRLHEKPVPPSIDPSWLQLFPMVWAEKAGMGLANQVPPVVVELKSDASPVAVRQYPMSKEAREGIRPHIQRFLDLGILVPCQSPWNTPLLPVKKPGTNDYRPVQDLREVNKRVQDIHPTVPNPYNLLSSLPPSHTWYSVLDLKDAFFCLKLHPNSQPLFAFEWRDPEKGNTGQLTWTRLPQGFKNSPTLFNEALHRDLASFRALNPQVVMLQYVDDLLVAAPTYRDCKEGTRRLLQELSKLGYRVSAKKAQLCREEVTYLGYLLKGGKRWLTPARKATVMKIPTPTTPRQVREFLGKAGFCRLFIPGFASLAAPLYPLTRPKVPFTWTEAHQEAFGRIKEALLSAPALALPDLTKPFALYVDEKEGVARGVLTQTLGPWRRPVAYLSKKLDPVASGWPTCLKAIAAVALLLKDADKLTLGQNVLVIAPHNLESIVRQPPDRWMTNARMTHYQSLLLNERVSFAPPAILNPATLLPVESDDTPIHICSEILAEETGTRPDLRDQPLPGVPAWYTDGSSFIMDGRRQAGAAIVDNKRTVWASNLPEGTSAQKAELIALTQALRLAEGKSINIYTDSRYAFATAHVHGAIYKQRGWLTSAGKDIKNKEEILALLEAIHLPKRVAIIHCPGHQRGTDPVATGNRKADEAAKQAAQSTRILTETTKNAGKRTADGSEFEKRTADGSEFESPKKKAKVE

SEQ ID NO: 1726 - protein, 2127 aa, synthetic construct
MPAAKRVKLDGGDKKYSIGLDIGTNSVGWAVITDEYKVPSKKFKVLGNTDRHSIKKNLIGALLFDSGETAEATRLKRTARRRYTRRKNRICYLQEIFSNEMAKVDDSFFHRLEESFLVEEDKKHERHPIFGNIVDEVAYHEKYPTIYHLRKKLVDSTDKADLRLIYLALAHMIKFRGHFLIEGDLNPDNSDVDKLFIQLVQTYNQLFEENPINASGVDAKAILSARLSKSRRLENLIAQLPGEKKNGLFGNLIALSLGLTPNFKSNFDLAEDAKLQLSKDTYDDDLDNLLAQIGDQYADLFLAAKNLSDAILLSDILRVNTEITKAPLSASMIKRYDEHHQDLTLLKALVRQQLPEKYKEIFFDQSKNGYAGYIDGGASQEEFYKFIKPILEKMDGTEELLVKLNREDLLRKQRTFDNGSIPHQIHLGELHAILRRQEDFYPFLKDNREKIEKILTFRIPYYVGPLARGNSRFAWMTRKSEETITPWNFEEVVDKGASAQSFIERMTNFDKNLPNEKVLPKHSLLYEYFTVYNELTKVKYVTEGMRKPAFLSGEQKKAIVDLLFKTNRKVTVKQLKEDYFKKIECFDSVEISGVEDRFNASLGTYHDLLKIIKDKDFLDNEENEDILEDIVLTLTLFEDREMIEERLKTYAHLFDDKVMKQLKRRRYTGWGRLSRKLINGIRDKQSGKTILDFLKSDGFANRNFMQLIHDDSLTFKEDIQKAQVSGQGDSLHEHIANLAGSPAIKKGILQTVKVVDELVKVMGRHKPENIVIEMARENQTTQKGQKNSRERMKRIEEGIKELGSQILKEHPVENTQLQNEKLYLYYLQNGRDMYVDQELDINRLSDYDVDHIVPQSFLKDDSIDNKVLTRSDKARGKSDNVPSEEVVKKMKNYWRQLLNAKLITQRKFDNLTKAERGGLSELDKAGFIKRQLVETRQITKHVAQILDSRMNTKYDENDKLIREVKVITLKSKLVSDFRKDFQFYKVREINNYHHAHDAYLNAVVGTALIKKYPKLESEFVYGDYKVYDVRKMIAKSEQEIGKATAKYFFYSNIMNFFKTEITLANGEIRKRPLIETNGETGEIVWDKGRDFATVRKVLSMPQVNIVKKTEVQTGGFSKESILPKRNSDKLIARKKDWDPKKYGGFDSPTVAYSVLVVAKVEKGKSKKLKSVKELLGITIMERSSFEKNPIDFLEAKGYKEVKKDLIIKLPKYSLFELENGRKRMLASAGELQKGNELALPSKYVNFLYLASHYEKLKGSPEDNEQKQLFVEQHKHYLDEIIEQISEFSKRVILADANLDKVLSAYNKHRDKPIREQAENIIHLFTLTNLGAPAAFKYFDTTIDRKRYTSTKEVLDATLIHQSITGLYETRIDLSQLGGDGGGGGGSSEAAAKGGLLGRDLLTKLKAQIQFSTEGPQVTWEDRPAMCLVLNLEEEYRLHEKPVPPSIDPSWLQLFPMVWAEKAGMGLANQVPPVVVELKSDASPVAVRQYPMSKEAREGIRPHIQRFLDLGILVPCQSPWNTPLLPVKKPGTNDYRPVQDLREVNKRVQDIHPTVPNPYNLLSSLPPSHTWYSVLDLKDAFFCLKLHPNSQPLFAFEWRDPEKGNTGQLTWTRLPQGFKNSPTLFNEALHRDLASFRALNPQVVMLQYVDDLLVAAPTYRDCKEGTRRLLQELSKLGYRVSAKKAQLCREEVTYLGYLLKGGKRWLTPARKATVMKIPTPTTPRQVREFLGKAGFCRLFIPGFASLAAPLYPLTRPKVPFTWTEAHQEAFGRIKEALLSAPALALPDLTKPFALYVDEKEGVARGVLTQTLGPWRRPVAYLSKKLDPVASGWPTCLKAIAAVALLLKDADKLTLGQNVLVIAPHNLESIVRQPPDRWMTNARMTHYQSLLLNERVSFAPPAILNPATLLPVESDDTPIHICSEILAEETGTRPDLRDQPLPGVPAWYTDGSSFIMDGRRQAGAAIVDNKRTVWASNLPEGTSAQKAELIALTQALRLAEGKSINIYTDSRYAFATAHVHGAIYKQRGWLTSAGKDIKNKEEILALLEAIHLPKRVAIIHCPGHQRGTDPVATGNRKADEAAKQAAQSTRILTETTKNAGKRTADGSEFEKRTADGSEFESPKKKAKVE

SEQ ID NO: 1727 - protein, 2121 aa, synthetic construct
MPAAKRVKLDGGDKKYSIGLDIGTNSVGWAVITDEYKVPSKKFKVLGNTDRHSIKKNLIGALLFDSGETAEATRLKRTARRRYTRRKNRICYLQEIFSNEMAKVDDSFFHRLEESFLVEEDKKHERHPIFGNIVDEVAYHEKYPTIYHLRKKLVDSTDKADLRLIYLALAHMIKFRGHFLIEGDLNPDNSDVDKLFIQLVQTYNQLFEENPINASGVDAKAILSARLSKSRRLENLIAQLPGEKKNGLFGNLIALSLGLTPNFKSNFDLAEDAKLQLSKDTYDDDLDNLLAQIGDQYADLFLAAKNLSDAILLSDILRVNTEITKAPLSASMIKRYDEHHQDLTLLKALVRQQLPEKYKEIFFDQSKNGYAGYIDGGASQEEFYKFIKPILEKMDGTEELLVKLNREDLLRKQRTFDNGSIPHQIHLGELHAILRRQEDFYPFLKDNREKIEKILTFRIPYYVGPLARGNSRFAWMTRKSEETITPWNFEEVVDKGASAQSFIERMTNFDKNLPNEKVLPKHSLLYEYFTVYNELTKVKYVTEGMRKPAFLSGEQKKAIVDLLFKTNRKVTVKQLKEDYFKKIECFDSVEISGVEDRFNASLGTYHDLLKIIKDKDFLDNEENEDILEDIVLTLTLFEDREMIEERLKTYAHLFDDKVMKQLKRRRYTGWGRLSRKLINGIRDKQSGKTILDFLKSDGFANRNFMQLIHDDSLTFKEDIQKAQVSGQGDSLHEHIANLAGSPAIKKGILQTVKVVDELVKVMGRHKPENIVIEMARENQTTQKGQKNSRERMKRIEEGIKELGSQILKEHPVENTQLQNEKLYLYYLQNGRDMYVDQELDINRLSDYDVDHIVPQSFLKDDSIDNKVLTRSDKARGKSDNVPSEEVVKKMKNYWRQLLNAKLITQRKFDNLTKAERGGLSELDKAGFIKRQLVETRQITKHVAQILDSRMNTKYDENDKLIREVKVITLKSKLVSDFRKDFQFYKVREINNYHHAHDAYLNAVVGTALIKKYPKLESEFVYGDYKVYDVRKMIAKSEQEIGKATAKYFFYSNIMNFFKTEITLANGEIRKRPLIETNGETGEIVWDKGRDFATVRKVLSMPQVNIVKKTEVQTGGFSKESILPKRNSDKLIARKKDWDPKKYGGFDSPTVAYSVLVVAKVEKGKSKKLKSVKELLGITIMERSSFEKNPIDFLEAKGYKEVKKDLIIKLPKYSLFELENGRKRMLASAGELQKGNELALPSKYVNFLYLASHYEKLKGSPEDNEQKQLFVEQHKHYLDEIIEQISEFSKRVILADANLDKVLSAYNKHRDKPIREQAENIIHLFTLTNLGAPAAFKYFDTTIDRKRYTSTKEVLDATLIHQSITGLYETRIDLSQLGGDGGPAPAPGGLLGRDLLTKLKAQIQFSTEGPQVTWEDRPAMCLVLNLEEEYRLHEKPVPPSIDPSWLQLFPMVWAEKAGMGLANQVPPVVVELKSDASPVAVRQYPMSKEAREGIRPHIQRFLDLGILVPCQSPWNTPLLPVKKPGTNDYRPVQDLREVNKRVQDIHPTVPNPYNLLSSLPPSHTWYSVLDLKDAFFCLKLHPNSQPLFAFEWRDPEKGNTGQLTWTRLPQGFKNSPTLFNEALHRDLASFRALNPQVVMLQYVDDLLVAAPTYRDCKEGTRRLLQELSKLGYRVSAKKAQLCREEVTYLGYLLKGGKRWLTPARKATVMKIPTPTTPRQVREFLGKAGFCRLFIPGFASLAAPLYPLTRPKVPFTWTEAHQEAFGRIKEALLSAPALALPDLTKPFALYVDEKEGVARGVLTQTLGPWRRPVAYLSKKLDPVASGWPTCLKAIAAVALLLKDADKLTLGQNVLVIAPHNLESIVRQPPDRWMTNARMTHYQSLLLNERVSFAPPAILNPATLLPVESDDTPIHICSEILAEETGTRPDLRDQPLPGVPAWYTDGSSFIMDGRRQAGAAIVDNKRTVWASNLPEGTSAQKAELIALTQALRLAEGKSINIYTDSRYAFATAHVHGAIYKQRGWLTSAGKDIKNKEEILALLEAIHLPKRVAIIHCPGHQRGTDPVATGNRKADEAAKQAAQSTRILTETTKNAGKRTADGSEFEKRTADGSEFESPKKKAKVE

SEQ ID NO: 1728 - protein, 2122 aa, synthetic construct
MPAAKRVKLDGGDKKYSIGLDIGTNSVGWAVITDEYKVPSKKFKVLGNTDRHSIKKNLIGALLFDSGETAEATRLKRTARRRYTRRKNRICYLQEIFSNEMAKVDDSFFHRLEESFLVEEDKKHERHPIFGNIVDEVAYHEKYPTIYHLRKKLVDSTDKADLRLIYLALAHMIKFRGHFLIEGDLNPDNSDVDKLFIQLVQTYNQLFEENPINASGVDAKAILSARLSKSRRLENLIAQLPGEKKNGLFGNLIALSLGLTPNFKSNFDLAEDAKLQLSKDTYDDDLDNLLAQIGDQYADLFLAAKNLSDAILLSDILRVNTEITKAPLSASMIKRYDEHHQDLTLLKALVRQQLPEKYKEIFFDQSKNGYAGYIDGGASQEEFYKFIKPILEKMDGTEELLVKLNREDLLRKQRTFDNGSIPHQIHLGELHAILRRQEDFYPFLKDNREKIEKILTFRIPYYVGPLARGNSRFAWMTRKSEETITPWNFEEVVDKGASAQSFIERMTNFDKNLPNEKVLPKHSLLYEYFTVYNELTKVKYVTEGMRKPAFLSGEQKKAIVDLLFKTNRKVTVKQLKEDYFKKIECFDSVEISGVEDRFNASLGTYHDLLKIIKDKDFLDNEENEDILEDIVLTLTLFEDREMIEERLKTYAHLFDDKVMKQLKRRRYTGWGRLSRKLINGIRDKQSGKTILDFLKSDGFANRNFMQLIHDDSLTFKEDIQKAQVSGQGDSLHEHIANLAGSPAIKKGILQTVKVVDELVKVMGRHKPENIVIEMARENQTTQKGQKNSRERMKRIEEGIKELGSQILKEHPVENTQLQNEKLYLYYLQNGRDMYVDQELDINRLSDYDVDHIVPQSFLKDDSIDNKVLTRSDKARGKSDNVPSEEVVKKMKNYWRQLLNAKLITQRKFDNLTKAERGGLSELDKAGFIKRQLVETRQITKHVAQILDSRMNTKYDENDKLIREVKVITLKSKLVSDFRKDFQFYKVREINNYHHAHDAYLNAVVGTALIKKYPKLESEFVYGDYKVYDVRKMIAKSEQEIGKATAKYFFYSNIMNFFKTEITLANGEIRKRPLIETNGETGEIVWDKGRDFATVRKVLSMPQVNIVKKTEVQTGGFSKESILPKRNSDKLIARKKDWDPKKYGGFDSPTVAYSVLVVAKVEKGKSKKLKSVKELLGITIMERSSFEKNPIDFLEAKGYKEVKKDLIIKLPKYSLFELENGRKRMLASAGELQKGNELALPSKYVNFLYLASHYEKLKGSPEDNEQKQLFVEQHKHYLDEIIEQISEFSKRVILADANLDKVLSAYNKHRDKPIREQAENIIHLFTLTNLGAPAAFKYFDTTIDRKRYTSTKEVLDATLIHQSITGLYETRIDLSQLGGDGGPAPGGSGGLLGRDLLTKLKAQIQFSTEGPQVTWEDRPAMCLVLNLEEEYRLHEKPVPPSIDPSWLQLFPMVWAEKAGMGLANQVPPVVVELKSDASPVAVRQYPMSKEAREGIRPHIQRFLDLGILVPCQSPWNTPLLPVKKPGTNDYRPVQDLREVNKRVQDIHPTVPNPYNLLSSLPPSHTWYSVLDLKDAFFCLKLHPNSQPLFAFEWRDPEKGNTGQLTWTRLPQGFKNSPTLFNEALHRDLASFRALNPQVVMLQYVDDLLVAAPTYRDCKEGTRRLLQELSKLGYRVSAKKAQLCREEVTYLGYLLKGGKRWLTPARKATVMKIPTPTTPRQVREFLGKAGFCRLFIPGFASLAAPLYPLTRPKVPFTWTEAHQEAFGRIKEALLSAPALALPDLTKPFALYVDEKEGVARGVLTQTLGPWRRPVAYLSKKLDPVASGWPTCLKAIAAVALLLKDADKLTLGQNVLVIAPHNLESIVRQPPDRWMTNARMTHYQSLLLNERVSFAPPAILNPATLLPVESDDTPIHICSEILAEETGTRPDLRDQPLPGVPAWYTDGSSFIMDGRRQAGAAIVDNKRTVWASNLPEGTSAQKAELIALTQALRLAEGKSINIYTDSRYAFATAHVHGAIYKQRGWLTSAGKDIKNKEEILALLEAIHLPKRVAIIHCPGHQRGTDPVATGNRKADEAAKQAAQSTRILTETTKNAGKRTADGSEFEKRTADGSEFESPKKKAKVE

SEQ ID NO: 1729 - protein, 2131 aa, synthetic construct
MPAAKRVKLDGGDKKYSIGLDIGTNSVGWAVITDEYKVPSKKFKVLGNTDRHSIKKNLIGALLFDSGETAEATRLKRTARRRYTRRKNRICYLQEIFSNEMAKVDDSFFHRLEESFLVEEDKKHERHPIFGNIVDEVAYHEKYPTIYHLRKKLVDSTDKADLRLIYLALAHMIKFRGHFLIEGDLNPDNSDVDKLFIQLVQTYNQLFEENPINASGVDAKAILSARLSKSRRLENLIAQLPGEKKNGLFGNLIALSLGLTPNFKSNFDLAEDAKLQLSKDTYDDDLDNLLAQIGDQYADLFLAAKNLSDAILLSDILRVNTEITKAPLSASMIKRYDEHHQDLTLLKALVRQQLPEKYKEIFFDQSKNGYAGYIDGGASQEEFYKFIKPILEKMDGTEELLVKLNREDLLRKQRTFDNGSIPHQIHLGELHAILRRQEDFYPFLKDNREKIEKILTFRIPYYVGPLARGNSRFAWMTRKSEETITPWNFEEVVDKGASAQSFIERMTNFDKNLPNEKVLPKHSLLYEYFTVYNELTKVKYVTEGMRKPAFLSGEQKKAIVDLLFKTNRKVTVKQLKEDYFKKIECFDSVEISGVEDRFNASLGTYHDLLKIIKDKDFLDNEENEDILEDIVLTLTLFEDREMIEERLKTYAHLFDDKVMKQLKRRRYTGWGRLSRKLINGIRDKQSGKTILDFLKSDGFANRNFMQLIHDDSLTFKEDIQKAQVSGQGDSLHEHIANLAGSPAIKKGILQTVKVVDELVKVMGRHKPENIVIEMARENQTTQKGQKNSRERMKRIEEGIKELGSQILKEHPVENTQLQNEKLYLYYLQNGRDMYVDQELDINRLSDYDVDHIVPQSFLKDDSIDNKVLTRSDKARGKSDNVPSEEVVKKMKNYWRQLLNAKLITQRKFDNLTKAERGGLSELDKAGFIKRQLVETRQITKHVAQILDSRMNTKYDENDKLIREVKVITLKSKLVSDFRKDFQFYKVREINNYHHAHDAYLNAVVGTALIKKYPKLESEFVYGDYKVYDVRKMIAKSEQEIGKATAKYFFYSNIMNFFKTEITLANGEIRKRPLIETNGETGEIVWDKGRDFATVRKVLSMPQVNIVKKTEVQTGGFSKESILPKRNSDKLIARKKDWDPKKYGGFDSPTVAYSVLVVAKVEKGKSKKLKSVKELLGITIMERSSFEKNPIDFLEAKGYKEVKKDLIIKLPKYSLFELENGRKRMLASAGELQKGNELALPSKYVNFLYLASHYEKLKGSPEDNEQKQLFVEQHKHYLDEIIEQISEFSKRVILADANLDKVLSAYNKHRDKPIREQAENIIHLFTLTNLGAPAAFKYFDTTIDRKRYTSTKEVLDATLIHQSITGLYETRIDLSQLGGDGGGGGGSGGGGSGGGGSGGLLGRDLLTKLKAQIQFSTEGPQVTWEDRPAMCLVLNLEEEYRLHEKPVPPSIDPSWLQLFPMVWAEKAGMGLANQVPPVVVELKSDASPVAVRQYPMSKEAREGIRPHIQRFLDLGILVPCQSPWNTPLLPVKKPGTNDYRPVQDLREVNKRVQDIHPTVPNPYNLLSSLPPSHTWYSVLDLKDAFFCLKLHPNSQPLFAFEWRDPEKGNTGQLTWTRLPQGFKNSPTLFNEALHRDLASFRALNPQVVMLQYVDDLLVAAPTYRDCKEGTRRLLQELSKLGYRVSAKKAQLCREEVTYLGYLLKGGKRWLTPARKATVMKIPTPTTPRQVREFLGKAGFCRLFIPGFASLAAPLYPLTRPKVPFTWTEAHQEAFGRIKEALLSAPALALPDLTKPFALYVDEKEGVARGVLTQTLGPWRRPVAYLSKKLDPVASGWPTCLKAIAAVALLLKDADKLTLGQNVLVIAPHNLESIVRQPPDRWMTNARMTHYQSLLLNERVSFAPPAILNPATLLPVESDDTPIHICSEILAEETGTRPDLRDQPLPGVPAWYTDGSSFIMDGRRQAGAAIVDNKRTVWASNLPEGTSAQKAELIALTQALRLAEGKSINIYTDSRYAFATAHVHGAIYKQRGWLTSAGKDIKNKEEILALLEAIHLPKRVAIIHCPGHQRGTDPVATGNRKADEAAKQAAQSTRILTETTKNAGKRTADGSEFEKRTADGSEFESPKKKAKVE

SEQ ID NO: 1730 - protein, 2125 aa, synthetic construct
MPAAKRVKLDGGDKKYSIGLDIGTNSVGWAVITDEYKVPSKKFKVLGNTDRHSIKKNLIGALLFDSGETAEATRLKRTARRRYTRRKNRICYLQEIFSNEMAKVDDSFFHRLEESFLVEEDKKHERHPIFGNIVDEVAYHEKYPTIYHLRKKLVDSTDKADLRLIYLALAHMIKFRGHFLIEGDLNPDNSDVDKLFIQLVQTYNQLFEENPINASGVDAKAILSARLSKSRRLENLIAQLPGEKKNGLFGNLIALSLGLTPNFKSNFDLAEDAKLQLSKDTYDDDLDNLLAQIGDQYADLFLAAKNLSDAILLSDILRVNTEITKAPLSASMIKRYDEHHQDLTLLKALVRQQLPEKYKEIFFDQSKNGYAGYIDGGASQEEFYKFIKPILEKMDGTEELLVKLNREDLLRKQRTFDNGSIPHQIHLGELHAILRRQEDFYPFLKDNREKIEKILTFRIPYYVGPLARGNSRFAWMTRKSEETITPWNFEEVVDKGASAQSFIERMTNFDKNLPNEKVLPKHSLLYEYFTVYNELTKVKYVTEGMRKPAFLSGEQKKAIVDLLFKTNRKVTVKQLKEDYFKKIECFDSVEISGVEDRFNASLGTYHDLLKIIKDKDFLDNEENEDILEDIVLTLTLFEDREMIEERLKTYAHLFDDKVMKQLKRRRYTGWGRLSRKLINGIRDKQSGKTILDFLKSDGFANRNFMQLIHDDSLTFKEDIQKAQVSGQGDSLHEHIANLAGSPAIKKGILQTVKVVDELVKVMGRHKPENIVIEMARENQTTQKGQKNSRERMKRIEEGIKELGSQILKEHPVENTQLQNEKLYLYYLQNGRDMYVDQELDINRLSDYDVDHIVPQSFLKDDSIDNKVLTRSDKARGKSDNVPSEEVVKKMKNYWRQLLNAKLITQRKFDNLTKAERGGLSELDKAGFIKRQLVETRQITKHVAQILDSRMNTKYDENDKLIREVKVITLKSKLVSDFRKDFQFYKVREINNYHHAHDAYLNAVVGTALIKKYPKLESEFVYGDYKVYDVRKMIAKSEQEIGKATAKYFFYSNIMNFFKTEITLANGEIRKRPLIETNGETGEIVWDKGRDFATVRKVLSMPQVNIVKKTEVQTGGFSKESILPKRNSDKLIARKKDWDPKKYGGFDSPTVAYSVLVVAKVEKGKSKKLKSVKELLGITIMERSSFEKNPIDFLEAKGYKEVKKDLIIKLPKYSLFELENGRKRMLASAGELQKGNELALPSKYVNFLYLASHYEKLKGSPEDNEQKQLFVEQHKHYLDEIIEQISEFSKRVILADANLDKVLSAYNKHRDKPIREQAENIIHLFTLTNLGAPAAFKYFDTTIDRKRYTSTKEVLDATLIHQSITGLYETRIDLSQLGGDGGGGSPAPGGGGGLLGRDLLTKLKAQIQFSTEGPQVTWEDRPAMCLVLNLEEEYRLHEKPVPPSIDPSWLQLFPMVWAEKAGMGLANQVPPVVVELKSDASPVAVRQYPMSKEAREGIRPHIQRFLDLGILVPCQSPWNTPLLPVKKPGTNDYRPVQDLREVNKRVQDIHPTVPNPYNLLSSLPPSHTWYSVLDLKDAFFCLKLHPNSQPLFAFEWRDPEKGNTGQLTWTRLPQGFKNSPTLFNEALHRDLASFRALNPQVVMLQYVDDLLVAAPTYRDCKEGTRRLLQELSKLGYRVSAKKAQLCREEVTYLGYLLKGGKRWLTPARKATVMKIPTPTTPRQVREFLGKAGFCRLFIPGFASLAAPLYPLTRPKVPFTWTEAHQEAFGRIKEALLSAPALALPDLTKPFALYVDEKEGVARGVLTQTLGPWRRPVAYLSKKLDPVASGWPTCLKAIAAVALLLKDADKLTLGQNVLVIAPHNLESIVRQPPDRWMTNARMTHYQSLLLNERVSFAPPAILNPATLLPVESDDTPIHICSEILAEETGTRPDLRDQPLPGVPAWYTDGSSFIMDGRRQAGAAIVDNKRTVWASNLPEGTSAQKAELIALTQALRLAEGKSINIYTDSRYAFATAHVHGAIYKQRGWLTSAGKDIKNKEEILALLEAIHLPKRVAIIHCPGHQRGTDPVATGNRKADEAAKQAAQSTRILTETTKNAGKRTADGSEFEKRTADGSEFESPKKKAKVE

SEQ ID NO: 1731 - protein, 2122 aa, synthetic construct
MPAAKRVKLDGGDKKYSIGLDIGTNSVGWAVITDEYKVPSKKFKVLGNTDRHSIKKNLIGALLFDSGETAEATRLKRTARRRYTRRKNRICYLQEIFSNEMAKVDDSFFHRLEESFLVEEDKKHERHPIFGNIVDEVAYHEKYPTIYHLRKKLVDSTDKADLRLIYLALAHMIKFRGHFLIEGDLNPDNSDVDKLFIQLVQTYNQLFEENPINASGVDAKAILSARLSKSRRLENLIAQLPGEKKNGLFGNLIALSLGLTPNFKSNFDLAEDAKLQLSKDTYDDDLDNLLAQIGDQYADLFLAAKNLSDAILLSDILRVNTEITKAPLSASMIKRYDEHHQDLTLLKALVRQQLPEKYKEIFFDQSKNGYAGYIDGGASQEEFYKFIKPILEKMDGTEELLVKLNREDLLRKQRTFDNGSIPHQIHLGELHAILRRQEDFYPFLKDNREKIEKILTFRIPYYVGPLARGNSRFAWMTRKSEETITPWNFEEVVDKGASAQSFIERMTNFDKNLPNEKVLPKHSLLYEYFTVYNELTKVKYVTEGMRKPAFLSGEQKKAIVDLLFKTNRKVTVKQLKEDYFKKIECFDSVEISGVEDRFNASLGTYHDLLKIIKDKDFLDNEENEDILEDIVLTLTLFEDREMIEERLKTYAHLFDDKVMKQLKRRRYTGWGRLSRKLINGIRDKQSGKTILDFLKSDGFANRNFMQLIHDDSLTFKEDIQKAQVSGQGDSLHEHIANLAGSPAIKKGILQTVKVVDELVKVMGRHKPENIVIEMARENQTTQKGQKNSRERMKRIEEGIKELGSQILKEHPVENTQLQNEKLYLYYLQNGRDMYVDQELDINRLSDYDVDHIVPQSFLKDDSIDNKVLTRSDKARGKSDNVPSEEVVKKMKNYWRQLLNAKLITQRKFDNLTKAERGGLSELDKAGFIKRQLVETRQITKHVAQILDSRMNTKYDENDKLIREVKVITLKSKLVSDFRKDFQFYKVREINNYHHAHDAYLNAVVGTALIKKYPKLESEFVYGDYKVYDVRKMIAKSEQEIGKATAKYFFYSNIMNFFKTEITLANGEIRKRPLIETNGETGEIVWDKGRDFATVRKVLSMPQVNIVKKTEVQTGGFSKESILPKRNSDKLIARKKDWDPKKYGGFDSPTVAYSVLVVAKVEKGKSKKLKSVKELLGITIMERSSFEKNPIDFLEAKGYKEVKKDLIIKLPKYSLFELENGRKRMLASAGELQKGNELALPSKYVNFLYLASHYEKLKGSPEDNEQKQLFVEQHKHYLDEIIEQISEFSKRVILADANLDKVLSAYNKHRDKPIREQAENIIHLFTLTNLGAPAAFKYFDTTIDRKRYTSTKEVLDATLIHQSITGLYETRIDLSQLGGDGGGSSPAPGGLLGRDLLTKLKAQIQFSTEGPQVTWEDRPAMCLVLNLEEEYRLHEKPVPPSIDPSWLQLFPMVWAEKAGMGLANQVPPVVVELKSDASPVAVRQYPMSKEAREGIRPHIQRFLDLGILVPCQSPWNTPLLPVKKPGTNDYRPVQDLREVNKRVQDIHPTVPNPYNLLSSLPPSHTWYSVLDLKDAFFCLKLHPNSQPLFAFEWRDPEKGNTGQLTWTRLPQGFKNSPTLFNEALHRDLASFRALNPQVVMLQYVDDLLVAAPTYRDCKEGTRRLLQELSKLGYRVSAKKAQLCREEVTYLGYLLKGGKRWLTPARKATVMKIPTPTTPRQVREFLGKAGFCRLFIPGFASLAAPLYPLTRPKVPFTWTEAHQEAFGRIKEALLSAPALALPDLTKPFALYVDEKEGVARGVLTQTLGPWRRPVAYLSKKLDPVASGWPTCLKAIAAVALLLKDADKLTLGQNVLVIAPHNLESIVRQPPDRWMTNARMTHYQSLLLNERVSFAPPAILNPATLLPVESDDTPIHICSEILAEETGTRPDLRDQPLPGVPAWYTDGSSFIMDGRRQAGAAIVDNKRTVWASNLPEGTSAQKAELIALTQALRLAEGKSINIYTDSRYAFATAHVHGAIYKQRGWLTSAGKDIKNKEEILALLEAIHLPKRVAIIHCPGHQRGTDPVATGNRKADEAAKQAAQSTRILTETTKNAGKRTADGSEFEKRTADGSEFESPKKKAKVE

SEQ ID NO: 1732 - protein, 2125 aa, synthetic construct
MPAAKRVKLDGGDKKYSIGLDIGTNSVGWAVITDEYKVPSKKFKVLGNTDRHSIKKNLIGALLFDSGETAEATRLKRTARRRYTRRKNRICYLQEIFSNEMAKVDDSFFHRLEESFLVEEDKKHERHPIFGNIVDEVAYHEKYPTIYHLRKKLVDSTDKADLRLIYLALAHMIKFRGHFLIEGDLNPDNSDVDKLFIQLVQTYNQLFEENPINASGVDAKAILSARLSKSRRLENLIAQLPGEKKNGLFGNLIALSLGLTPNFKSNFDLAEDAKLQLSKDTYDDDLDNLLAQIGDQYADLFLAAKNLSDAILLSDILRVNTEITKAPLSASMIKRYDEHHQDLTLLKALVRQQLPEKYKEIFFDQSKNGYAGYIDGGASQEEFYKFIKPILEKMDGTEELLVKLNREDLLRKQRTFDNGSIPHQIHLGELHAILRRQEDFYPFLKDNREKIEKILTFRIPYYVGPLARGNSRFAWMTRKSEETITPWNFEEVVDKGASAQSFIERMTNFDKNLPNEKVLPKHSLLYEYFTVYNELTKVKYVTEGMRKPAFLSGEQKKAIVDLLFKTNRKVTVKQLKEDYFKKIECFDSVEISGVEDRFNASLGTYHDLLKIIKDKDFLDNEENEDILEDIVLTLTLFEDREMIEERLKTYAHLFDDKVMKQLKRRRYTGWGRLSRKLINGIRDKQSGKTILDFLKSDGFANRNFMQLIHDDSLTFKEDIQKAQVSGQGDSLHEHIANLAGSPAIKKGILQTVKVVDELVKVMGRHKPENIVIEMARENQTTQKGQKNSRERMKRIEEGIKELGSQILKEHPVENTQLQNEKLYLYYLQNGRDMYVDQELDINRLSDYDVDHIVPQSFLKDDSIDNKVLTRSDKARGKSDNVPSEEVVKKMKNYWRQLLNAKLITQRKFDNLTKAERGGLSELDKAGFIKRQLVETRQITKHVAQILDSRMNTKYDENDKLIREVKVITLKSKLVSDFRKDFQFYKVREINNYHHAHDAYLNAVVGTALIKKYPKLESEFVYGDYKVYDVRKMIAKSEQEIGKATAKYFFYSNIMNFFKTEITLANGEIRKRPLIETNGETGEIVWDKGRDFATVRKVLSMPQVNIVKKTEVQTGGFSKESILPKRNSDKLIARKKDWDPKKYGGFDSPTVAYSVLVVAKVEKGKSKKLKSVKELLGITIMERSSFEKNPIDFLEAKGYKEVKKDLIIKLPKYSLFELENGRKRMLASAGELQKGNELALPSKYVNFLYLASHYEKLKGSPEDNEQKQLFVEQHKHYLDEIIEQISEFSKRVILADANLDKVLSAYNKHRDKPIREQAENIIHLFTLTNLGAPAAFKYFDTTIDRKRYTSTKEVLDATLIHQSITGLYETRIDLSQLGGDGGGGSPAPGSSGGLLGRDLLTKLKAQIQFSTEGPQVTWEDRPAMCLVLNLEEEYRLHEKPVPPSIDPSWLQLFPMVWAEKAGMGLANQVPPVVVELKSDASPVAVRQYPMSKEAREGIRPHIQRFLDLGILVPCQSPWNTPLLPVKKPGTNDYRPVQDLREVNKRVQDIHPTVPNPYNLLSSLPPSHTWYSVLDLKDAFFCLKLHPNSQPLFAFEWRDPEKGNTGQLTWTRLPQGFKNSPTLFNEALHRDLASFRALNPQVVMLQYVDDLLVAAPTYRDCKEGTRRLLQELSKLGYRVSAKKAQLCREEVTYLGYLLKGGKRWLTPARKATVMKIPTPTTPRQVREFLGKAGFCRLFIPGFASLAAPLYPLTRPKVPFTWTEAHQEAFGRIKEALLSAPALALPDLTKPFALYVDEKEGVARGVLTQTLGPWRRPVAYLSKKLDPVASGWPTCLKAIAAVALLLKDADKLTLGQNVLVIAPHNLESIVRQPPDRWMTNARMTHYQSLLLNERVSFAPPAILNPATLLPVESDDTPIHICSEILAEETGTRPDLRDQPLPGVPAWYTDGSSFIMDGRRQAGAAIVDNKRTVWASNLPEGTSAQKAELIALTQALRLAEGKSINIYTDSRYAFATAHVHGAIYKQRGWLTSAGKDIKNKEEILALLEAIHLPKRVAIIHCPGHQRGTDPVATGNRKADEAAKQAAQSTRILTETTKNAGKRTADGSEFEKRTADGSEFESPKKKAKVE

SEQ ID NO: 1733 - protein, 2122 aa, synthetic construct
MPAAKRVKLDGGDKKYSIGLDIGTNSVGWAVITDEYKVPSKKFKVLGNTDRHSIKKNLIGALLFDSGETAEATRLKRTARRRYTRRKNRICYLQEIFSNEMAKVDDSFFHRLEESFLVEEDKKHERHPIFGNIVDEVAYHEKYPTIYHLRKKLVDSTDKADLRLIYLALAHMIKFRGHFLIEGDLNPDNSDVDKLFIQLVQTYNQLFEENPINASGVDAKAILSARLSKSRRLENLIAQLPGEKKNGLFGNLIALSLGLTPNFKSNFDLAEDAKLQLSKDTYDDDLDNLLAQIGDQYADLFLAAKNLSDAILLSDILRVNTEITKAPLSASMIKRYDEHHQDLTLLKALVRQQLPEKYKEIFFDQSKNGYAGYIDGGASQEEFYKFIKPILEKMDGTEELLVKLNREDLLRKQRTFDNGSIPHQIHLGELHAILRRQEDFYPFLKDNREKIEKILTFRIPYYVGPLARGNSRFAWMTRKSEETITPWNFEEVVDKGASAQSFIERMTNFDKNLPNEKVLPKHSLLYEYFTVYNELTKVKYVTEGMRKPAFLSGEQKKAIVDLLFKTNRKVTVKQLKEDYFKKIECFDSVEISGVEDRFNASLGTYHDLLKIIKDKDFLDNEENEDILEDIVLTLTLFEDREMIEERLKTYAHLFDDKVMKQLKRRRYTGWGRLSRKLINGIRDKQSGKTILDFLKSDGFANRNFMQLIHDDSLTFKEDIQKAQVSGQGDSLHEHIANLAGSPAIKKGILQTVKVVDELVKVMGRHKPENIVIEMARENQTTQKGQKNSRERMKRIEEGIKELGSQILKEHPVENTQLQNEKLYLYYLQNGRDMYVDQELDINRLSDYDVDHIVPQSFLKDDSIDNKVLTRSDKARGKSDNVPSEEVVKKMKNYWRQLLNAKLITQRKFDNLTKAERGGLSELDKAGFIKRQLVETRQITKHVAQILDSRMNTKYDENDKLIREVKVITLKSKLVSDFRKDFQFYKVREINNYHHAHDAYLNAVVGTALIKKYPKLESEFVYGDYKVYDVRKMIAKSEQEIGKATAKYFFYSNIMNFFKTEITLANGEIRKRPLIETNGETGEIVWDKGRDFATVRKVLSMPQVNIVKKTEVQTGGFSKESILPKRNSDKLIARKKDWDPKKYGGFDSPTVAYSVLVVAKVEKGKSKKLKSVKELLGITIMERSSFEKNPIDFLEAKGYKEVKKDLIIKLPKYSLFELENGRKRMLASAGELQKGNELALPSKYVNFLYLASHYEKLKGSPEDNEQKQLFVEQHKHYLDEIIEQISEFSKRVILADANLDKVLSAYNKHRDKPIREQAENIIHLFTLTNLGAPAAFKYFDTTIDRKRYTSTKEVLDATLIHQSITGLYETRIDLSQLGGDGGGGSGSSGGLLGRDLLTKLKAQIQFSTEGPQVTWEDRPAMCLVLNLEEEYRLHEKPVPPSIDPSWLQLFPMVWAEKAGMGLANQVPPVVVELKSDASPVAVRQYPMSKEAREGIRPHIQRFLDLGILVPCQSPWNTPLLPVKKPGTNDYRPVQDLREVNKRVQDIHPTVPNPYNLLSSLPPSHTWYSVLDLKDAFFCLKLHPNSQPLFAFEWRDPEKGNTGQLTWTRLPQGFKNSPTLFNEALHRDLASFRALNPQVVMLQYVDDLLVAAPTYRDCKEGTRRLLQELSKLGYRVSAKKAQLCREEVTYLGYLLKGGKRWLTPARKATVMKIPTPTTPRQVREFLGKAGFCRLFIPGFASLAAPLYPLTRPKVPFTWTEAHQEAFGRIKEALLSAPALALPDLTKPFALYVDEKEGVARGVLTQTLGPWRRPVAYLSKKLDPVASGWPTCLKAIAAVALLLKDADKLTLGQNVLVIAPHNLESIVRQPPDRWMTNARMTHYQSLLLNERVSFAPPAILNPATLLPVESDDTPIHICSEILAEETGTRPDLRDQPLPGVPAWYTDGSSFIMDGRRQAGAAIVDNKRTVWASNLPEGTSAQKAELIALTQALRLAEGKSINIYTDSRYAFATAHVHGAIYKQRGWLTSAGKDIKNKEEILALLEAIHLPKRVAIIHCPGHQRGTDPVATGNRKADEAAKQAAQSTRILTETTKNAGKRTADGSEFEKRTADGSEFESPKKKAKVE

SEQ ID NO: 1734 - protein, 2125 aa, synthetic construct
MPAAKRVKLDGGDKKYSIGLDIGTNSVGWAVITDEYKVPSKKFKVLGNTDRHSIKKNLIGALLFDSGETAEATRLKRTARRRYTRRKNRICYLQEIFSNEMAKVDDSFFHRLEESFLVEEDKKHERHPIFGNIVDEVAYHEKYPTIYHLRKKLVDSTDKADLRLIYLALAHMIKFRGHFLIEGDLNPDNSDVDKLFIQLVQTYNQLFEENPINASGVDAKAILSARLSKSRRLENLIAQLPGEKKNGLFGNLIALSLGLTPNFKSNFDLAEDAKLQLSKDTYDDDLDNLLAQIGDQYADLFLAAKNLSDAILLSDILRVNTEITKAPLSASMIKRYDEHHQDLTLLKALVRQQLPEKYKEIFFDQSKNGYAGYIDGGASQEEFYKFIKPILEKMDGTEELLVKLNREDLLRKQRTFDNGSIPHQIHLGELHAILRRQEDFYPFLKDNREKIEKILTFRIPYYVGPLARGNSRFAWMTRKSEETITPWNFEEVVDKGASAQSFIERMTNFDKNLPNEKVLPKHSLLYEYFTVYNELTKVKYVTEGMRKPAFLSGEQKKAIVDLLFKTNRKVTVKQLKEDYFKKIECFDSVEISGVEDRFNASLGTYHDLLKIIKDKDFLDNEENEDILEDIVLTLTLFEDREMIEERLKTYAHLFDDKVMKQLKRRRYTGWGRLSRKLINGIRDKQSGKTILDFLKSDGFANRNFMQLIHDDSLTFKEDIQKAQVSGQGDSLHEHIANLAGSPAIKKGILQTVKVVDELVKVMGRHKPENIVIEMARENQTTQKGQKNSRERMKRIEEGIKELGSQILKEHPVENTQLQNEKLYLYYLQNGRDMYVDQELDINRLSDYDVDHIVPQSFLKDDSIDNKVLTRSDKARGKSDNVPSEEVVKKMKNYWRQLLNAKLITQRKFDNLTKAERGGLSELDKAGFIKRQLVETRQITKHVAQILDSRMNTKYDENDKLIREVKVITLKSKLVSDFRKDFQFYKVREINNYHHAHDAYLNAVVGTALIKKYPKLESEFVYGDYKVYDVRKMIAKSEQEIGKATAKYFFYSNIMNFFKTEITLANGEIRKRPLIETNGETGEIVWDKGRDFATVRKVLSMPQVNIVKKTEVQTGGFSKESILPKRNSDKLIARKKDWDPKKYGGFDSPTVAYSVLVVAKVEKGKSKKLKSVKELLGITIMERSSFEKNPIDFLEAKGYKEVKKDLIIKLPKYSLFELENGRKRMLASAGELQKGNELALPSKYVNFLYLASHYEKLKGSPEDNEQKQLFVEQHKHYLDEIIEQISEFSKRVILADANLDKVLSAYNKHRDKPIREQAENIIHLFTLTNLGAPAAFKYFDTTIDRKRYTSTKEVLDATLIHQSITGLYETRIDLSQLGGDGGGGGGSSPAPGGLLGRDLLTKLKAQIQFSTEGPQVTWEDRPAMCLVLNLEEEYRLHEKPVPPSIDPSWLQLFPMVWAEKAGMGLANQVPPVVVELKSDASPVAVRQYPMSKEAREGIRPHIQRFLDLGILVPCQSPWNTPLLPVKKPGTNDYRPVQDLREVNKRVQDIHPTVPNPYNLLSSLPPSHTWYSVLDLKDAFFCLKLHPNSQPLFAFEWRDPEKGNTGQLTWTRLPQGFKNSPTLFNEALHRDLASFRALNPQVVMLQYVDDLLVAAPTYRDCKEGTRRLLQELSKLGYRVSAKKAQLCREEVTYLGYLLKGGKRWLTPARKATVMKIPTPTTPRQVREFLGKAGFCRLFIPGFASLAAPLYPLTRPKVPFTWTEAHQEAFGRIKEALLSAPALALPDLTKPFALYVDEKEGVARGVLTQTLGPWRRPVAYLSKKLDPVASGWPTCLKAIAAVALLLKDADKLTLGQNVLVIAPHNLESIVRQPPDRWMTNARMTHYQSLLLNERVSFAPPAILNPATLLPVESDDTPIHICSEILAEETGTRPDLRDQPLPGVPAWYTDGSSFIMDGRRQAGAAIVDNKRTVWASNLPEGTSAQKAELIALTQALRLAEGKSINIYTDSRYAFATAHVHGAIYKQRGWLTSAGKDIKNKEEILALLEAIHLPKRVAIIHCPGHQRGTDPVATGNRKADEAAKQAAQSTRILTETTKNAGKRTADGSEFEKRTADGSEFESPKKKAKVE

SEQ ID NO: 1735 - protein, 2125 aa, synthetic construct
MPAAKRVKLDGGDKKYSIGLDIGTNSVGWAVITDEYKVPSKKFKVLGNTDRHSIKKNLIGALLFDSGETAEATRLKRTARRRYTRRKNRICYLQEIFSNEMAKVDDSFFHRLEESFLVEEDKKHERHPIFGNIVDEVAYHEKYPTIYHLRKKLVDSTDKADLRLIYLALAHMIKFRGHFLIEGDLNPDNSDVDKLFIQLVQTYNQLFEENPINASGVDAKAILSARLSKSRRLENLIAQLPGEKKNGLFGNLIALSLGLTPNFKSNFDLAEDAKLQLSKDTYDDDLDNLLAQIGDQYADLFLAAKNLSDAILLSDILRVNTEITKAPLSASMIKRYDEHHQDLTLLKALVRQQLPEKYKEIFFDQSKNGYAGYIDGGASQEEFYKFIKPILEKMDGTEELLVKLNREDLLRKQRTFDNGSIPHQIHLGELHAILRRQEDFYPFLKDNREKIEKILTFRIPYYVGPLARGNSRFAWMTRKSEETITPWNFEEVVDKGASAQSFIERMTNFDKNLPNEKVLPKHSLLYEYFTVYNELTKVKYVTEGMRKPAFLSGEQKKAIVDLLFKTNRKVTVKQLKEDYFKKIECFDSVEISGVEDRFNASLGTYHDLLKIIKDKDFLDNEENEDILEDIVLTLTLFEDREMIEERLKTYAHLFDDKVMKQLKRRRYTGWGRLSRKLINGIRDKQSGKTILDFLKSDGFANRNFMQLIHDDSLTFKEDIQKAQVSGQGDSLHEHIANLAGSPAIKKGILQTVKVVDELVKVMGRHKPENIVIEMARENQTTQKGQKNSRERMKRIEEGIKELGSQILKEHPVENTQLQNEKLYLYYLQNGRDMYVDQELDINRLSDYDVDHIVPQSFLKDDSIDNKVLTRSDKARGKSDNVPSEEVVKKMKNYWRQLLNAKLITQRKFDNLTKAERGGLSELDKAGFIKRQLVETRQITKHVAQILDSRMNTKYDENDKLIREVKVITLKSKLVSDFRKDFQFYKVREINNYHHAHDAYLNAVVGTALIKKYPKLESEFVYGDYKVYDVRKMIAKSEQEIGKATAKYFFYSNIMNFFKTEITLANGEIRKRPLIETNGETGEIVWDKGRDFATVRKVLSMPQVNIVKKTEVQTGGFSKESILPKRNSDKLIARKKDWDPKKYGGFDSPTVAYSVLVVAKVEKGKSKKLKSVKELLGITIMERSSFEKNPIDFLEAKGYKEVKKDLIIKLPKYSLFELENGRKRMLASAGELQKGNELALPSKYVNFLYLASHYEKLKGSPEDNEQKQLFVEQHKHYLDEIIEQISEFSKRVILADANLDKVLSAYNKHRDKPIREQAENIIHLFTLTNLGAPAAFKYFDTTIDRKRYTSTKEVLDATLIHQSITGLYETRIDLSQLGGDGGGSSGGSPAPGGLLGRDLLTKLKAQIQFSTEGPQVTWEDRPAMCLVLNLEEEYRLHEKPVPPSIDPSWLQLFPMVWAEKAGMGLANQVPPVVVELKSDASPVAVRQYPMSKEAREGIRPHIQRFLDLGILVPCQSPWNTPLLPVKKPGTNDYRPVQDLREVNKRVQDIHPTVPNPYNLLSSLPPSHTWYSVLDLKDAFFCLKLHPNSQPLFAFEWRDPEKGNTGQLTWTRLPQGFKNSPTLFNEALHRDLASFRALNPQVVMLQYVDDLLVAAPTYRDCKEGTRRLLQELSKLGYRVSAKKAQLCREEVTYLGYLLKGGKRWLTPARKATVMKIPTPTTPRQVREFLGKAGFCRLFIPGFASLAAPLYPLTRPKVPFTWTEAHQEAFGRIKEALLSAPALALPDLTKPFALYVDEKEGVARGVLTQTLGPWRRPVAYLSKKLDPVASGWPTCLKAIAAVALLLKDADKLTLGQNVLVIAPHNLESIVRQPPDRWMTNARMTHYQSLLLNERVSFAPPAILNPATLLPVESDDTPIHICSEILAEETGTRPDLRDQPLPGVPAWYTDGSSFIMDGRRQAGAAIVDNKRTVWASNLPEGTSAQKAELIALTQALRLAEGKSINIYTDSRYAFATAHVHGAIYKQRGWLTSAGKDIKNKEEILALLEAIHLPKRVAIIHCPGHQRGTDPVATGNRKADEAAKQAAQSTRILTETTKNAGKRTADGSEFEKRTADGSEFESPKKKAKVE

SEQ ID NO: 1736 - protein, 2127 aa, synthetic construct
MPAAKRVKLDGGDKKYSIGLDIGTNSVGWAVITDEYKVPSKKFKVLGNTDRHSIKKNLIGALLFDSGETAEATRLKRTARRRYTRRKNRICYLQEIFSNEMAKVDDSFFHRLEESFLVEEDKKHERHPIFGNIVDEVAYHEKYPTIYHLRKKLVDSTDKADLRLIYLALAHMIKFRGHFLIEGDLNPDNSDVDKLFIQLVQTYNQLFEENPINASGVDAKAILSARLSKSRRLENLIAQLPGEKKNGLFGNLIALSLGLTPNFKSNFDLAEDAKLQLSKDTYDDDLDNLLAQIGDQYADLFLAAKNLSDAILLSDILRVNTEITKAPLSASMIKRYDEHHQDLTLLKALVRQQLPEKYKEIFFDQSKNGYAGYIDGGASQEEFYKFIKPILEKMDGTEELLVKLNREDLLRKQRTFDNGSIPHQIHLGELHAILRRQEDFYPFLKDNREKIEKILTFRIPYYVGPLARGNSRFAWMTRKSEETITPWNFEEVVDKGASAQSFIERMTNFDKNLPNEKVLPKHSLLYEYFTVYNELTKVKYVTEGMRKPAFLSGEQKKAIVDLLFKTNRKVTVKQLKEDYFKKIECFDSVEISGVEDRFNASLGTYHDLLKIIKDKDFLDNEENEDILEDIVLTLTLFEDREMIEERLKTYAHLFDDKVMKQLKRRRYTGWGRLSRKLINGIRDKQSGKTILDFLKSDGFANRNFMQLIHDDSLTFKEDIQKAQVSGQGDSLHEHIANLAGSPAIKKGILQTVKVVDELVKVMGRHKPENIVIEMARENQTTQKGQKNSRERMKRIEEGIKELGSQILKEHPVENTQLQNEKLYLYYLQNGRDMYVDQELDINRLSDYDVDHIVPQSFLKDDSIDNKVLTRSDKARGKSDNVPSEEVVKKMKNYWRQLLNAKLITQRKFDNLTKAERGGLSELDKAGFIKRQLVETRQITKHVAQILDSRMNTKYDENDKLIREVKVITLKSKLVSDFRKDFQFYKVREINNYHHAHDAYLNAVVGTALIKKYPKLESEFVYGDYKVYDVRKMIAKSEQEIGKATAKYFFYSNIMNFFKTEITLANGEIRKRPLIETNGETGEIVWDKGRDFATVRKVLSMPQVNIVKKTEVQTGGFSKESILPKRNSDKLIARKKDWDPKKYGGFDSPTVAYSVLVVAKVEKGKSKKLKSVKELLGITIMERSSFEKNPIDFLEAKGYKEVKKDLIIKLPKYSLFELENGRKRMLASAGELQKGNELALPSKYVNFLYLASHYEKLKGSPEDNEQKQLFVEQHKHYLDEIIEQISEFSKRVILADANLDKVLSAYNKHRDKPIREQAENIIHLFTLTNLGAPAAFKYFDTTIDRKRYTSTKEVLDATLIHQSITGLYETRIDLSQLGGDGGEAAAKGGGGGSGGLLGRDLLTKLKAQIQFSTEGPQVTWEDRPAMCLVLNLEEEYRLHEKPVPPSIDPSWLQLFPMVWAEKAGMGLANQVPPVVVELKSDASPVAVRQYPMSKEAREGIRPHIQRFLDLGILVPCQSPWNTPLLPVKKPGTNDYRPVQDLREVNKRVQDIHPTVPNPYNLLSSLPPSHTWYSVLDLKDAFFCLKLHPNSQPLFAFEWRDPEKGNTGQLTWTRLPQGFKNSPTLFNEALHRDLASFRALNPQVVMLQYVDDLLVAAPTYRDCKEGTRRLLQELSKLGYRVSAKKAQLCREEVTYLGYLLKGGKRWLTPARKATVMKIPTPTTPRQVREFLGKAGFCRLFIPGFASLAAPLYPLTRPKVPFTWTEAHQEAFGRIKEALLSAPALALPDLTKPFALYVDEKEGVARGVLTQTLGPWRRPVAYLSKKLDPVASGWPTCLKAIAAVALLLKDADKLTLGQNVLVIAPHNLESIVRQPPDRWMTNARMTHYQSLLLNERVSFAPPAILNPATLLPVESDDTPIHICSEILAEETGTRPDLRDQPLPGVPAWYTDGSSFIMDGRRQAGAAIVDNKRTVWASNLPEGTSAQKAELIALTQALRLAEGKSINIYTDSRYAFATAHVHGAIYKQRGWLTSAGKDIKNKEEILALLEAIHLPKRVAIIHCPGHQRGTDPVATGNRKADEAAKQAAQSTRILTETTKNAGKRTADGSEFEKRTADGSEFESPKKKAKVE

SEQ ID NO: 1737 - protein, 2127 aa, synthetic construct
MPAAKRVKLDGGDKKYSIGLDIGTNSVGWAVITDEYKVPSKKFKVLGNTDRHSIKKNLIGALLFDSGETAEATRLKRTARRRYTRRKNRICYLQEIFSNEMAKVDDSFFHRLEESFLVEEDKKHERHPIFGNIVDEVAYHEKYPTIYHLRKKLVDSTDKADLRLIYLALAHMIKFRGHFLIEGDLNPDNSDVDKLFIQLVQTYNQLFEENPINASGVDAKAILSARLSKSRRLENLIAQLPGEKKNGLFGNLIALSLGLTPNFKSNFDLAEDAKLQLSKDTYDDDLDNLLAQIGDQYADLFLAAKNLSDAILLSDILRVNTEITKAPLSASMIKRYDEHHQDLTLLKALVRQQLPEKYKEIFFDQSKNGYAGYIDGGASQEEFYKFIKPILEKMDGTEELLVKLNREDLLRKQRTFDNGSIPHQIHLGELHAILRRQEDFYPFLKDNREKIEKILTFRIPYYVGPLARGNSRFAWMTRKSEETITPWNFEEVVDKGASAQSFIERMTNFDKNLPNEKVLPKHSLLYEYFTVYNELTKVKYVTEGMRKPAFLSGEQKKAIVDLLFKTNRKVTVKQLKEDYFKKIECFDSVEISGVEDRFNASLGTYHDLLKIIKDKDFLDNEENEDILEDIVLTLTLFEDREMIEERLKTYAHLFDDKVMKQLKRRRYTGWGRLSRKLINGIRDKQSGKTILDFLKSDGFANRNFMQLIHDDSLTFKEDIQKAQVSGQGDSLHEHIANLAGSPAIKKGILQTVKVVDELVKVMGRHKPENIVIEMARENQTTQKGQKNSRERMKRIEEGIKELGSQILKEHPVENTQLQNEKLYLYYLQNGRDMYVDQELDINRLSDYDVDHIVPQSFLKDDSIDNKVLTRSDKARGKSDNVPSEEVVKKMKNYWRQLLNAKLITQRKFDNLTKAERGGLSELDKAGFIKRQLVETRQITKHVAQILDSRMNTKYDENDKLIREVKVITLKSKLVSDFRKDFQFYKVREINNYHHAHDAYLNAVVGTALIKKYPKLESEFVYGDYKVYDVRKMIAKSEQEIGKATAKYFFYSNIMNFFKTEITLANGEIRKRPLIETNGETGEIVWDKGRDFATVRKVLSMPQVNIVKKTEVQTGGFSKESILPKRNSDKLIARKKDWDPKKYGGFDSPTVAYSVLVVAKVEKGKSKKLKSVKELLGITIMERSSFEKNPIDFLEAKGYKEVKKDLIIKLPKYSLFELENGRKRMLASAGELQKGNELALPSKYVNFLYLASHYEKLKGSPEDNEQKQLFVEQHKHYLDEIIEQISEFSKRVILADANLDKVLSAYNKHRDKPIREQAENIIHLFTLTNLGAPAAFKYFDTTIDRKRYTSTKEVLDATLIHQSITGLYETRIDLSQLGGDGGGSSEAAAKGGGGGLLGRDLLTKLKAQIQFSTEGPQVTWEDRPAMCLVLNLEEEYRLHEKPVPPSIDPSWLQLFPMVWAEKAGMGLANQVPPVVVELKSDASPVAVRQYPMSKEAREGIRPHIQRFLDLGILVPCQSPWNTPLLPVKKPGTNDYRPVQDLREVNKRVQDIHPTVPNPYNLLSSLPPSHTWYSVLDLKDAFFCLKLHPNSQPLFAFEWRDPEKGNTGQLTWTRLPQGFKNSPTLFNEALHRDLASFRALNPQVVMLQYVDDLLVAAPTYRDCKEGTRRLLQELSKLGYRVSAKKAQLCREEVTYLGYLLKGGKRWLTPARKATVMKIPTPTTPRQVREFLGKAGFCRLFIPGFASLAAPLYPLTRPKVPFTWTEAHQEAFGRIKEALLSAPALALPDLTKPFALYVDEKEGVARGVLTQTLGPWRRPVAYLSKKLDPVASGWPTCLKAIAAVALLLKDADKLTLGQNVLVIAPHNLESIVRQPPDRWMTNARMTHYQSLLLNERVSFAPPAILNPATLLPVESDDTPIHICSEILAEETGTRPDLRDQPLPGVPAWYTDGSSFIMDGRRQAGAAIVDNKRTVWASNLPEGTSAQKAELIALTQALRLAEGKSINIYTDSRYAFATAHVHGAIYKQRGWLTSAGKDIKNKEEILALLEAIHLPKRVAIIHCPGHQRGTDPVATGNRKADEAAKQAAQSTRILTETTKNAGKRTADGSEFEKRTADGSEFESPKKKAKVE

SEQ ID NO: 1738 - protein, 2125 aa, synthetic construct
MPAAKRVKLDGGDKKYSIGLDIGTNSVGWAVITDEYKVPSKKFKVLGNTDRHSIKKNLIGALLFDSGETAEATRLKRTARRRYTRRKNRICYLQEIFSNEMAKVDDSFFHRLEESFLVEEDKKHERHPIFGNIVDEVAYHEKYPTIYHLRKKLVDSTDKADLRLIYLALAHMIKFRGHFLIEGDLNPDNSDVDKLFIQLVQTYNQLFEENPINASGVDAKAILSARLSKSRRLENLIAQLPGEKKNGLFGNLIALSLGLTPNFKSNFDLAEDAKLQLSKDTYDDDLDNLLAQIGDQYADLFLAAKNLSDAILLSDILRVNTEITKAPLSASMIKRYDEHHQDLTLLKALVRQQLPEKYKEIFFDQSKNGYAGYIDGGASQEEFYKFIKPILEKMDGTEELLVKLNREDLLRKQRTFDNGSIPHQIHLGELHAILRRQEDFYPFLKDNREKIEKILTFRIPYYVGPLARGNSRFAWMTRKSEETITPWNFEEVVDKGASAQSFIERMTNFDKNLPNEKVLPKHSLLYEYFTVYNELTKVKYVTEGMRKPAFLSGEQKKAIVDLLFKTNRKVTVKQLKEDYFKKIECFDSVEISGVEDRFNASLGTYHDLLKIIKDKDFLDNEENEDILEDIVLTLTLFEDREMIEERLKTYAHLFDDKVMKQLKRRRYTGWGRLSRKLINGIRDKQSGKTILDFLKSDGFANRNFMQLIHDDSLTFKEDIQKAQVSGQGDSLHEHIANLAGSPAIKKGILQTVKVVDELVKVMGRHKPENIVIEMARENQTTQKGQKNSRERMKRIEEGIKELGSQILKEHPVENTQLQNEKLYLYYLQNGRDMYVDQELDINRLSDYDVDHIVPQSFLKDDSIDNKVLTRSDKARGKSDNVPSEEVVKKMKNYWRQLLNAKLITQRKFDNLTKAERGGLSELDKAGFIKRQLVETRQITKHVAQILDSRMNTKYDENDKLIREVKVITLKSKLVSDFRKDFQFYKVREINNYHHAHDAYLNAVVGTALIKKYPKLESEFVYGDYKVYDVRKMIAKSEQEIGKATAKYFFYSNIMNFFKTEITLANGEIRKRPLIETNGETGEIVWDKGRDFATVRKVLSMPQVNIVKKTEVQTGGFSKESILPKRNSDKLIARKKDWDPKKYGGFDSPTVAYSVLVVAKVEKGKSKKLKSVKELLGITIMERSSFEKNPIDFLEAKGYKEVKKDLIIKLPKYSLFELENGRKRMLASAGELQKGNELALPSKYVNFLYLASHYEKLKGSPEDNEQKQLFVEQHKHYLDEIIEQISEFSKRVILADANLDKVLSAYNKHRDKPIREQAENIIHLFTLTNLGAPAAFKYFDTTIDRKRYTSTKEVLDATLIHQSITGLYETRIDLSQLGGDGGGSSPAPGGSGGLLGRDLLTKLKAQIQFSTEGPQVTWEDRPAMCLVLNLEEEYRLHEKPVPPSIDPSWLQLFPMVWAEKAGMGLANQVPPVVVELKSDASPVAVRQYPMSKEAREGIRPHIQRFLDLGILVPCQSPWNTPLLPVKKPGTNDYRPVQDLREVNKRVQDIHPTVPNPYNLLSSLPPSHTWYSVLDLKDAFFCLKLHPNSQPLFAFEWRDPEKGNTGQLTWTRLPQGFKNSPTLFNEALHRDLASFRALNPQVVMLQYVDDLLVAAPTYRDCKEGTRRLLQELSKLGYRVSAKKAQLCREEVTYLGYLLKGGKRWLTPARKATVMKIPTPTTPRQVREFLGKAGFCRLFIPGFASLAAPLYPLTRPKVPFTWTEAHQEAFGRIKEALLSAPALALPDLTKPFALYVDEKEGVARGVLTQTLGPWRRPVAYLSKKLDPVASGWPTCLKAIAAVALLLKDADKLTLGQNVLVIAPHNLESIVRQPPDRWMTNARMTHYQSLLLNERVSFAPPAILNPATLLPVESDDTPIHICSEILAEETGTRPDLRDQPLPGVPAWYTDGSSFIMDGRRQAGAAIVDNKRTVWASNLPEGTSAQKAELIALTQALRLAEGKSINIYTDSRYAFATAHVHGAIYKQRGWLTSAGKDIKNKEEILALLEAIHLPKRVAIIHCPGHQRGTDPVATGNRKADEAAKQAAQSTRILTETTKNAGKRTADGSEFEKRTADGSEFESPKKKAKVE

SEQ ID NO: 1739 - protein, 2131 aa, synthetic construct
MPAAKRVKLDGGDKKYSIGLDIGTNSVGWAVITDEYKVPSKKFKVLGNTDRHSIKKNLIGALLFDSGETAEATRLKRTARRRYTRRKNRICYLQEIFSNEMAKVDDSFFHRLEESFLVEEDKKHERHPIFGNIVDEVAYHEKYPTIYHLRKKLVDSTDKADLRLIYLALAHMIKFRGHFLIEGDLNPDNSDVDKLFIQLVQTYNQLFEENPINASGVDAKAILSARLSKSRRLENLIAQLPGEKKNGLFGNLIALSLGLTPNFKSNFDLAEDAKLQLSKDTYDDDLDNLLAQIGDQYADLFLAAKNLSDAILLSDILRVNTEITKAPLSASMIKRYDEHHQDLTLLKALVRQQLPEKYKEIFFDQSKNGYAGYIDGGASQEEFYKFIKPILEKMDGTEELLVKLNREDLLRKQRTFDNGSIPHQIHLGELHAILRRQEDFYPFLKDNREKIEKILTFRIPYYVGPLARGNSRFAWMTRKSEETITPWNFEEVVDKGASAQSFIERMTNFDKNLPNEKVLPKHSLLYEYFTVYNELTKVKYVTEGMRKPAFLSGEQKKAIVDLLFKTNRKVTVKQLKEDYFKKIECFDSVEISGVEDRFNASLGTYHDLLKIIKDKDFLDNEENEDILEDIVLTLTLFEDREMIEERLKTYAHLFDDKVMKQLKRRRYTGWGRLSRKLINGIRDKQSGKTILDFLKSDGFANRNFMQLIHDDSLTFKEDIQKAQVSGQGDSLHEHIANLAGSPAIKKGILQTVKVVDELVKVMGRHKPENIVIEMARENQTTQKGQKNSRERMKRIEEGIKELGSQILKEHPVENTQLQNEKLYLYYLQNGRDMYVDQELDINRLSDYDVDHIVPQSFLKDDSIDNKVLTRSDKARGKSDNVPSEEVVKKMKNYWRQLLNAKLITQRKFDNLTKAERGGLSELDKAGFIKRQLVETRQITKHVAQILDSRMNTKYDENDKLIREVKVITLKSKLVSDFRKDFQFYKVREINNYHHAHDAYLNAVVGTALIKKYPKLESEFVYGDYKVYDVRKMIAKSEQEIGKATAKYFFYSNIMNFFKTEITLANGEIRKRPLIETNGETGEIVWDKGRDFATVRKVLSMPQVNIVKKTEVQTGGFSKESILPKRNSDKLIARKKDWDPKKYGGFDSPTVAYSVLVVAKVEKGKSKKLKSVKELLGITIMERSSFEKNPIDFLEAKGYKEVKKDLIIKLPKYSLFELENGRKRMLASAGELQKGNELALPSKYVNFLYLASHYEKLKGSPEDNEQKQLFVEQHKHYLDEIIEQISEFSKRVILADANLDKVLSAYNKHRDKPIREQAENIIHLFTLTNLGAPAAFKYFDTTIDRKRYTSTKEVLDATLIHQSITGLYETRIDLSQLGGDGGGGGGSEAAAKGGGGSGGLLGRDLLTKLKAQIQFSTEGPQVTWEDRPAMCLVLNLEEEYRLHEKPVPPSIDPSWLQLFPMVWAEKAGMGLANQVPPVVVELKSDASPVAVRQYPMSKEAREGIRPHIQRFLDLGILVPCQSPWNTPLLPVKKPGTNDYRPVQDLREVNKRVQDIHPTVPNPYNLLSSLPPSHTWYSVLDLKDAFFCLKLHPNSQPLFAFEWRDPEKGNTGQLTWTRLPQGFKNSPTLFNEALHRDLASFRALNPQVVMLQYVDDLLVAAPTYRDCKEGTRRLLQELSKLGYRVSAKKAQLCREEVTYLGYLLKGGKRWLTPARKATVMKIPTPTTPRQVREFLGKAGFCRLFIPGFASLAAPLYPLTRPKVPFTWTEAHQEAFGRIKEALLSAPALALPDLTKPFALYVDEKEGVARGVLTQTLGPWRRPVAYLSKKLDPVASGWPTCLKAIAAVALLLKDADKLTLGQNVLVIAPHNLESIVRQPPDRWMTNARMTHYQSLLLNERVSFAPPAILNPATLLPVESDDTPIHICSEILAEETGTRPDLRDQPLPGVPAWYTDGSSFIMDGRRQAGAAIVDNKRTVWASNLPEGTSAQKAELIALTQALRLAEGKSINIYTDSRYAFATAHVHGAIYKQRGWLTSAGKDIKNKEEILALLEAIHLPKRVAIIHCPGHQRGTDPVATGNRKADEAAKQAAQSTRILTETTKNAGKRTADGSEFEKRTADGSEFESPKKKAKVE

SEQ ID NO: 1740 - protein, 2125 aa, synthetic construct
MPAAKRVKLDGGDKKYSIGLDIGTNSVGWAVITDEYKVPSKKFKVLGNTDRHSIKKNLIGALLFDSGETAEATRLKRTARRRYTRRKNRICYLQEIFSNEMAKVDDSFFHRLEESFLVEEDKKHERHPIFGNIVDEVAYHEKYPTIYHLRKKLVDSTDKADLRLIYLALAHMIKFRGHFLIEGDLNPDNSDVDKLFIQLVQTYNQLFEENPINASGVDAKAILSARLSKSRRLENLIAQLPGEKKNGLFGNLIALSLGLTPNFKSNFDLAEDAKLQLSKDTYDDDLDNLLAQIGDQYADLFLAAKNLSDAILLSDILRVNTEITKAPLSASMIKRYDEHHQDLTLLKALVRQQLPEKYKEIFFDQSKNGYAGYIDGGASQEEFYKFIKPILEKMDGTEELLVKLNREDLLRKQRTFDNGSIPHQIHLGELHAILRRQEDFYPFLKDNREKIEKILTFRIPYYVGPLARGNSRFAWMTRKSEETITPWNFEEVVDKGASAQSFIERMTNFDKNLPNEKVLPKHSLLYEYFTVYNELTKVKYVTEGMRKPAFLSGEQKKAIVDLLFKTNRKVTVKQLKEDYFKKIECFDSVEISGVEDRFNASLGTYHDLLKIIKDKDFLDNEENEDILEDIVLTLTLFEDREMIEERLKTYAHLFDDKVMKQLKRRRYTGWGRLSRKLINGIRDKQSGKTILDFLKSDGFANRNFMQLIHDDSLTFKEDIQKAQVSGQGDSLHEHIANLAGSPAIKKGILQTVKVVDELVKVMGRHKPENIVIEMARENQTTQKGQKNSRERMKRIEEGIKELGSQILKEHPVENTQLQNEKLYLYYLQNGRDMYVDQELDINRLSDYDVDHIVPQSFLKDDSIDNKVLTRSDKARGKSDNVPSEEVVKKMKNYWRQLLNAKLITQRKFDNLTKAERGGLSELDKAGFIKRQLVETRQITKHVAQILDSRMNTKYDENDKLIREVKVITLKSKLVSDFRKDFQFYKVREINNYHHAHDAYLNAVVGTALIKKYPKLESEFVYGDYKVYDVRKMIAKSEQEIGKATAKYFFYSNIMNFFKTEITLANGEIRKRPLIETNGETGEIVWDKGRDFATVRKVLSMPQVNIVKKTEVQTGGFSKESILPKRNSDKLIARKKDWDPKKYGGFDSPTVAYSVLVVAKVEKGKSKKLKSVKELLGITIMERSSFEKNPIDFLEAKGYKEVKKDLIIKLPKYSLFELENGRKRMLASAGELQKGNELALPSKYVNFLYLASHYEKLKGSPEDNEQKQLFVEQHKHYLDEIIEQISEFSKRVILADANLDKVLSAYNKHRDKPIREQAENIIHLFTLTNLGAPAAFKYFDTTIDRKRYTSTKEVLDATLIHQSITGLYETRIDLSQLGGDGGPAPGGSGGGGGLLGRDLLTKLKAQIQFSTEGPQVTWEDRPAMCLVLNLEEEYRLHEKPVPPSIDPSWLQLFPMVWAEKAGMGLANQVPPVVVELKSDASPVAVRQYPMSKEAREGIRPHIQRFLDLGILVPCQSPWNTPLLPVKKPGTNDYRPVQDLREVNKRVQDIHPTVPNPYNLLSSLPPSHTWYSVLDLKDAFFCLKLHPNSQPLFAFEWRDPEKGNTGQLTWTRLPQGFKNSPTLFNEALHRDLASFRALNPQVVMLQYVDDLLVAAPTYRDCKEGTRRLLQELSKLGYRVSAKKAQLCREEVTYLGYLLKGGKRWLTPARKATVMKIPTPTTPRQVREFLGKAGFCRLFIPGFASLAAPLYPLTRPKVPFTWTEAHQEAFGRIKEALLSAPALALPDLTKPFALYVDEKEGVARGVLTQTLGPWRRPVAYLSKKLDPVASGWPTCLKAIAAVALLLKDADKLTLGQNVLVIAPHNLESIVRQPPDRWMTNARMTHYQSLLLNERVSFAPPAILNPATLLPVESDDTPIHICSEILAEETGTRPDLRDQPLPGVPAWYTDGSSFIMDGRRQAGAAIVDNKRTVWASNLPEGTSAQKAELIALTQALRLAEGKSINIYTDSRYAFATAHVHGAIYKQRGWLTSAGKDIKNKEEILALLEAIHLPKRVAIIHCPGHQRGTDPVATGNRKADEAAKQAAQSTRILTETTKNAGKRTADGSEFEKRTADGSEFESPKKKAKVE

SEQ ID NO: 1741 - protein, 2127 aa, synthetic construct
MPAAKRVKLDGGDKKYSIGLDIGTNSVGWAVITDEYKVPSKKFKVLGNTDRHSIKKNLIGALLFDSGETAEATRLKRTARRRYTRRKNRICYLQEIFSNEMAKVDDSFFHRLEESFLVEEDKKHERHPIFGNIVDEVAYHEKYPTIYHLRKKLVDSTDKADLRLIYLALAHMIKFRGHFLIEGDLNPDNSDVDKLFIQLVQTYNQLFEENPINASGVDAKAILSARLSKSRRLENLIAQLPGEKKNGLFGNLIALSLGLTPNFKSNFDLAEDAKLQLSKDTYDDDLDNLLAQIGDQYADLFLAAKNLSDAILLSDILRVNTEITKAPLSASMIKRYDEHHQDLTLLKALVRQQLPEKYKEIFFDQSKNGYAGYIDGGASQEEFYKFIKPILEKMDGTEELLVKLNREDLLRKQRTFDNGSIPHQIHLGELHAILRRQEDFYPFLKDNREKIEKILTFRIPYYVGPLARGNSRFAWMTRKSEETITPWNFEEVVDKGASAQSFIERMTNFDKNLPNEKVLPKHSLLYEYFTVYNELTKVKYVTEGMRKPAFLSGEQKKAIVDLLFKTNRKVTVKQLKEDYFKKIECFDSVEISGVEDRFNASLGTYHDLLKIIKDKDFLDNEENEDILEDIVLTLTLFEDREMIEERLKTYAHLFDDKVMKQLKRRRYTGWGRLSRKLINGIRDKQSGKTILDFLKSDGFANRNFMQLIHDDSLTFKEDIQKAQVSGQGDSLHEHIANLAGSPAIKKGILQTVKVVDELVKVMGRHKPENIVIEMARENQTTQKGQKNSRERMKRIEEGIKELGSQILKEHPVENTQLQNEKLYLYYLQNGRDMYVDQELDINRLSDYDVDHIVPQSFLKDDSIDNKVLTRSDKARGKSDNVPSEEVVKKMKNYWRQLLNAKLITQRKFDNLTKAERGGLSELDKAGFIKRQLVETRQITKHVAQILDSRMNTKYDENDKLIREVKVITLKSKLVSDFRKDFQFYKVREINNYHHAHDAYLNAVVGTALIKKYPKLESEFVYGDYKVYDVRKMIAKSEQEIGKATAKYFFYSNIMNFFKTEITLANGEIRKRPLIETNGETGEIVWDKGRDFATVRKVLSMPQVNIVKKTEVQTGGFSKESILPKRNSDKLIARKKDWDPKKYGGFDSPTVAYSVLVVAKVEKGKSKKLKSVKELLGITIMERSSFEKNPIDFLEAKGYKEVKKDLIIKLPKYSLFELENGRKRMLASAGELQKGNELALPSKYVNFLYLASHYEKLKGSPEDNEQKQLFVEQHKHYLDEIIEQISEFSKRVILADANLDKVLSAYNKHRDKPIREQAENIIHLFTLTNLGAPAAFKYFDTTIDRKRYTSTKEVLDATLIHQSITGLYETRIDLSQLGGDGGGGSGGGEAAAKGGLLGRDLLTKLKAQIQFSTEGPQVTWEDRPAMCLVLNLEEEYRLHEKPVPPSIDPSWLQLFPMVWAEKAGMGLANQVPPVVVELKSDASPVAVRQYPMSKEAREGIRPHIQRFLDLGILVPCQSPWNTPLLPVKKPGTNDYRPVQDLREVNKRVQDIHPTVPNPYNLLSSLPPSHTWYSVLDLKDAFFCLKLHPNSQPLFAFEWRDPEKGNTGQLTWTRLPQGFKNSPTLFNEALHRDLASFRALNPQVVMLQYVDDLLVAAPTYRDCKEGTRRLLQELSKLGYRVSAKKAQLCREEVTYLGYLLKGGKRWLTPARKATVMKIPTPTTPRQVREFLGKAGFCRLFIPGFASLAAPLYPLTRPKVPFTWTEAHQEAFGRIKEALLSAPALALPDLTKPFALYVDEKEGVARGVLTQTLGPWRRPVAYLSKKLDPVASGWPTCLKAIAAVALLLKDADKLTLGQNVLVIAPHNLESIVRQPPDRWMTNARMTHYQSLLLNERVSFAPPAILNPATLLPVESDDTPIHICSEILAEETGTRPDLRDQPLPGVPAWYTDGSSFIMDGRRQAGAAIVDNKRTVWASNLPEGTSAQKAELIALTQALRLAEGKSINIYTDSRYAFATAHVHGAIYKQRGWLTSAGKDIKNKEEILALLEAIHLPKRVAIIHCPGHQRGTDPVATGNRKADEAAKQAAQSTRILTETTKNAGKRTADGSEFEKRTADGSEFESPKKKAKVE

SEQ ID NO: 1742 - protein, 2122 aa, synthetic construct
MPAAKRVKLDGGDKKYSIGLDIGTNSVGWAVITDEYKVPSKKFKVLGNTDRHSIKKNLIGALLFDSGETAEATRLKRTARRRYTRRKNRICYLQEIFSNEMAKVDDSFFHRLEESFLVEEDKKHERHPIFGNIVDEVAYHEKYPTIYHLRKKLVDSTDKADLRLIYLALAHMIKFRGHFLIEGDLNPDNSDVDKLFIQLVQTYNQLFEENPINASGVDAKAILSARLSKSRRLENLIAQLPGEKKNGLFGNLIALSLGLTPNFKSNFDLAEDAKLQLSKDTYDDDLDNLLAQIGDQYADLFLAAKNLSDAILLSDILRVNTEITKAPLSASMIKRYDEHHQDLTLLKALVRQQLPEKYKEIFFDQSKNGYAGYIDGGASQEEFYKFIKPILEKMDGTEELLVKLNREDLLRKQRTFDNGSIPHQIHLGELHAILRRQEDFYPFLKDNREKIEKILTFRIPYYVGPLARGNSRFAWMTRKSEETITPWNFEEVVDKGASAQSFIERMTNFDKNLPNEKVLPKHSLLYEYFTVYNELTKVKYVTEGMRKPAFLSGEQKKAIVDLLFKTNRKVTVKQLKEDYFKKIECFDSVEISGVEDRFNASLGTYHDLLKIIKDKDFLDNEENEDILEDIVLTLTLFEDREMIEERLKTYAHLFDDKVMKQLKRRRYTGWGRLSRKLINGIRDKQSGKTILDFLKSDGFANRNFMQLIHDDSLTFKEDIQKAQVSGQGDSLHEHIANLAGSPAIKKGILQTVKVVDELVKVMGRHKPENIVIEMARENQTTQKGQKNSRERMKRIEEGIKELGSQILKEHPVENTQLQNEKLYLYYLQNGRDMYVDQELDINRLSDYDVDHIVPQSFLKDDSIDNKVLTRSDKARGKSDNVPSEEVVKKMKNYWRQLLNAKLITQRKFDNLTKAERGGLSELDKAGFIKRQLVETRQITKHVAQILDSRMNTKYDENDKLIREVKVITLKSKLVSDFRKDFQFYKVREINNYHHAHDAYLNAVVGTALIKKYPKLESEFVYGDYKVYDVRKMIAKSEQEIGKATAKYFFYSNIMNFFKTEITLANGEIRKRPLIETNGETGEIVWDKGRDFATVRKVLSMPQVNIVKKTEVQTGGFSKESILPKRNSDKLIARKKDWDPKKYGGFDSPTVAYSVLVVAKVEKGKSKKLKSVKELLGITIMERSSFEKNPIDFLEAKGYKEVKKDLIIKLPKYSLFELENGRKRMLASAGELQKGNELALPSKYVNFLYLASHYEKLKGSPEDNEQKQLFVEQHKHYLDEIIEQISEFSKRVILADANLDKVLSAYNKHRDKPIREQAENIIHLFTLTNLGAPAAFKYFDTTIDRKRYTSTKEVLDATLIHQSITGLYETRIDLSQLGGDGGGSSGGSGGLLGRDLLTKLKAQIQFSTEGPQVTWEDRPAMCLVLNLEEEYRLHEKPVPPSIDPSWLQLFPMVWAEKAGMGLANQVPPVVVELKSDASPVAVRQYPMSKEAREGIRPHIQRFLDLGILVPCQSPWNTPLLPVKKPGTNDYRPVQDLREVNKRVQDIHPTVPNPYNLLSSLPPSHTWYSVLDLKDAFFCLKLHPNSQPLFAFEWRDPEKGNTGQLTWTRLPQGFKNSPTLFNEALHRDLASFRALNPQVVMLQYVDDLLVAAPTYRDCKEGTRRLLQELSKLGYRVSAKKAQLCREEVTYLGYLLKGGKRWLTPARKATVMKIPTPTTPRQVREFLGKAGFCRLFIPGFASLAAPLYPLTRPKVPFTWTEAHQEAFGRIKEALLSAPALALPDLTKPFALYVDEKEGVARGVLTQTLGPWRRPVAYLSKKLDPVASGWPTCLKAIAAVALLLKDADKLTLGQNVLVIAPHNLESIVRQPPDRWMTNARMTHYQSLLLNERVSFAPPAILNPATLLPVESDDTPIHICSEILAEETGTRPDLRDQPLPGVPAWYTDGSSFIMDGRRQAGAAIVDNKRTVWASNLPEGTSAQKAELIALTQALRLAEGKSINIYTDSRYAFATAHVHGAIYKQRGWLTSAGKDIKNKEEILALLEAIHLPKRVAIIHCPGHQRGTDPVATGNRKADEAAKQAAQSTRILTETTKNAGKRTADGSEFEKRTADGSEFESPKKKAKVE

SEQ ID NO: 1743 - protein, 2124 aa, synthetic construct
MPAAKRVKLDGGDKKYSIGLDIGTNSVGWAVITDEYKVPSKKFKVLGNTDRHSIKKNLIGALLFDSGETAEATRLKRTARRRYTRRKNRICYLQEIFSNEMAKVDDSFFHRLEESFLVEEDKKHERHPIFGNIVDEVAYHEKYPTIYHLRKKLVDSTDKADLRLIYLALAHMIKFRGHFLIEGDLNPDNSDVDKLFIQLVQTYNQLFEENPINASGVDAKAILSARLSKSRRLENLIAQLPGEKKNGLFGNLIALSLGLTPNFKSNFDLAEDAKLQLSKDTYDDDLDNLLAQIGDQYADLFLAAKNLSDAILLSDILRVNTEITKAPLSASMIKRYDEHHQDLTLLKALVRQQLPEKYKEIFFDQSKNGYAGYIDGGASQEEFYKFIKPILEKMDGTEELLVKLNREDLLRKQRTFDNGSIPHQIHLGELHAILRRQEDFYPFLKDNREKIEKILTFRIPYYVGPLARGNSRFAWMTRKSEETITPWNFEEVVDKGASAQSFIERMTNFDKNLPNEKVLPKHSLLYEYFTVYNELTKVKYVTEGMRKPAFLSGEQKKAIVDLLFKTNRKVTVKQLKEDYFKKIECFDSVEISGVEDRFNASLGTYHDLLKIIKDKDFLDNEENEDILEDIVLTLTLFEDREMIEERLKTYAHLFDDKVMKQLKRRRYTGWGRLSRKLINGIRDKQSGKTILDFLKSDGFANRNFMQLIHDDSLTFKEDIQKAQVSGQGDSLHEHIANLAGSPAIKKGILQTVKVVDELVKVMGRHKPENIVIEMARENQTTQKGQKNSRERMKRIEEGIKELGSQILKEHPVENTQLQNEKLYLYYLQNGRDMYVDQELDINRLSDYDVDHIVPQSFLKDDSIDNKVLTRSDKARGKSDNVPSEEVVKKMKNYWRQLLNAKLITQRKFDNLTKAERGGLSELDKAGFIKRQLVETRQITKHVAQILDSRMNTKYDENDKLIREVKVITLKSKLVSDFRKDFQFYKVREINNYHHAHDAYLNAVVGTALIKKYPKLESEFVYGDYKVYDVRKMIAKSEQEIGKATAKYFFYSNIMNFFKTEITLANGEIRKRPLIETNGETGEIVWDKGRDFATVRKVLSMPQVNIVKKTEVQTGGFSKESILPKRNSDKLIARKKDWDPKKYGGFDSPTVAYSVLVVAKVEKGKSKKLKSVKELLGITIMERSSFEKNPIDFLEAKGYKEVKKDLIIKLPKYSLFELENGRKRMLASAGELQKGNELALPSKYVNFLYLASHYEKLKGSPEDNEQKQLFVEQHKHYLDEIIEQISEFSKRVILADANLDKVLSAYNKHRDKPIREQAENIIHLFTLTNLGAPAAFKYFDTTIDRKRYTSTKEVLDATLIHQSITGLYETRIDLSQLGGDGGGGSEAAAKGGLLGRDLLTKLKAQIQFSTEGPQVTWEDRPAMCLVLNLEEEYRLHEKPVPPSIDPSWLQLFPMVWAEKAGMGLANQVPPVVVELKSDASPVAVRQYPMSKEAREGIRPHIQRFLDLGILVPCQSPWNTPLLPVKKPGTNDYRPVQDLREVNKRVQDIHPTVPNPYNLLSSLPPSHTWYSVLDLKDAFFCLKLHPNSQPLFAFEWRDPEKGNTGQLTWTRLPQGFKNSPTLFNEALHRDLASFRALNPQVVMLQYVDDLLVAAPTYRDCKEGTRRLLQELSKLGYRVSAKKAQLCREEVTYLGYLLKGGKRWLTPARKATVMKIPTPTTPRQVREFLGKAGFCRLFIPGFASLAAPLYPLTRPKVPFTWTEAHQEAFGRIKEALLSAPALALPDLTKPFALYVDEKEGVARGVLTQTLGPWRRPVAYLSKKLDPVASGWPTCLKAIAAVALLLKDADKLTLGQNVLVIAPHNLESIVRQPPDRWMTNARMTHYQSLLLNERVSFAPPAILNPATLLPVESDDTPIHICSEILAEETGTRPDLRDQPLPGVPAWYTDGSSFIMDGRRQAGAAIVDNKRTVWASNLPEGTSAQKAELIALTQALRLAEGKSINIYTDSRYAFATAHVHGAIYKQRGWLTSAGKDIKNKEEILALLEAIHLPKRVAIIHCPGHQRGTDPVATGNRKADEAAKQAAQSTRILTETTKNAGKRTADGSEFEKRTADGSEFESPKKKAKVE

SEQ ID NO: 1744 - protein, 2141 aa, synthetic construct
MPAAKRVKLDGGDKKYSIGLDIGTNSVGWAVITDEYKVPSKKFKVLGNTDRHSIKKNLIGALLFDSGETAEATRLKRTARRRYTRRKNRICYLQEIFSNEMAKVDDSFFHRLEESFLVEEDKKHERHPIFGNIVDEVAYHEKYPTIYHLRKKLVDSTDKADLRLIYLALAHMIKFRGHFLIEGDLNPDNSDVDKLFIQLVQTYNQLFEENPINASGVDAKAILSARLSKSRRLENLIAQLPGEKKNGLFGNLIALSLGLTPNFKSNFDLAEDAKLQLSKDTYDDDLDNLLAQIGDQYADLFLAAKNLSDAILLSDILRVNTEITKAPLSASMIKRYDEHHQDLTLLKALVRQQLPEKYKEIFFDQSKNGYAGYIDGGASQEEFYKFIKPILEKMDGTEELLVKLNREDLLRKQRTFDNGSIPHQIHLGELHAILRRQEDFYPFLKDNREKIEKILTFRIPYYVGPLARGNSRFAWMTRKSEETITPWNFEEVVDKGASAQSFIERMTNFDKNLPNEKVLPKHSLLYEYFTVYNELTKVKYVTEGMRKPAFLSGEQKKAIVDLLFKTNRKVTVKQLKEDYFKKIECFDSVEISGVEDRFNASLGTYHDLLKIIKDKDFLDNEENEDILEDIVLTLTLFEDREMIEERLKTYAHLFDDKVMKQLKRRRYTGWGRLSRKLINGIRDKQSGKTILDFLKSDGFANRNFMQLIHDDSLTFKEDIQKAQVSGQGDSLHEHIANLAGSPAIKKGILQTVKVVDELVKVMGRHKPENIVIEMARENQTTQKGQKNSRERMKRIEEGIKELGSQILKEHPVENTQLQNEKLYLYYLQNGRDMYVDQELDINRLSDYDVDHIVPQSFLKDDSIDNKVLTRSDKARGKSDNVPSEEVVKKMKNYWRQLLNAKLITQRKFDNLTKAERGGLSELDKAGFIKRQLVETRQITKHVAQILDSRMNTKYDENDKLIREVKVITLKSKLVSDFRKDFQFYKVREINNYHHAHDAYLNAVVGTALIKKYPKLESEFVYGDYKVYDVRKMIAKSEQEIGKATAKYFFYSNIMNFFKTEITLANGEIRKRPLIETNGETGEIVWDKGRDFATVRKVLSMPQVNIVKKTEVQTGGFSKESILPKRNSDKLIARKKDWDPKKYGGFDSPTVAYSVLVVAKVEKGKSKKLKSVKELLGITIMERSSFEKNPIDFLEAKGYKEVKKDLIIKLPKYSLFELENGRKRMLASAGELQKGNELALPSKYVNFLYLASHYEKLKGSPEDNEQKQLFVEQHKHYLDEIIEQISEFSKRVILADANLDKVLSAYNKHRDKPIREQAENIIHLFTLTNLGAPAAFKYFDTTIDRKRYTSTKEVLDATLIHQSITGLYETRIDLSQLGGDGGEAAAKEAAAKEAAAKEAAAKEAAAKGGLLGRDLLTKLKAQIQFSTEGPQVTWEDRPAMCLVLNLEEEYRLHEKPVPPSIDPSWLQLFPMVWAEKAGMGLANQVPPVVVELKSDASPVAVRQYPMSKEAREGIRPHIQRFLDLGILVPCQSPWNTPLLPVKKPGTNDYRPVQDLREVNKRVQDIHPTVPNPYNLLSSLPPSHTWYSVLDLKDAFFCLKLHPNSQPLFAFEWRDPEKGNTGQLTWTRLPQGFKNSPTLFNEALHRDLASFRALNPQVVMLQYVDDLLVAAPTYRDCKEGTRRLLQELSKLGYRVSAKKAQLCREEVTYLGYLLKGGKRWLTPARKATVMKIPTPTTPRQVREFLGKAGFCRLFIPGFASLAAPLYPLTRPKVPFTWTEAHQEAFGRIKEALLSAPALALPDLTKPFALYVDEKEGVARGVLTQTLGPWRRPVAYLSKKLDPVASGWPTCLKAIAAVALLLKDADKLTLGQNVLVIAPHNLESIVRQPPDRWMTNARMTHYQSLLLNERVSFAPPAILNPATLLPVESDDTPIHICSEILAEETGTRPDLRDQPLPGVPAWYTDGSSFIMDGRRQAGAAIVDNKRTVWASNLPEGTSAQKAELIALTQALRLAEGKSINIYTDSRYAFATAHVHGAIYKQRGWLTSAGKDIKNKEEILALLEAIHLPKRVAIIHCPGHQRGTDPVATGNRKADEAAKQAAQSTRILTETTKNAGKRTADGSEFEKRTADGSEFESPKKKAKVE

SEQ ID NO: 1745 - protein, 2125 aa, synthetic construct
MPAAKRVKLDGGDKKYSIGLDIGTNSVGWAVITDEYKVPSKKFKVLGNTDRHSIKKNLIGALLFDSGETAEATRLKRTARRRYTRRKNRICYLQEIFSNEMAKVDDSFFHRLEESFLVEEDKKHERHPIFGNIVDEVAYHEKYPTIYHLRKKLVDSTDKADLRLIYLALAHMIKFRGHFLIEGDLNPDNSDVDKLFIQLVQTYNQLFEENPINASGVDAKAILSARLSKSRRLENLIAQLPGEKKNGLFGNLIALSLGLTPNFKSNFDLAEDAKLQLSKDTYDDDLDNLLAQIGDQYADLFLAAKNLSDAILLSDILRVNTEITKAPLSASMIKRYDEHHQDLTLLKALVRQQLPEKYKEIFFDQSKNGYAGYIDGGASQEEFYKFIKPILEKMDGTEELLVKLNREDLLRKQRTFDNGSIPHQIHLGELHAILRRQEDFYPFLKDNREKIEKILTFRIPYYVGPLARGNSRFAWMTRKSEETITPWNFEEVVDKGASAQSFIERMTNFDKNLPNEKVLPKHSLLYEYFTVYNELTKVKYVTEGMRKPAFLSGEQKKAIVDLLFKTNRKVTVKQLKEDYFKKIECFDSVEISGVEDRFNASLGTYHDLLKIIKDKDFLDNEENEDILEDIVLTLTLFEDREMIEERLKTYAHLFDDKVMKQLKRRRYTGWGRLSRKLINGIRDKQSGKTILDFLKSDGFANRNFMQLIHDDSLTFKEDIQKAQVSGQGDSLHEHIANLAGSPAIKKGILQTVKVVDELVKVMGRHKPENIVIEMARENQTTQKGQKNSRERMKRIEEGIKELGSQILKEHPVENTQLQNEKLYLYYLQNGRDMYVDQELDINRLSDYDVDHIVPQSFLKDDSIDNKVLTRSDKARGKSDNVPSEEVVKKMKNYWRQLLNAKLITQRKFDNLTKAERGGLSELDKAGFIKRQLVETRQITKHVAQILDSRMNTKYDENDKLIREVKVITLKSKLVSDFRKDFQFYKVREINNYHHAHDAYLNAVVGTALIKKYPKLESEFVYGDYKVYDVRKMIAKSEQEIGKATAKYFFYSNIMNFFKTEITLANGEIRKRPLIETNGETGEIVWDKGRDFATVRKVLSMPQVNIVKKTEVQTGGFSKESILPKRNSDKLIARKKDWDPKKYGGFDSPTVAYSVLVVAKVEKGKSKKLKSVKELLGITIMERSSFEKNPIDFLEAKGYKEVKKDLIIKLPKYSLFELENGRKRMLASAGELQKGNELALPSKYVNFLYLASHYEKLKGSPEDNEQKQLFVEQHKHYLDEIIEQISEFSKRVILADANLDKVLSAYNKHRDKPIREQAENIIHLFTLTNLGAPAAFKYFDTTIDRKRYTSTKEVLDATLIHQSITGLYETRIDLSQLGGDGGGGGGGSPAPGGLLGRDLLTKLKAQIQFSTEGPQVTWEDRPAMCLVLNLEEEYRLHEKPVPPSIDPSWLQLFPMVWAEKAGMGLANQVPPVVVELKSDASPVAVRQYPMSKEAREGIRPHIQRFLDLGILVPCQSPWNTPLLPVKKPGTNDYRPVQDLREVNKRVQDIHPTVPNPYNLLSSLPPSHTWYSVLDLKDAFFCLKLHPNSQPLFAFEWRDPEKGNTGQLTWTRLPQGFKNSPTLFNEALHRDLASFRALNPQVVMLQYVDDLLVAAPTYRDCKEGTRRLLQELSKLGYRVSAKKAQLCREEVTYLGYLLKGGKRWLTPARKATVMKIPTPTTPRQVREFLGKAGFCRLFIPGFASLAAPLYPLTRPKVPFTWTEAHQEAFGRIKEALLSAPALALPDLTKPFALYVDEKEGVARGVLTQTLGPWRRPVAYLSKKLDPVASGWPTCLKAIAAVALLLKDADKLTLGQNVLVIAPHNLESIVRQPPDRWMTNARMTHYQSLLLNERVSFAPPAILNPATLLPVESDDTPIHICSEILAEETGTRPDLRDQPLPGVPAWYTDGSSFIMDGRRQAGAAIVDNKRTVWASNLPEGTSAQKAELIALTQALRLAEGKSINIYTDSRYAFATAHVHGAIYKQRGWLTSAGKDIKNKEEILALLEAIHLPKRVAIIHCPGHQRGTDPVATGNRKADEAAKQAAQSTRILTETTKNAGKRTADGSEFEKRTADGSEFESPKKKAKVE

SEQ ID NO: 1746 - protein, 2124 aa, synthetic construct
MPAAKRVKLDGGDKKYSIGLDIGTNSVGWAVITDEYKVPSKKFKVLGNTDRHSIKKNLIGALLFDSGETAEATRLKRTARRRYTRRKNRICYLQEIFSNEMAKVDDSFFHRLEESFLVEEDKKHERHPIFGNIVDEVAYHEKYPTIYHLRKKLVDSTDKADLRLIYLALAHMIKFRGHFLIEGDLNPDNSDVDKLFIQLVQTYNQLFEENPINASGVDAKAILSARLSKSRRLENLIAQLPGEKKNGLFGNLIALSLGLTPNFKSNFDLAEDAKLQLSKDTYDDDLDNLLAQIGDQYADLFLAAKNLSDAILLSDILRVNTEITKAPLSASMIKRYDEHHQDLTLLKALVRQQLPEKYKEIFFDQSKNGYAGYIDGGASQEEFYKFIKPILEKMDGTEELLVKLNREDLLRKQRTFDNGSIPHQIHLGELHAILRRQEDFYPFLKDNREKIEKILTFRIPYYVGPLARGNSRFAWMTRKSEETITPWNFEEVVDKGASAQSFIERMTNFDKNLPNEKVLPKHSLLYEYFTVYNELTKVKYVTEGMRKPAFLSGEQKKAIVDLLFKTNRKVTVKQLKEDYFKKIECFDSVEISGVEDRFNASLGTYHDLLKIIKDKDFLDNEENEDILEDIVLTLTLFEDREMIEERLKTYAHLFDDKVMKQLKRRRYTGWGRLSRKLINGIRDKQSGKTILDFLKSDGFANRNFMQLIHDDSLTFKEDIQKAQVSGQGDSLHEHIANLAGSPAIKKGILQTVKVVDELVKVMGRHKPENIVIEMARENQTTQKGQKNSRERMKRIEEGIKELGSQILKEHPVENTQLQNEKLYLYYLQNGRDMYVDQELDINRLSDYDVDHIVPQSFLKDDSIDNKVLTRSDKARGKSDNVPSEEVVKKMKNYWRQLLNAKLITQRKFDNLTKAERGGLSELDKAGFIKRQLVETRQITKHVAQILDSRMNTKYDENDKLIREVKVITLKSKLVSDFRKDFQFYKVREINNYHHAHDAYLNAVVGTALIKKYPKLESEFVYGDYKVYDVRKMIAKSEQEIGKATAKYFFYSNIMNFFKTEITLANGEIRKRPLIETNGETGEIVWDKGRDFATVRKVLSMPQVNIVKKTEVQTGGFSKESILPKRNSDKLIARKKDWDPKKYGGFDSPTVAYSVLVVAKVEKGKSKKLKSVKELLGITIMERSSFEKNPIDFLEAKGYKEVKKDLIIKLPKYSLFELENGRKRMLASAGELQKGNELALPSKYVNFLYLASHYEKLKGSPEDNEQKQLFVEQHKHYLDEIIEQISEFSKRVILADANLDKVLSAYNKHRDKPIREQAENIIHLFTLTNLGAPAAFKYFDTTIDRKRYTSTKEVLDATLIHQSITGLYETRIDLSQLGGDGGEAAAKGGGGGLLGRDLLTKLKAQIQFSTEGPQVTWEDRPAMCLVLNLEEEYRLHEKPVPPSIDPSWLQLFPMVWAEKAGMGLANQVPPVVVELKSDASPVAVRQYPMSKEAREGIRPHIQRFLDLGILVPCQSPWNTPLLPVKKPGTNDYRPVQDLREVNKRVQDIHPTVPNPYNLLSSLPPSHTWYSVLDLKDAFFCLKLHPNSQPLFAFEWRDPEKGNTGQLTWTRLPQGFKNSPTLFNEALHRDLASFRALNPQVVMLQYVDDLLVAAPTYRDCKEGTRRLLQELSKLGYRVSAKKAQLCREEVTYLGYLLKGGKRWLTPARKATVMKIPTPTTPRQVREFLGKAGFCRLFIPGFASLAAPLYPLTRPKVPFTWTEAHQEAFGRIKEALLSAPALALPDLTKPFALYVDEKEGVARGVLTQTLGPWRRPVAYLSKKLDPVASGWPTCLKAIAAVALLLKDADKLTLGQNVLVIAPHNLESIVRQPPDRWMTNARMTHYQSLLLNERVSFAPPAILNPATLLPVESDDTPIHICSEILAEETGTRPDLRDQPLPGVPAWYTDGSSFIMDGRRQAGAAIVDNKRTVWASNLPEGTSAQKAELIALTQALRLAEGKSINIYTDSRYAFATAHVHGAIYKQRGWLTSAGKDIKNKEEILALLEAIHLPKRVAIIHCPGHQRGTDPVATGNRKADEAAKQAAQSTRILTETTKNAGKRTADGSEFEKRTADGSEFESPKKKAKVE

SEQ ID NO: 1747 - protein, 2122 aa, synthetic construct
MPAAKRVKLDGGDKKYSIGLDIGTNSVGWAVITDEYKVPSKKFKVLGNTDRHSIKKNLIGALLFDSGETAEATRLKRTARRRYTRRKNRICYLQEIFSNEMAKVDDSFFHRLEESFLVEEDKKHERHPIFGNIVDEVAYHEKYPTIYHLRKKLVDSTDKADLRLIYLALAHMIKFRGHFLIEGDLNPDNSDVDKLFIQLVQTYNQLFEENPINASGVDAKAILSARLSKSRRLENLIAQLPGEKKNGLFGNLIALSLGLTPNFKSNFDLAEDAKLQLSKDTYDDDLDNLLAQIGDQYADLFLAAKNLSDAILLSDILRVNTEITKAPLSASMIKRYDEHHQDLTLLKALVRQQLPEKYKEIFFDQSKNGYAGYIDGGASQEEFYKFIKPILEKMDGTEELLVKLNREDLLRKQRTFDNGSIPHQIHLGELHAILRRQEDFYPFLKDNREKIEKILTFRIPYYVGPLARGNSRFAWMTRKSEETITPWNFEEVVDKGASAQSFIERMTNFDKNLPNEKVLPKHSLLYEYFTVYNELTKVKYVTEGMRKPAFLSGEQKKAIVDLLFKTNRKVTVKQLKEDYFKKIECFDSVEISGVEDRFNASLGTYHDLLKIIKDKDFLDNEENEDILEDIVLTLTLFEDREMIEERLKTYAHLFDDKVMKQLKRRRYTGWGRLSRKLINGIRDKQSGKTILDFLKSDGFANRNFMQLIHDDSLTFKEDIQKAQVSGQGDSLHEHIANLAGSPAIKKGILQTVKVVDELVKVMGRHKPENIVIEMARENQTTQKGQKNSRERMKRIEEGIKELGSQILKEHPVENTQLQNEKLYLYYLQNGRDMYVDQELDINRLSDYDVDHIVPQSFLKDDSIDNKVLTRSDKARGKSDNVPSEEVVKKMKNYWRQLLNAKLITQRKFDNLTKAERGGLSELDKAGFIKRQLVETRQITKHVAQILDSRMNTKYDENDKLIREVKVITLKSKLVSDFRKDFQFYKVREINNYHHAHDAYLNAVVGTALIKKYPKLESEFVYGDYKVYDVRKMIAKSEQEIGKATAKYFFYSNIMNFFKTEITLANGEIRKRPLIETNGETGEIVWDKGRDFATVRKVLSMPQVNIVKKTEVQTGGFSKESILPKRNSDKLIARKKDWDPKKYGGFDSPTVAYSVLVVAKVEKGKSKKLKSVKELLGITIMERSSFEKNPIDFLEAKGYKEVKKDLIIKLPKYSLFELENGRKRMLASAGELQKGNELALPSKYVNFLYLASHYEKLKGSPEDNEQKQLFVEQHKHYLDEIIEQISEFSKRVILADANLDKVLSAYNKHRDKPIREQAENIIHLFTLTNLGAPAAFKYFDTTIDRKRYTSTKEVLDATLIHQSITGLYETRIDLSQLGGDGGGSSGSSGGLLGRDLLTKLKAQIQFSTEGPQVTWEDRPAMCLVLNLEEEYRLHEKPVPPSIDPSWLQLFPMVWAEKAGMGLANQVPPVVVELKSDASPVAVRQYPMSKEAREGIRPHIQRFLDLGILVPCQSPWNTPLLPVKKPGTNDYRPVQDLREVNKRVQDIHPTVPNPYNLLSSLPPSHTWYSVLDLKDAFFCLKLHPNSQPLFAFEWRDPEKGNTGQLTWTRLPQGFKNSPTLFNEALHRDLASFRALNPQVVMLQYVDDLLVAAPTYRDCKEGTRRLLQELSKLGYRVSAKKAQLCREEVTYLGYLLKGGKRWLTPARKATVMKIPTPTTPRQVREFLGKAGFCRLFIPGFASLAAPLYPLTRPKVPFTWTEAHQEAFGRIKEALLSAPALALPDLTKPFALYVDEKEGVARGVLTQTLGPWRRPVAYLSKKLDPVASGWPTCLKAIAAVALLLKDADKLTLGQNVLVIAPHNLESIVRQPPDRWMTNARMTHYQSLLLNERVSFAPPAILNPATLLPVESDDTPIHICSEILAEETGTRPDLRDQPLPGVPAWYTDGSSFIMDGRRQAGAAIVDNKRTVWASNLPEGTSAQKAELIALTQALRLAEGKSINIYTDSRYAFATAHVHGAIYKQRGWLTSAGKDIKNKEEILALLEAIHLPKRVAIIHCPGHQRGTDPVATGNRKADEAAKQAAQSTRILTETTKNAGKRTADGSEFEKRTADGSEFESPKKKAKVE

SEQ ID NO: 1748 - protein, 2122 aa, synthetic construct
MPAAKRVKLDGGDKKYSIGLDIGTNSVGWAVITDEYKVPSKKFKVLGNTDRHSIKKNLIGALLFDSGETAEATRLKRTARRRYTRRKNRICYLQEIFSNEMAKVDDSFFHRLEESFLVEEDKKHERHPIFGNIVDEVAYHEKYPTIYHLRKKLVDSTDKADLRLIYLALAHMIKFRGHFLIEGDLNPDNSDVDKLFIQLVQTYNQLFEENPINASGVDAKAILSARLSKSRRLENLIAQLPGEKKNGLFGNLIALSLGLTPNFKSNFDLAEDAKLQLSKDTYDDDLDNLLAQIGDQYADLFLAAKNLSDAILLSDILRVNTEITKAPLSASMIKRYDEHHQDLTLLKALVRQQLPEKYKEIFFDQSKNGYAGYIDGGASQEEFYKFIKPILEKMDGTEELLVKLNREDLLRKQRTFDNGSIPHQIHLGELHAILRRQEDFYPFLKDNREKIEKILTFRIPYYVGPLARGNSRFAWMTRKSEETITPWNFEEVVDKGASAQSFIERMTNFDKNLPNEKVLPKHSLLYEYFTVYNELTKVKYVTEGMRKPAFLSGEQKKAIVDLLFKTNRKVTVKQLKEDYFKKIECFDSVEISGVEDRFNASLGTYHDLLKIIKDKDFLDNEENEDILEDIVLTLTLFEDREMIEERLKTYAHLFDDKVMKQLKRRRYTGWGRLSRKLINGIRDKQSGKTILDFLKSDGFANRNFMQLIHDDSLTFKEDIQKAQVSGQGDSLHEHIANLAGSPAIKKGILQTVKVVDELVKVMGRHKPENIVIEMARENQTTQKGQKNSRERMKRIEEGIKELGSQILKEHPVENTQLQNEKLYLYYLQNGRDMYVDQELDINRLSDYDVDHIVPQSFLKDDSIDNKVLTRSDKARGKSDNVPSEEVVKKMKNYWRQLLNAKLITQRKFDNLTKAERGGLSELDKAGFIKRQLVETRQITKHVAQILDSRMNTKYDENDKLIREVKVITLKSKLVSDFRKDFQFYKVREINNYHHAHDAYLNAVVGTALIKKYPKLESEFVYGDYKVYDVRKMIAKSEQEIGKATAKYFFYSNIMNFFKTEITLANGEIRKRPLIETNGETGEIVWDKGRDFATVRKVLSMPQVNIVKKTEVQTGGFSKESILPKRNSDKLIARKKDWDPKKYGGFDSPTVAYSVLVVAKVEKGKSKKLKSVKELLGITIMERSSFEKNPIDFLEAKGYKEVKKDLIIKLPKYSLFELENGRKRMLASAGELQKGNELALPSKYVNFLYLASHYEKLKGSPEDNEQKQLFVEQHKHYLDEIIEQISEFSKRVILADANLDKVLSAYNKHRDKPIREQAENIIHLFTLTNLGAPAAFKYFDTTIDRKRYTSTKEVLDATLIHQSITGLYETRIDLSQLGGDGGGGGGGSGGLLGRDLLTKLKAQIQFSTEGPQVTWEDRPAMCLVLNLEEEYRLHEKPVPPSIDPSWLQLFPMVWAEKAGMGLANQVPPVVVELKSDASPVAVRQYPMSKEAREGIRPHIQRFLDLGILVPCQSPWNTPLLPVKKPGTNDYRPVQDLREVNKRVQDIHPTVPNPYNLLSSLPPSHTWYSVLDLKDAFFCLKLHPNSQPLFAFEWRDPEKGNTGQLTWTRLPQGFKNSPTLFNEALHRDLASFRALNPQVVMLQYVDDLLVAAPTYRDCKEGTRRLLQELSKLGYRVSAKKAQLCREEVTYLGYLLKGGKRWLTPARKATVMKIPTPTTPRQVREFLGKAGFCRLFIPGFASLAAPLYPLTRPKVPFTWTEAHQEAFGRIKEALLSAPALALPDLTKPFALYVDEKEGVARGVLTQTLGPWRRPVAYLSKKLDPVASGWPTCLKAIAAVALLLKDADKLTLGQNVLVIAPHNLESIVRQPPDRWMTNARMTHYQSLLLNERVSFAPPAILNPATLLPVESDDTPIHICSEILAEETGTRPDLRDQPLPGVPAWYTDGSSFIMDGRRQAGAAIVDNKRTVWASNLPEGTSAQKAELIALTQALRLAEGKSINIYTDSRYAFATAHVHGAIYKQRGWLTSAGKDIKNKEEILALLEAIHLPKRVAIIHCPGHQRGTDPVATGNRKADEAAKQAAQSTRILTETTKNAGKRTADGSEFEKRTADGSEFESPKKKAKVE

SEQ ID NO: 1749 - protein, 2125 aa, synthetic construct
MPAAKRVKLDGGDKKYSIGLDIGTNSVGWAVITDEYKVPSKKFKVLGNTDRHSIKKNLIGALLFDSGETAEATRLKRTARRRYTRRKNRICYLQEIFSNEMAKVDDSFFHRLEESFLVEEDKKHERHPIFGNIVDEVAYHEKYPTIYHLRKKLVDSTDKADLRLIYLALAHMIKFRGHFLIEGDLNPDNSDVDKLFIQLVQTYNQLFEENPINASGVDAKAILSARLSKSRRLENLIAQLPGEKKNGLFGNLIALSLGLTPNFKSNFDLAEDAKLQLSKDTYDDDLDNLLAQIGDQYADLFLAAKNLSDAILLSDILRVNTEITKAPLSASMIKRYDEHHQDLTLLKALVRQQLPEKYKEIFFDQSKNGYAGYIDGGASQEEFYKFIKPILEKMDGTEELLVKLNREDLLRKQRTFDNGSIPHQIHLGELHAILRRQEDFYPFLKDNREKIEKILTFRIPYYVGPLARGNSRFAWMTRKSEETITPWNFEEVVDKGASAQSFIERMTNFDKNLPNEKVLPKHSLLYEYFTVYNELTKVKYVTEGMRKPAFLSGEQKKAIVDLLFKTNRKVTVKQLKEDYFKKIECFDSVEISGVEDRFNASLGTYHDLLKIIKDKDFLDNEENEDILEDIVLTLTLFEDREMIEERLKTYAHLFDDKVMKQLKRRRYTGWGRLSRKLINGIRDKQSGKTILDFLKSDGFANRNFMQLIHDDSLTFKEDIQKAQVSGQGDSLHEHIANLAGSPAIKKGILQTVKVVDELVKVMGRHKPENIVIEMARENQTTQKGQKNSRERMKRIEEGIKELGSQILKEHPVENTQLQNEKLYLYYLQNGRDMYVDQELDINRLSDYDVDHIVPQSFLKDDSIDNKVLTRSDKARGKSDNVPSEEVVKKMKNYWRQLLNAKLITQRKFDNLTKAERGGLSELDKAGFIKRQLVETRQITKHVAQILDSRMNTKYDENDKLIREVKVITLKSKLVSDFRKDFQFYKVREINNYHHAHDAYLNAVVGTALIKKYPKLESEFVYGDYKVYDVRKMIAKSEQEIGKATAKYFFYSNIMNFFKTEITLANGEIRKRPLIETNGETGEIVWDKGRDFATVRKVLSMPQVNIVKKTEVQTGGFSKESILPKRNSDKLIARKKDWDPKKYGGFDSPTVAYSVLVVAKVEKGKSKKLKSVKELLGITIMERSSFEKNPIDFLEAKGYKEVKKDLIIKLPKYSLFELENGRKRMLASAGELQKGNELALPSKYVNFLYLASHYEKLKGSPEDNEQKQLFVEQHKHYLDEIIEQISEFSKRVILADANLDKVLSAYNKHRDKPIREQAENIIHLFTLTNLGAPAAFKYFDTTIDRKRYTSTKEVLDATLIHQSITGLYETRIDLSQLGGDGGPAPGSSGGSGGLLGRDLLTKLKAQIQFSTEGPQVTWEDRPAMCLVLNLEEEYRLHEKPVPPSIDPSWLQLFPMVWAEKAGMGLANQVPPVVVELKSDASPVAVRQYPMSKEAREGIRPHIQRFLDLGILVPCQSPWNTPLLPVKKPGTNDYRPVQDLREVNKRVQDIHPTVPNPYNLLSSLPPSHTWYSVLDLKDAFFCLKLHPNSQPLFAFEWRDPEKGNTGQLTWTRLPQGFKNSPTLFNEALHRDLASFRALNPQVVMLQYVDDLLVAAPTYRDCKEGTRRLLQELSKLGYRVSAKKAQLCREEVTYLGYLLKGGKRWLTPARKATVMKIPTPTTPRQVREFLGKAGFCRLFIPGFASLAAPLYPLTRPKVPFTWTEAHQEAFGRIKEALLSAPALALPDLTKPFALYVDEKEGVARGVLTQTLGPWRRPVAYLSKKLDPVASGWPTCLKAIAAVALLLKDADKLTLGQNVLVIAPHNLESIVRQPPDRWMTNARMTHYQSLLLNERVSFAPPAILNPATLLPVESDDTPIHICSEILAEETGTRPDLRDQPLPGVPAWYTDGSSFIMDGRRQAGAAIVDNKRTVWASNLPEGTSAQKAELIALTQALRLAEGKSINIYTDSRYAFATAHVHGAIYKQRGWLTSAGKDIKNKEEILALLEAIHLPKRVAIIHCPGHQRGTDPVATGNRKADEAAKQAAQSTRILTETTKNAGKRTADGSEFEKRTADGSEFESPKKKAKVE

SEQ ID NO: 1750 - protein, 2122 aa, synthetic construct
MPAAKRVKLDGGDKKYSIGLDIGTNSVGWAVITDEYKVPSKKFKVLGNTDRHSIKKNLIGALLFDSGETAEATRLKRTARRRYTRRKNRICYLQEIFSNEMAKVDDSFFHRLEESFLVEEDKKHERHPIFGNIVDEVAYHEKYPTIYHLRKKLVDSTDKADLRLIYLALAHMIKFRGHFLIEGDLNPDNSDVDKLFIQLVQTYNQLFEENPINASGVDAKAILSARLSKSRRLENLIAQLPGEKKNGLFGNLIALSLGLTPNFKSNFDLAEDAKLQLSKDTYDDDLDNLLAQIGDQYADLFLAAKNLSDAILLSDILRVNTEITKAPLSASMIKRYDEHHQDLTLLKALVRQQLPEKYKEIFFDQSKNGYAGYIDGGASQEEFYKFIKPILEKMDGTEELLVKLNREDLLRKQRTFDNGSIPHQIHLGELHAILRRQEDFYPFLKDNREKIEKILTFRIPYYVGPLARGNSRFAWMTRKSEETITPWNFEEVVDKGASAQSFIERMTNFDKNLPNEKVLPKHSLLYEYFTVYNELTKVKYVTEGMRKPAFLSGEQKKAIVDLLFKTNRKVTVKQLKEDYFKKIECFDSVEISGVEDRFNASLGTYHDLLKIIKDKDFLDNEENEDILEDIVLTLTLFEDREMIEERLKTYAHLFDDKVMKQLKRRRYTGWGRLSRKLINGIRDKQSGKTILDFLKSDGFANRNFMQLIHDDSLTFKEDIQKAQVSGQGDSLHEHIANLAGSPAIKKGILQTVKVVDELVKVMGRHKPENIVIEMARENQTTQKGQKNSRERMKRIEEGIKELGSQILKEHPVENTQLQNEKLYLYYLQNGRDMYVDQELDINRLSDYDVDHIVPQSFLKDDSIDNKVLTRSDKARGKSDNVPSEEVVKKMKNYWRQLLNAKLITQRKFDNLTKAERGGLSELDKAGFIKRQLVETRQITKHVAQILDSRMNTKYDENDKLIREVKVITLKSKLVSDFRKDFQFYKVREINNYHHAHDAYLNAVVGTALIKKYPKLESEFVYGDYKVYDVRKMIAKSEQEIGKATAKYFFYSNIMNFFKTEITLANGEIRKRPLIETNGETGEIVWDKGRDFATVRKVLSMPQVNIVKKTEVQTGGFSKESILPKRNSDKLIARKKDWDPKKYGGFDSPTVAYSVLVVAKVEKGKSKKLKSVKELLGITIMERSSFEKNPIDFLEAKGYKEVKKDLIIKLPKYSLFELENGRKRMLASAGELQKGNELALPSKYVNFLYLASHYEKLKGSPEDNEQKQLFVEQHKHYLDEIIEQISEFSKRVILADANLDKVLSAYNKHRDKPIREQAENIIHLFTLTNLGAPAAFKYFDTTIDRKRYTSTKEVLDATLIHQSITGLYETRIDLSQLGGDGGGGSGGSGGLLGRDLLTKLKAQIQFSTEGPQVTWEDRPAMCLVLNLEEEYRLHEKPVPPSIDPSWLQLFPMVWAEKAGMGLANQVPPVVVELKSDASPVAVRQYPMSKEAREGIRPHIQRFLDLGILVPCQSPWNTPLLPVKKPGTNDYRPVQDLREVNKRVQDIHPTVPNPYNLLSSLPPSHTWYSVLDLKDAFFCLKLHPNSQPLFAFEWRDPEKGNTGQLTWTRLPQGFKNSPTLFNEALHRDLASFRALNPQVVMLQYVDDLLVAAPTYRDCKEGTRRLLQELSKLGYRVSAKKAQLCREEVTYLGYLLKGGKRWLTPARKATVMKIPTPTTPRQVREFLGKAGFCRLFIPGFASLAAPLYPLTRPKVPFTWTEAHQEAFGRIKEALLSAPALALPDLTKPFALYVDEKEGVARGVLTQTLGPWRRPVAYLSKKLDPVASGWPTCLKAIAAVALLLKDADKLTLGQNVLVIAPHNLESIVRQPPDRWMTNARMTHYQSLLLNERVSFAPPAILNPATLLPVESDDTPIHICSEILAEETGTRPDLRDQPLPGVPAWYTDGSSFIMDGRRQAGAAIVDNKRTVWASNLPEGTSAQKAELIALTQALRLAEGKSINIYTDSRYAFATAHVHGAIYKQRGWLTSAGKDIKNKEEILALLEAIHLPKRVAIIHCPGHQRGTDPVATGNRKADEAAKQAAQSTRILTETTKNAGKRTADGSEFEKRTADGSEFESPKKKAKVE

SEQ ID NO: 1751 - protein, 2216 aa, synthetic construct
MPAAKRVKLDGGDKKYSIGLDIGTNSVGWAVITDEYKVPSKKFKVLGNTDRHSIKKNLIGALLFDSGETAEATRLKRTARRRYTRRKNRICYLQEIFSNEMAKVDDSFFHRLEESFLVEEDKKHERHPIFGNIVDEVAYHEKYPTIYHLRKKLVDSTDKADLRLIYLALAHMIKFRGHFLIEGDLNPDNSDVDKLFIQLVQTYNQLFEENPINASGVDAKAILSARLSKSRRLENLIAQLPGEKKNGLFGNLIALSLGLTPNFKSNFDLAEDAKLQLSKDTYDDDLDNLLAQIGDQYADLFLAAKNLSDAILLSDILRVNTEITKAPLSASMIKRYDEHHQDLTLLKALVRQQLPEKYKEIFFDQSKNGYAGYIDGGASQEEFYKFIKPILEKMDGTEELLVKLNREDLLRKQRTFDNGSIPHQIHLGELHAILRRQEDFYPFLKDNREKIEKILTFRIPYYVGPLARGNSRFAWMTRKSEETITPWNFEEVVDKGASAQSFIERMTNFDKNLPNEKVLPKHSLLYEYFTVYNELTKVKYVTEGMRKPAFLSGEQKKAIVDLLFKTNRKVTVKQLKEDYFKKIECFDSVEISGVEDRFNASLGTYHDLLKIIKDKDFLDNEENEDILEDIVLTLTLFEDREMIEERLKTYAHLFDDKVMKQLKRRRYTGWGRLSRKLINGIRDKQSGKTILDFLKSDGFANRNFMQLIHDDSLTFKEDIQKAQVSGQGDSLHEHIANLAGSPAIKKGILQTVKVVDELVKVMGRHKPENIVIEMARENQTTQKGQKNSRERMKRIEEGIKELGSQILKEHPVENTQLQNEKLYLYYLQNGRDMYVDQELDINRLSDYDVDHIVPQSFLKDDSIDNKVLTRSDKARGKSDNVPSEEVVKKMKNYWRQLLNAKLITQRKFDNLTKAERGGLSELDKAGFIKRQLVETRQITKHVAQILDSRMNTKYDENDKLIREVKVITLKSKLVSDFRKDFQFYKVREINNYHHAHDAYLNAVVGTALIKKYPKLESEFVYGDYKVYDVRKMIAKSEQEIGKATAKYFFYSNIMNFFKTEITLANGEIRKRPLIETNGETGEIVWDKGRDFATVRKVLSMPQVNIVKKTEVQTGGFSKESILPKRNSDKLIARKKDWDPKKYGGFDSPTVAYSVLVVAKVEKGKSKKLKSVKELLGITIMERSSFEKNPIDFLEAKGYKEVKKDLIIKLPKYSLFELENGRKRMLASAGELQKGNELALPSKYVNFLYLASHYEKLKGSPEDNEQKQLFVEQHKHYLDEIIEQISEFSKRVILADANLDKVLSAYNKHRDKPIREQAENIIHLFTLTNLGAPAAFKYFDTTIDRKRYTSTKEVLDATLIHQSITGLYETRIDLSQLGGDGGGGGGGSGSSGGTLGDQGSRGSDPLPEPRVTLTVEGIPTEFLVNTGAEHSVLTKPMGKMGSKRTVVAGATGSKVYPWTTKRLLKIGQKQVTHSFLVIPECPAPLLGRDLLTKLKAQIQFSTEGPQVTWEDRPAMCLVLNLEEEYRLHEKPVPPSIDPSWLQLFPMVWAEKAGMGLANQVPPVVVELKSDASPVAVRQYPMSKEAREGIRPHIQRFLDLGILVPCQSPWNTPLLPVKKPGTNDYRPVQDLREVNKRVQDIHPTVPNPYNLLSSLPPSHTWYSVLDLKDAFFCLKLHPNSQPLFAFEWRDPEKGNTGQLTWTRLPQGFKNSPTLFNEALHRDLASFRALNPQVVMLQYVDDLLVAAPTYRDCKEGTRRLLQELSKLGYRVSAKKAQLCREEVTYLGYLLKGGKRWLTPARKATVMKIPTPTTPRQVREFLGTAGFCRLWIPGFASLAAPLYPLTRPKVPFTWTEAHQEAFGRIKEALLSAPALALPDLTKPFALYVDEKEGVARGVLTQTLGPWRRPVAYLSKKLDPVASGWPTCLKAIAAVALLLKDADKLTLGQNVLVIAPHNLESIVRQPPDRWMTNARMTHYQSLLLNERVSFAPPAILNPATLLPVESDDTPIHICSEILAEETGTRPDLRDQPLPGVPAWYTDGSSFIMDGRRQAGAAIVDNKRTVWASNLPEGTSAQKAELIALTQALRLAEGKSINIYTDSRYAFATAHVHGAIYKQRGWLTSAGKDIKNKEEILALLEAIHLPKRVAIIHCPGHQRGTDPVATGNRKADEAAKQAAQSTRILTETTKNAGKRTADGSEFEKRTADGSEFESPKKKAKVE

SEQ ID NO: 1752 - protein, 2237 aa, synthetic construct
MPAAKRVKLDGGDKKYSIGLDIGTNSVGWAVITDEYKVPSKKFKVLGNTDRHSIKKNLIGALLFDSGETAEATRLKRTARRRYTRRKNRICYLQEIFSNEMAKVDDSFFHRLEESFLVEEDKKHERHPIFGNIVDEVAYHEKYPTIYHLRKKLVDSTDKADLRLIYLALAHMIKFRGHFLIEGDLNPDNSDVDKLFIQLVQTYNQLFEENPINASGVDAKAILSARLSKSRRLENLIAQLPGEKKNGLFGNLIALSLGLTPNFKSNFDLAEDAKLQLSKDTYDDDLDNLLAQIGDQYADLFLAAKNLSDAILLSDILRVNTEITKAPLSASMIKRYDEHHQDLTLLKALVRQQLPEKYKEIFFDQSKNGYAGYIDGGASQEEFYKFIKPILEKMDGTEELLVKLNREDLLRKQRTFDNGSIPHQIHLGELHAILRRQEDFYPFLKDNREKIEKILTFRIPYYVGPLARGNSRFAWMTRKSEETITPWNFEEVVDKGASAQSFIERMTNFDKNLPNEKVLPKHSLLYEYFTVYNELTKVKYVTEGMRKPAFLSGEQKKAIVDLLFKTNRKVTVKQLKEDYFKKIECFDSVEISGVEDRFNASLGTYHDLLKIIKDKDFLDNEENEDILEDIVLTLTLFEDREMIEERLKTYAHLFDDKVMKQLKRRRYTGWGRLSRKLINGIRDKQSGKTILDFLKSDGFANRNFMQLIHDDSLTFKEDIQKAQVSGQGDSLHEHIANLAGSPAIKKGILQTVKVVDELVKVMGRHKPENIVIEMARENQTTQKGQKNSRERMKRIEEGIKELGSQILKEHPVENTQLQNEKLYLYYLQNGRDMYVDQELDINRLSDYDVDHIVPQSFLKDDSIDNKVLTRSDKARGKSDNVPSEEVVKKMKNYWRQLLNAKLITQRKFDNLTKAERGGLSELDKAGFIKRQLVETRQITKHVAQILDSRMNTKYDENDKLIREVKVITLKSKLVSDFRKDFQFYKVREINNYHHAHDAYLNAVVGTALIKKYPKLESEFVYGDYKVYDVRKMIAKSEQEIGKATAKYFFYSNIMNFFKTEITLANGEIRKRPLIETNGETGEIVWDKGRDFATVRKVLSMPQVNIVKKTEVQTGGFSKESILPKRNSDKLIARKKDWDPKKYGGFDSPTVAYSVLVVAKVEKGKSKKLKSVKELLGITIMERSSFEKNPIDFLEAKGYKEVKKDLIIKLPKYSLFELENGRKRMLASAGELQKGNELALPSKYVNFLYLASHYEKLKGSPEDNEQKQLFVEQHKHYLDEIIEQISEFSKRVILADANLDKVLSAYNKHRDKPIREQAENIIHLFTLTNLGAPAAFKYFDTTIDRKRYTSTKEVLDATLIHQSITGLYETRIDLSQLGGDGGGGGGSGGGGSGGGGSGGGGSGGGGSGGGGSGGTLGDQGSRGSDPLPEPRVTLTVEGIPTEFLVNTGAEHSVLTKPMGKMGSKRTVVAGATGSKVYPWTTKRLLKIGQKQVTHSFLVIPECPAPLLGRDLLTKLKAQIQFSTEGPQVTWEDRPAMCLVLNLEEEYRLHEKPVPPSIDPSWLQLFPMVWAEKAGMGLANQVPPVVVELKSDASPVAVRQYPMSKEAREGIRPHIQRFLDLGILVPCQSPWNTPLLPVKKPGTNDYRPVQDLREVNKRVQDIHPTVPNPYNLLSSLPPSHTWYSVLDLKDAFFCLKLHPNSQPLFAFEWRDPEKGNTGQLTWTRLPQGFKNSPTLFNEALHRDLASFRALNPQVVMLQYVDDLLVAAPTYRDCKEGTRRLLQELSKLGYRVSAKKAQLCREEVTYLGYLLKGGKRWLTPARKATVMKIPTPTTPRQVREFLGTAGFCRLWIPGFASLAAPLYPLTRPKVPFTWTEAHQEAFGRIKEALLSAPALALPDLTKPFALYVDEKEGVARGVLTQTLGPWRRPVAYLSKKLDPVASGWPTCLKAIAAVALLLKDADKLTLGQNVLVIAPHNLESIVRQPPDRWMTNARMTHYQSLLLNERVSFAPPAILNPATLLPVESDDTPIHICSEILAEETGTRPDLRDQPLPGVPAWYTDGSSFIMDGRRQAGAAIVDNKRTVWASNLPEGTSAQKAELIALTQALRLAEGKSINIYTDSRYAFATAHVHGAIYKQRGWLTSAGKDIKNKEEILALLEAIHLPKRVAIIHCPGHQRGTDPVATGNRKADEAAKQAAQSTRILTETTKNAGKRTADGSEFEKRTADGSEFESPKKKAKVE

SEQ ID NO: 1753 - protein, 2218 aa, synthetic construct
MPAAKRVKLDGGDKKYSIGLDIGTNSVGWAVITDEYKVPSKKFKVLGNTDRHSIKKNLIGALLFDSGETAEATRLKRTARRRYTRRKNRICYLQEIFSNEMAKVDDSFFHRLEESFLVEEDKKHERHPIFGNIVDEVAYHEKYPTIYHLRKKLVDSTDKADLRLIYLALAHMIKFRGHFLIEGDLNPDNSDVDKLFIQLVQTYNQLFEENPINASGVDAKAILSARLSKSRRLENLIAQLPGEKKNGLFGNLIALSLGLTPNFKSNFDLAEDAKLQLSKDTYDDDLDNLLAQIGDQYADLFLAAKNLSDAILLSDILRVNTEITKAPLSASMIKRYDEHHQDLTLLKALVRQQLPEKYKEIFFDQSKNGYAGYIDGGASQEEFYKFIKPILEKMDGTEELLVKLNREDLLRKQRTFDNGSIPHQIHLGELHAILRRQEDFYPFLKDNREKIEKILTFRIPYYVGPLARGNSRFAWMTRKSEETITPWNFEEVVDKGASAQSFIERMTNFDKNLPNEKVLPKHSLLYEYFTVYNELTKVKYVTEGMRKPAFLSGEQKKAIVDLLFKTNRKVTVKQLKEDYFKKIECFDSVEISGVEDRFNASLGTYHDLLKIIKDKDFLDNEENEDILEDIVLTLTLFEDREMIEERLKTYAHLFDDKVMKQLKRRRYTGWGRLSRKLINGIRDKQSGKTILDFLKSDGFANRNFMQLIHDDSLTFKEDIQKAQVSGQGDSLHEHIANLAGSPAIKKGILQTVKVVDELVKVMGRHKPENIVIEMARENQTTQKGQKNSRERMKRIEEGIKELGSQILKEHPVENTQLQNEKLYLYYLQNGRDMYVDQELDINRLSDYDVDHIVPQSFLKDDSIDNKVLTRSDKARGKSDNVPSEEVVKKMKNYWRQLLNAKLITQRKFDNLTKAERGGLSELDKAGFIKRQLVETRQITKHVAQILDSRMNTKYDENDKLIREVKVITLKSKLVSDFRKDFQFYKVREINNYHHAHDAYLNAVVGTALIKKYPKLESEFVYGDYKVYDVRKMIAKSEQEIGKATAKYFFYSNIMNFFKTEITLANGEIRKRPLIETNGETGEIVWDKGRDFATVRKVLSMPQVNIVKKTEVQTGGFSKESILPKRNSDKLIARKKDWDPKKYGGFDSPTVAYSVLVVAKVEKGKSKKLKSVKELLGITIMERSSFEKNPIDFLEAKGYKEVKKDLIIKLPKYSLFELENGRKRMLASAGELQKGNELALPSKYVNFLYLASHYEKLKGSPEDNEQKQLFVEQHKHYLDEIIEQISEFSKRVILADANLDKVLSAYNKHRDKPIREQAENIIHLFTLTNLGAPAAFKYFDTTIDRKRYTSTKEVLDATLIHQSITGLYETRIDLSQLGGDGGEAAAKGGGPAPGGTLGDQGSRGSDPLPEPRVTLTVEGIPTEFLVNTGAEHSVLTKPMGKMGSKRTVVAGATGSKVYPWTTKRLLKIGQKQVTHSFLVIPECPAPLLGRDLLTKLKAQIQFSTEGPQVTWEDRPAMCLVLNLEEEYRLHEKPVPPSIDPSWLQLFPMVWAEKAGMGLANQVPPVVVELKSDASPVAVRQYPMSKEAREGIRPHIQRFLDLGILVPCQSPWNTPLLPVKKPGTNDYRPVQDLREVNKRVQDIHPTVPNPYNLLSSLPPSHTWYSVLDLKDAFFCLKLHPNSQPLFAFEWRDPEKGNTGQLTWTRLPQGFKNSPTLFNEALHRDLASFRALNPQVVMLQYVDDLLVAAPTYRDCKEGTRRLLQELSKLGYRVSAKKAQLCREEVTYLGYLLKGGKRWLTPARKATVMKIPTPTTPRQVREFLGTAGFCRLWIPGFASLAAPLYPLTRPKVPFTWTEAHQEAFGRIKEALLSAPALALPDLTKPFALYVDEKEGVARGVLTQTLGPWRRPVAYLSKKLDPVASGWPTCLKAIAAVALLLKDADKLTLGQNVLVIAPHNLESIVRQPPDRWMTNARMTHYQSLLLNERVSFAPPAILNPATLLPVESDDTPIHICSEILAEETGTRPDLRDQPLPGVPAWYTDGSSFIMDGRRQAGAAIVDNKRTVWASNLPEGTSAQKAELIALTQALRLAEGKSINIYTDSRYAFATAHVHGAIYKQRGWLTSAGKDIKNKEEILALLEAIHLPKRVAIIHCPGHQRGTDPVATGNRKADEAAKQAAQSTRILTETTKNAGKRTADGSEFEKRTADGSEFESPKKKAKVE

SEQ ID NO: 1754 - protein, 2218 aa, synthetic construct
MPAAKRVKLDGGDKKYSIGLDIGTNSVGWAVITDEYKVPSKKFKVLGNTDRHSIKKNLIGALLFDSGETAEATRLKRTARRRYTRRKNRICYLQEIFSNEMAKVDDSFFHRLEESFLVEEDKKHERHPIFGNIVDEVAYHEKYPTIYHLRKKLVDSTDKADLRLIYLALAHMIKFRGHFLIEGDLNPDNSDVDKLFIQLVQTYNQLFEENPINASGVDAKAILSARLSKSRRLENLIAQLPGEKKNGLFGNLIALSLGLTPNFKSNFDLAEDAKLQLSKDTYDDDLDNLLAQIGDQYADLFLAAKNLSDAILLSDILRVNTEITKAPLSASMIKRYDEHHQDLTLLKALVRQQLPEKYKEIFFDQSKNGYAGYIDGGASQEEFYKFIKPILEKMDGTEELLVKLNREDLLRKQRTFDNGSIPHQIHLGELHAILRRQEDFYPFLKDNREKIEKILTFRIPYYVGPLARGNSRFAWMTRKSEETITPWNFEEVVDKGASAQSFIERMTNFDKNLPNEKVLPKHSLLYEYFTVYNELTKVKYVTEGMRKPAFLSGEQKKAIVDLLFKTNRKVTVKQLKEDYFKKIECFDSVEISGVEDRFNASLGTYHDLLKIIKDKDFLDNEENEDILEDIVLTLTLFEDREMIEERLKTYAHLFDDKVMKQLKRRRYTGWGRLSRKLINGIRDKQSGKTILDFLKSDGFANRNFMQLIHDDSLTFKEDIQKAQVSGQGDSLHEHIANLAGSPAIKKGILQTVKVVDELVKVMGRHKPENIVIEMARENQTTQKGQKNSRERMKRIEEGIKELGSQILKEHPVENTQLQNEKLYLYYLQNGRDMYVDQELDINRLSDYDVDHIVPQSFLKDDSIDNKVLTRSDKARGKSDNVPSEEVVKKMKNYWRQLLNAKLITQRKFDNLTKAERGGLSELDKAGFIKRQLVETRQITKHVAQILDSRMNTKYDENDKLIREVKVITLKSKLVSDFRKDFQFYKVREINNYHHAHDAYLNAVVGTALIKKYPKLESEFVYGDYKVYDVRKMIAKSEQEIGKATAKYFFYSNIMNFFKTEITLANGEIRKRPLIETNGETGEIVWDKGRDFATVRKVLSMPQVNIVKKTEVQTGGFSKESILPKRNSDKLIARKKDWDPKKYGGFDSPTVAYSVLVVAKVEKGKSKKLKSVKELLGITIMERSSFEKNPIDFLEAKGYKEVKKDLIIKLPKYSLFELENGRKRMLASAGELQKGNELALPSKYVNFLYLASHYEKLKGSPEDNEQKQLFVEQHKHYLDEIIEQISEFSKRVILADANLDKVLSAYNKHRDKPIREQAENIIHLFTLTNLGAPAAFKYFDTTIDRKRYTSTKEVLDATLIHQSITGLYETRIDLSQLGGDGGPAPGGSEAAAKGGTLGDQGSRGSDPLPEPRVTLTVEGIPTEFLVNTGAEHSVLTKPMGKMGSKRTVVAGATGSKVYPWTTKRLLKIGQKQVTHSFLVIPECPAPLLGRDLLTKLKAQIQFSTEGPQVTWEDRPAMCLVLNLEEEYRLHEKPVPPSIDPSWLQLFPMVWAEKAGMGLANQVPPVVVELKSDASPVAVRQYPMSKEAREGIRPHIQRFLDLGILVPCQSPWNTPLLPVKKPGTNDYRPVQDLREVNKRVQDIHPTVPNPYNLLSSLPPSHTWYSVLDLKDAFFCLKLHPNSQPLFAFEWRDPEKGNTGQLTWTRLPQGFKNSPTLFNEALHRDLASFRALNPQVVMLQYVDDLLVAAPTYRDCKEGTRRLLQELSKLGYRVSAKKAQLCREEVTYLGYLLKGGKRWLTPARKATVMKIPTPTTPRQVREFLGTAGFCRLWIPGFASLAAPLYPLTRPKVPFTWTEAHQEAFGRIKEALLSAPALALPDLTKPFALYVDEKEGVARGVLTQTLGPWRRPVAYLSKKLDPVASGWPTCLKAIAAVALLLKDADKLTLGQNVLVIAPHNLESIVRQPPDRWMTNARMTHYQSLLLNERVSFAPPAILNPATLLPVESDDTPIHICSEILAEETGTRPDLRDQPLPGVPAWYTDGSSFIMDGRRQAGAAIVDNKRTVWASNLPEGTSAQKAELIALTQALRLAEGKSINIYTDSRYAFATAHVHGAIYKQRGWLTSAGKDIKNKEEILALLEAIHLPKRVAIIHCPGHQRGTDPVATGNRKADEAAKQAAQSTRILTETTKNAGKRTADGSEFEKRTADGSEFESPKKKAKVE

SEQ ID NO: 1755 - protein, 2219 aa, synthetic construct
MPAAKRVKLDGGDKKYSIGLDIGTNSVGWAVITDEYKVPSKKFKVLGNTDRHSIKKNLIGALLFDSGETAEATRLKRTARRRYTRRKNRICYLQEIFSNEMAKVDDSFFHRLEESFLVEEDKKHERHPIFGNIVDEVAYHEKYPTIYHLRKKLVDSTDKADLRLIYLALAHMIKFRGHFLIEGDLNPDNSDVDKLFIQLVQTYNQLFEENPINASGVDAKAILSARLSKSRRLENLIAQLPGEKKNGLFGNLIALSLGLTPNFKSNFDLAEDAKLQLSKDTYDDDLDNLLAQIGDQYADLFLAAKNLSDAILLSDILRVNTEITKAPLSASMIKRYDEHHQDLTLLKALVRQQLPEKYKEIFFDQSKNGYAGYIDGGASQEEFYKFIKPILEKMDGTEELLVKLNREDLLRKQRTFDNGSIPHQIHLGELHAILRRQEDFYPFLKDNREKIEKILTFRIPYYVGPLARGNSRFAWMTRKSEETITPWNFEEVVDKGASAQSFIERMTNFDKNLPNEKVLPKHSLLYEYFTVYNELTKVKYVTEGMRKPAFLSGEQKKAIVDLLFKTNRKVTVKQLKEDYFKKIECFDSVEISGVEDRFNASLGTYHDLLKIIKDKDFLDNEENEDILEDIVLTLTLFEDREMIEERLKTYAHLFDDKVMKQLKRRRYTGWGRLSRKLINGIRDKQSGKTILDFLKSDGFANRNFMQLIHDDSLTFKEDIQKAQVSGQGDSLHEHIANLAGSPAIKKGILQTVKVVDELVKVMGRHKPENIVIEMARENQTTQKGQKNSRERMKRIEEGIKELGSQILKEHPVENTQLQNEKLYLYYLQNGRDMYVDQELDINRLSDYDVDHIVPQSFLKDDSIDNKVLTRSDKARGKSDNVPSEEVVKKMKNYWRQLLNAKLITQRKFDNLTKAERGGLSELDKAGFIKRQLVETRQITKHVAQILDSRMNTKYDENDKLIREVKVITLKSKLVSDFRKDFQFYKVREINNYHHAHDAYLNAVVGTALIKKYPKLESEFVYGDYKVYDVRKMIAKSEQEIGKATAKYFFYSNIMNFFKTEITLANGEIRKRPLIETNGETGEIVWDKGRDFATVRKVLSMPQVNIVKKTEVQTGGFSKESILPKRNSDKLIARKKDWDPKKYGGFDSPTVAYSVLVVAKVEKGKSKKLKSVKELLGITIMERSSFEKNPIDFLEAKGYKEVKKDLIIKLPKYSLFELENGRKRMLASAGELQKGNELALPSKYVNFLYLASHYEKLKGSPEDNEQKQLFVEQHKHYLDEIIEQISEFSKRVILADANLDKVLSAYNKHRDKPIREQAENIIHLFTLTNLGAPAAFKYFDTTIDRKRYTSTKEVLDATLIHQSITGLYETRIDLSQLGGDGGGGSGGSGGSGGSGGTLGDQGSRGSDPLPEPRVTLTVEGIPTEFLVNTGAEHSVLTKPMGKMGSKRTVVAGATGSKVYPWTTKRLLKIGQKQVTHSFLVIPECPAPLLGRDLLTKLKAQIQFSTEGPQVTWEDRPAMCLVLNLEEEYRLHEKPVPPSIDPSWLQLFPMVWAEKAGMGLANQVPPVVVELKSDASPVAVRQYPMSKEAREGIRPHIQRFLDLGILVPCQSPWNTPLLPVKKPGTNDYRPVQDLREVNKRVQDIHPTVPNPYNLLSSLPPSHTWYSVLDLKDAFFCLKLHPNSQPLFAFEWRDPEKGNTGQLTWTRLPQGFKNSPTLFNEALHRDLASFRALNPQVVMLQYVDDLLVAAPTYRDCKEGTRRLLQELSKLGYRVSAKKAQLCREEVTYLGYLLKGGKRWLTPARKATVMKIPTPTTPRQVREFLGTAGFCRLWIPGFASLAAPLYPLTRPKVPFTWTEAHQEAFGRIKEALLSAPALALPDLTKPFALYVDEKEGVARGVLTQTLGPWRRPVAYLSKKLDPVASGWPTCLKAIAAVALLLKDADKLTLGQNVLVIAPHNLESIVRQPPDRWMTNARMTHYQSLLLNERVSFAPPAILNPATLLPVESDDTPIHICSEILAEETGTRPDLRDQPLPGVPAWYTDGSSFIMDGRRQAGAAIVDNKRTVWASNLPEGTSAQKAELIALTQALRLAEGKSINIYTDSRYAFATAHVHGAIYKQRGWLTSAGKDIKNKEEILALLEAIHLPKRVAIIHCPGHQRGTDPVATGNRKADEAAKQAAQSTRILTETTKNAGKRTADGSEFEKRTADGSEFESPKKKAKVE

SEQ ID NO: 1756 - protein, 2218 aa, synthetic construct
MPAAKRVKLDGGDKKYSIGLDIGTNSVGWAVITDEYKVPSKKFKVLGNTDRHSIKKNLIGALLFDSGETAEATRLKRTARRRYTRRKNRICYLQEIFSNEMAKVDDSFFHRLEESFLVEEDKKHERHPIFGNIVDEVAYHEKYPTIYHLRKKLVDSTDKADLRLIYLALAHMIKFRGHFLIEGDLNPDNSDVDKLFIQLVQTYNQLFEENPINASGVDAKAILSARLSKSRRLENLIAQLPGEKKNGLFGNLIALSLGLTPNFKSNFDLAEDAKLQLSKDTYDDDLDNLLAQIGDQYADLFLAAKNLSDAILLSDILRVNTEITKAPLSASMIKRYDEHHQDLTLLKALVRQQLPEKYKEIFFDQSKNGYAGYIDGGASQEEFYKFIKPILEKMDGTEELLVKLNREDLLRKQRTFDNGSIPHQIHLGELHAILRRQEDFYPFLKDNREKIEKILTFRIPYYVGPLARGNSRFAWMTRKSEETITPWNFEEVVDKGASAQSFIERMTNFDKNLPNEKVLPKHSLLYEYFTVYNELTKVKYVTEGMRKPAFLSGEQKKAIVDLLFKTNRKVTVKQLKEDYFKKIECFDSVEISGVEDRFNASLGTYHDLLKIIKDKDFLDNEENEDILEDIVLTLTLFEDREMIEERLKTYAHLFDDKVMKQLKRRRYTGWGRLSRKLINGIRDKQSGKTILDFLKSDGFANRNFMQLIHDDSLTFKEDIQKAQVSGQGDSLHEHIANLAGSPAIKKGILQTVKVVDELVKVMGRHKPENIVIEMARENQTTQKGQKNSRERMKRIEEGIKELGSQILKEHPVENTQLQNEKLYLYYLQNGRDMYVDQELDINRLSDYDVDHIVPQSFLKDDSIDNKVLTRSDKARGKSDNVPSEEVVKKMKNYWRQLLNAKLITQRKFDNLTKAERGGLSELDKAGFIKRQLVETRQITKHVAQILDSRMNTKYDENDKLIREVKVITLKSKLVSDFRKDFQFYKVREINNYHHAHDAYLNAVVGTALIKKYPKLESEFVYGDYKVYDVRKMIAKSEQEIGKATAKYFFYSNIMNFFKTEITLANGEIRKRPLIETNGETGEIVWDKGRDFATVRKVLSMPQVNIVKKTEVQTGGFSKESILPKRNSDKLIARKKDWDPKKYGGFDSPTVAYSVLVVAKVEKGKSKKLKSVKELLGITIMERSSFEKNPIDFLEAKGYKEVKKDLIIKLPKYSLFELENGRKRMLASAGELQKGNELALPSKYVNFLYLASHYEKLKGSPEDNEQKQLFVEQHKHYLDEIIEQISEFSKRVILADANLDKVLSAYNKHRDKPIREQAENIIHLFTLTNLGAPAAFKYFDTTIDRKRYTSTKEVLDATLIHQSITGLYETRIDLSQLGGDGGEAAAKGSSGGGGGTLGDQGSRGSDPLPEPRVTLTVEGIPTEFLVNTGAEHSVLTKPMGKMGSKRTVVAGATGSKVYPWTTKRLLKIGQKQVTHSFLVIPECPAPLLGRDLLTKLKAQIQFSTEGPQVTWEDRPAMCLVLNLEEEYRLHEKPVPPSIDPSWLQLFPMVWAEKAGMGLANQVPPVVVELKSDASPVAVRQYPMSKEAREGIRPHIQRFLDLGILVPCQSPWNTPLLPVKKPGTNDYRPVQDLREVNKRVQDIHPTVPNPYNLLSSLPPSHTWYSVLDLKDAFFCLKLHPNSQPLFAFEWRDPEKGNTGQLTWTRLPQGFKNSPTLFNEALHRDLASFRALNPQVVMLQYVDDLLVAAPTYRDCKEGTRRLLQELSKLGYRVSAKKAQLCREEVTYLGYLLKGGKRWLTPARKATVMKIPTPTTPRQVREFLGTAGFCRLWIPGFASLAAPLYPLTRPKVPFTWTEAHQEAFGRIKEALLSAPALALPDLTKPFALYVDEKEGVARGVLTQTLGPWRRPVAYLSKKLDPVASGWPTCLKAIAAVALLLKDADKLTLGQNVLVIAPHNLESIVRQPPDRWMTNARMTHYQSLLLNERVSFAPPAILNPATLLPVESDDTPIHICSEILAEETGTRPDLRDQPLPGVPAWYTDGSSFIMDGRRQAGAAIVDNKRTVWASNLPEGTSAQKAELIALTQALRLAEGKSINIYTDSRYAFATAHVHGAIYKQRGWLTSAGKDIKNKEEILALLEAIHLPKRVAIIHCPGHQRGTDPVATGNRKADEAAKQAAQSTRILTETTKNAGKRTADGSEFEKRTADGSEFESPKKKAKVE

SEQ ID NO: 1757 - protein, 2216 aa, synthetic construct
MPAAKRVKLDGGDKKYSIGLDIGTNSVGWAVITDEYKVPSKKFKVLGNTDRHSIKKNLIGALLFDSGETAEATRLKRTARRRYTRRKNRICYLQEIFSNEMAKVDDSFFHRLEESFLVEEDKKHERHPIFGNIVDEVAYHEKYPTIYHLRKKLVDSTDKADLRLIYLALAHMIKFRGHFLIEGDLNPDNSDVDKLFIQLVQTYNQLFEENPINASGVDAKAILSARLSKSRRLENLIAQLPGEKKNGLFGNLIALSLGLTPNFKSNFDLAEDAKLQLSKDTYDDDLDNLLAQIGDQYADLFLAAKNLSDAILLSDILRVNTEITKAPLSASMIKRYDEHHQDLTLLKALVRQQLPEKYKEIFFDQSKNGYAGYIDGGASQEEFYKFIKPILEKMDGTEELLVKLNREDLLRKQRTFDNGSIPHQIHLGELHAILRRQEDFYPFLKDNREKIEKILTFRIPYYVGPLARGNSRFAWMTRKSEETITPWNFEEVVDKGASAQSFIERMTNFDKNLPNEKVLPKHSLLYEYFTVYNELTKVKYVTEGMRKPAFLSGEQKKAIVDLLFKTNRKVTVKQLKEDYFKKIECFDSVEISGVEDRFNASLGTYHDLLKIIKDKDFLDNEENEDILEDIVLTLTLFEDREMIEERLKTYAHLFDDKVMKQLKRRRYTGWGRLSRKLINGIRDKQSGKTILDFLKSDGFANRNFMQLIHDDSLTFKEDIQKAQVSGQGDSLHEHIANLAGSPAIKKGILQTVKVVDELVKVMGRHKPENIVIEMARENQTTQKGQKNSRERMKRIEEGIKELGSQILKEHPVENTQLQNEKLYLYYLQNGRDMYVDQELDINRLSDYDVDHIVPQSFLKDDSIDNKVLTRSDKARGKSDNVPSEEVVKKMKNYWRQLLNAKLITQRKFDNLTKAERGGLSELDKAGFIKRQLVETRQITKHVAQILDSRMNTKYDENDKLIREVKVITLKSKLVSDFRKDFQFYKVREINNYHHAHDAYLNAVVGTALIKKYPKLESEFVYGDYKVYDVRKMIAKSEQEIGKATAKYFFYSNIMNFFKTEITLANGEIRKRPLIETNGETGEIVWDKGRDFATVRKVLSMPQVNIVKKTEVQTGGFSKESILPKRNSDKLIARKKDWDPKKYGGFDSPTVAYSVLVVAKVEKGKSKKLKSVKELLGITIMERSSFEKNPIDFLEAKGYKEVKKDLIIKLPKYSLFELENGRKRMLASAGELQKGNELALPSKYVNFLYLASHYEKLKGSPEDNEQKQLFVEQHKHYLDEIIEQISEFSKRVILADANLDKVLSAYNKHRDKPIREQAENIIHLFTLTNLGAPAAFKYFDTTIDRKRYTSTKEVLDATLIHQSITGLYETRIDLSQLGGDGGGGSPAPGSSGGTLGDQGSRGSDPLPEPRVTLTVEGIPTEFLVNTGAEHSVLTKPMGKMGSKRTVVAGATGSKVYPWTTKRLLKIGQKQVTHSFLVIPECPAPLLGRDLLTKLKAQIQFSTEGPQVTWEDRPAMCLVLNLEEEYRLHEKPVPPSIDPSWLQLFPMVWAEKAGMGLANQVPPVVVELKSDASPVAVRQYPMSKEAREGIRPHIQRFLDLGILVPCQSPWNTPLLPVKKPGTNDYRPVQDLREVNKRVQDIHPTVPNPYNLLSSLPPSHTWYSVLDLKDAFFCLKLHPNSQPLFAFEWRDPEKGNTGQLTWTRLPQGFKNSPTLFNEALHRDLASFRALNPQVVMLQYVDDLLVAAPTYRDCKEGTRRLLQELSKLGYRVSAKKAQLCREEVTYLGYLLKGGKRWLTPARKATVMKIPTPTTPRQVREFLGTAGFCRLWIPGFASLAAPLYPLTRPKVPFTWTEAHQEAFGRIKEALLSAPALALPDLTKPFALYVDEKEGVARGVLTQTLGPWRRPVAYLSKKLDPVASGWPTCLKAIAAVALLLKDADKLTLGQNVLVIAPHNLESIVRQPPDRWMTNARMTHYQSLLLNERVSFAPPAILNPATLLPVESDDTPIHICSEILAEETGTRPDLRDQPLPGVPAWYTDGSSFIMDGRRQAGAAIVDNKRTVWASNLPEGTSAQKAELIALTQALRLAEGKSINIYTDSRYAFATAHVHGAIYKQRGWLTSAGKDIKNKEEILALLEAIHLPKRVAIIHCPGHQRGTDPVATGNRKADEAAKQAAQSTRILTETTKNAGKRTADGSEFEKRTADGSEFESPKKKAKVE

SEQ ID NO: 1758 - protein, 2222 aa, synthetic construct
MPAAKRVKLDGGDKKYSIGLDIGTNSVGWAVITDEYKVPSKKFKVLGNTDRHSIKKNLIGALLFDSGETAEATRLKRTARRRYTRRKNRICYLQEIFSNEMAKVDDSFFHRLEESFLVEEDKKHERHPIFGNIVDEVAYHEKYPTIYHLRKKLVDSTDKADLRLIYLALAHMIKFRGHFLIEGDLNPDNSDVDKLFIQLVQTYNQLFEENPINASGVDAKAILSARLSKSRRLENLIAQLPGEKKNGLFGNLIALSLGLTPNFKSNFDLAEDAKLQLSKDTYDDDLDNLLAQIGDQYADLFLAAKNLSDAILLSDILRVNTEITKAPLSASMIKRYDEHHQDLTLLKALVRQQLPEKYKEIFFDQSKNGYAGYIDGGASQEEFYKFIKPILEKMDGTEELLVKLNREDLLRKQRTFDNGSIPHQIHLGELHAILRRQEDFYPFLKDNREKIEKILTFRIPYYVGPLARGNSRFAWMTRKSEETITPWNFEEVVDKGASAQSFIERMTNFDKNLPNEKVLPKHSLLYEYFTVYNELTKVKYVTEGMRKPAFLSGEQKKAIVDLLFKTNRKVTVKQLKEDYFKKIECFDSVEISGVEDRFNASLGTYHDLLKIIKDKDFLDNEENEDILEDIVLTLTLFEDREMIEERLKTYAHLFDDKVMKQLKRRRYTGWGRLSRKLINGIRDKQSGKTILDFLKSDGFANRNFMQLIHDDSLTFKEDIQKAQVSGQGDSLHEHIANLAGSPAIKKGILQTVKVVDELVKVMGRHKPENIVIEMARENQTTQKGQKNSRERMKRIEEGIKELGSQILKEHPVENTQLQNEKLYLYYLQNGRDMYVDQELDINRLSDYDVDHIVPQSFLKDDSIDNKVLTRSDKARGKSDNVPSEEVVKKMKNYWRQLLNAKLITQRKFDNLTKAERGGLSELDKAGFIKRQLVETRQITKHVAQILDSRMNTKYDENDKLIREVKVITLKSKLVSDFRKDFQFYKVREINNYHHAHDAYLNAVVGTALIKKYPKLESEFVYGDYKVYDVRKMIAKSEQEIGKATAKYFFYSNIMNFFKTEITLANGEIRKRPLIETNGETGEIVWDKGRDFATVRKVLSMPQVNIVKKTEVQTGGFSKESILPKRNSDKLIARKKDWDPKKYGGFDSPTVAYSVLVVAKVEKGKSKKLKSVKELLGITIMERSSFEKNPIDFLEAKGYKEVKKDLIIKLPKYSLFELENGRKRMLASAGELQKGNELALPSKYVNFLYLASHYEKLKGSPEDNEQKQLFVEQHKHYLDEIIEQISEFSKRVILADANLDKVLSAYNKHRDKPIREQAENIIHLFTLTNLGAPAAFKYFDTTIDRKRYTSTKEVLDATLIHQSITGLYETRIDLSQLGGDGGGGGGSGGGGSGGGGSGGTLGDQGSRGSDPLPEPRVTLTVEGIPTEFLVNTGAEHSVLTKPMGKMGSKRTVVAGATGSKVYPWTTKRLLKIGQKQVTHSFLVIPECPAPLLGRDLLTKLKAQIQFSTEGPQVTWEDRPAMCLVLNLEEEYRLHEKPVPPSIDPSWLQLFPMVWAEKAGMGLANQVPPVVVELKSDASPVAVRQYPMSKEAREGIRPHIQRFLDLGILVPCQSPWNTPLLPVKKPGTNDYRPVQDLREVNKRVQDIHPTVPNPYNLLSSLPPSHTWYSVLDLKDAFFCLKLHPNSQPLFAFEWRDPEKGNTGQLTWTRLPQGFKNSPTLFNEALHRDLASFRALNPQVVMLQYVDDLLVAAPTYRDCKEGTRRLLQELSKLGYRVSAKKAQLCREEVTYLGYLLKGGKRWLTPARKATVMKIPTPTTPRQVREFLGTAGFCRLWIPGFASLAAPLYPLTRPKVPFTWTEAHQEAFGRIKEALLSAPALALPDLTKPFALYVDEKEGVARGVLTQTLGPWRRPVAYLSKKLDPVASGWPTCLKAIAAVALLLKDADKLTLGQNVLVIAPHNLESIVRQPPDRWMTNARMTHYQSLLLNERVSFAPPAILNPATLLPVESDDTPIHICSEILAEETGTRPDLRDQPLPGVPAWYTDGSSFIMDGRRQAGAAIVDNKRTVWASNLPEGTSAQKAELIALTQALRLAEGKSINIYTDSRYAFATAHVHGAIYKQRGWLTSAGKDIKNKEEILALLEAIHLPKRVAIIHCPGHQRGTDPVATGNRKADEAAKQAAQSTRILTETTKNAGKRTADGSEFEKRTADGSEFESPKKKAKVE

SEQ ID NO: 1759 - protein, 2218 aa, synthetic construct
MPAAKRVKLDGGDKKYSIGLDIGTNSVGWAVITDEYKVPSKKFKVLGNTDRHSIKKNLIGALLFDSGETAEATRLKRTARRRYTRRKNRICYLQEIFSNEMAKVDDSFFHRLEESFLVEEDKKHERHPIFGNIVDEVAYHEKYPTIYHLRKKLVDSTDKADLRLIYLALAHMIKFRGHFLIEGDLNPDNSDVDKLFIQLVQTYNQLFEENPINASGVDAKAILSARLSKSRRLENLIAQLPGEKKNGLFGNLIALSLGLTPNFKSNFDLAEDAKLQLSKDTYDDDLDNLLAQIGDQYADLFLAAKNLSDAILLSDILRVNTEITKAPLSASMIKRYDEHHQDLTLLKALVRQQLPEKYKEIFFDQSKNGYAGYIDGGASQEEFYKFIKPILEKMDGTEELLVKLNREDLLRKQRTFDNGSIPHQIHLGELHAILRRQEDFYPFLKDNREKIEKILTFRIPYYVGPLARGNSRFAWMTRKSEETITPWNFEEVVDKGASAQSFIERMTNFDKNLPNEKVLPKHSLLYEYFTVYNELTKVKYVTEGMRKPAFLSGEQKKAIVDLLFKTNRKVTVKQLKEDYFKKIECFDSVEISGVEDRFNASLGTYHDLLKIIKDKDFLDNEENEDILEDIVLTLTLFEDREMIEERLKTYAHLFDDKVMKQLKRRRYTGWGRLSRKLINGIRDKQSGKTILDFLKSDGFANRNFMQLIHDDSLTFKEDIQKAQVSGQGDSLHEHIANLAGSPAIKKGILQTVKVVDELVKVMGRHKPENIVIEMARENQTTQKGQKNSRERMKRIEEGIKELGSQILKEHPVENTQLQNEKLYLYYLQNGRDMYVDQELDINRLSDYDVDHIVPQSFLKDDSIDNKVLTRSDKARGKSDNVPSEEVVKKMKNYWRQLLNAKLITQRKFDNLTKAERGGLSELDKAGFIKRQLVETRQITKHVAQILDSRMNTKYDENDKLIREVKVITLKSKLVSDFRKDFQFYKVREINNYHHAHDAYLNAVVGTALIKKYPKLESEFVYGDYKVYDVRKMIAKSEQEIGKATAKYFFYSNIMNFFKTEITLANGEIRKRPLIETNGETGEIVWDKGRDFATVRKVLSMPQVNIVKKTEVQTGGFSKESILPKRNSDKLIARKKDWDPKKYGGFDSPTVAYSVLVVAKVEKGKSKKLKSVKELLGITIMERSSFEKNPIDFLEAKGYKEVKKDLIIKLPKYSLFELENGRKRMLASAGELQKGNELALPSKYVNFLYLASHYEKLKGSPEDNEQKQLFVEQHKHYLDEIIEQISEFSKRVILADANLDKVLSAYNKHRDKPIREQAENIIHLFTLTNLGAPAAFKYFDTTIDRKRYTSTKEVLDATLIHQSITGLYETRIDLSQLGGDGGGSSGGGEAAAKGGTLGDQGSRGSDPLPEPRVTLTVEGIPTEFLVNTGAEHSVLTKPMGKMGSKRTVVAGATGSKVYPWTTKRLLKIGQKQVTHSFLVIPECPAPLLGRDLLTKLKAQIQFSTEGPQVTWEDRPAMCLVLNLEEEYRLHEKPVPPSIDPSWLQLFPMVWAEKAGMGLANQVPPVVVELKSDASPVAVRQYPMSKEAREGIRPHIQRFLDLGILVPCQSPWNTPLLPVKKPGTNDYRPVQDLREVNKRVQDIHPTVPNPYNLLSSLPPSHTWYSVLDLKDAFFCLKLHPNSQPLFAFEWRDPEKGNTGQLTWTRLPQGFKNSPTLFNEALHRDLASFRALNPQVVMLQYVDDLLVAAPTYRDCKEGTRRLLQELSKLGYRVSAKKAQLCREEVTYLGYLLKGGKRWLTPARKATVMKIPTPTTPRQVREFLGTAGFCRLWIPGFASLAAPLYPLTRPKVPFTWTEAHQEAFGRIKEALLSAPALALPDLTKPFALYVDEKEGVARGVLTQTLGPWRRPVAYLSKKLDPVASGWPTCLKAIAAVALLLKDADKLTLGQNVLVIAPHNLESIVRQPPDRWMTNARMTHYQSLLLNERVSFAPPAILNPATLLPVESDDTPIHICSEILAEETGTRPDLRDQPLPGVPAWYTDGSSFIMDGRRQAGAAIVDNKRTVWASNLPEGTSAQKAELIALTQALRLAEGKSINIYTDSRYAFATAHVHGAIYKQRGWLTSAGKDIKNKEEILALLEAIHLPKRVAIIHCPGHQRGTDPVATGNRKADEAAKQAAQSTRILTETTKNAGKRTADGSEFEKRTADGSEFESPKKKAKVE

SEQ ID NO: 1760 - protein, 2215 aa, synthetic construct
MPAAKRVKLDGGDKKYSIGLDIGTNSVGWAVITDEYKVPSKKFKVLGNTDRHSIKKNLIGALLFDSGETAEATRLKRTARRRYTRRKNRICYLQEIFSNEMAKVDDSFFHRLEESFLVEEDKKHERHPIFGNIVDEVAYHEKYPTIYHLRKKLVDSTDKADLRLIYLALAHMIKFRGHFLIEGDLNPDNSDVDKLFIQLVQTYNQLFEENPINASGVDAKAILSARLSKSRRLENLIAQLPGEKKNGLFGNLIALSLGLTPNFKSNFDLAEDAKLQLSKDTYDDDLDNLLAQIGDQYADLFLAAKNLSDAILLSDILRVNTEITKAPLSASMIKRYDEHHQDLTLLKALVRQQLPEKYKEIFFDQSKNGYAGYIDGGASQEEFYKFIKPILEKMDGTEELLVKLNREDLLRKQRTFDNGSIPHQIHLGELHAILRRQEDFYPFLKDNREKIEKILTFRIPYYVGPLARGNSRFAWMTRKSEETITPWNFEEVVDKGASAQSFIERMTNFDKNLPNEKVLPKHSLLYEYFTVYNELTKVKYVTEGMRKPAFLSGEQKKAIVDLLFKTNRKVTVKQLKEDYFKKIECFDSVEISGVEDRFNASLGTYHDLLKIIKDKDFLDNEENEDILEDIVLTLTLFEDREMIEERLKTYAHLFDDKVMKQLKRRRYTGWGRLSRKLINGIRDKQSGKTILDFLKSDGFANRNFMQLIHDDSLTFKEDIQKAQVSGQGDSLHEHIANLAGSPAIKKGILQTVKVVDELVKVMGRHKPENIVIEMARENQTTQKGQKNSRERMKRIEEGIKELGSQILKEHPVENTQLQNEKLYLYYLQNGRDMYVDQELDINRLSDYDVDHIVPQSFLKDDSIDNKVLTRSDKARGKSDNVPSEEVVKKMKNYWRQLLNAKLITQRKFDNLTKAERGGLSELDKAGFIKRQLVETRQITKHVAQILDSRMNTKYDENDKLIREVKVITLKSKLVSDFRKDFQFYKVREINNYHHAHDAYLNAVVGTALIKKYPKLESEFVYGDYKVYDVRKMIAKSEQEIGKATAKYFFYSNIMNFFKTEITLANGEIRKRPLIETNGETGEIVWDKGRDFATVRKVLSMPQVNIVKKTEVQTGGFSKESILPKRNSDKLIARKKDWDPKKYGGFDSPTVAYSVLVVAKVEKGKSKKLKSVKELLGITIMERSSFEKNPIDFLEAKGYKEVKKDLIIKLPKYSLFELENGRKRMLASAGELQKGNELALPSKYVNFLYLASHYEKLKGSPEDNEQKQLFVEQHKHYLDEIIEQISEFSKRVILADANLDKVLSAYNKHRDKPIREQAENIIHLFTLTNLGAPAAFKYFDTTIDRKRYTSTKEVLDATLIHQSITGLYETRIDLSQLGGDGGEAAAKGGGGGTLGDQGSRGSDPLPEPRVTLTVEGIPTEFLVNTGAEHSVLTKPMGKMGSKRTVVAGATGSKVYPWTTKRLLKIGQKQVTHSFLVIPECPAPLLGRDLLTKLKAQIQFSTEGPQVTWEDRPAMCLVLNLEEEYRLHEKPVPPSIDPSWLQLFPMVWAEKAGMGLANQVPPVVVELKSDASPVAVRQYPMSKEAREGIRPHIQRFLDLGILVPCQSPWNTPLLPVKKPGTNDYRPVQDLREVNKRVQDIHPTVPNPYNLLSSLPPSHTWYSVLDLKDAFFCLKLHPNSQPLFAFEWRDPEKGNTGQLTWTRLPQGFKNSPTLFNEALHRDLASFRALNPQVVMLQYVDDLLVAAPTYRDCKEGTRRLLQELSKLGYRVSAKKAQLCREEVTYLGYLLKGGKRWLTPARKATVMKIPTPTTPRQVREFLGTAGFCRLWIPGFASLAAPLYPLTRPKVPFTWTEAHQEAFGRIKEALLSAPALALPDLTKPFALYVDEKEGVARGVLTQTLGPWRRPVAYLSKKLDPVASGWPTCLKAIAAVALLLKDADKLTLGQNVLVIAPHNLESIVRQPPDRWMTNARMTHYQSLLLNERVSFAPPAILNPATLLPVESDDTPIHICSEILAEETGTRPDLRDQPLPGVPAWYTDGSSFIMDGRRQAGAAIVDNKRTVWASNLPEGTSAQKAELIALTQALRLAEGKSINIYTDSRYAFATAHVHGAIYKQRGWLTSAGKDIKNKEEILALLEAIHLPKRVAIIHCPGHQRGTDPVATGNRKADEAAKQAAQSTRILTETTKNAGKRTADGSEFEKRTADGSEFESPKKKAKVE

SEQ ID NO: 1761 - protein, 2213 aa, synthetic construct
MPAAKRVKLDGGDKKYSIGLDIGTNSVGWAVITDEYKVPSKKFKVLGNTDRHSIKKNLIGALLFDSGETAEATRLKRTARRRYTRRKNRICYLQEIFSNEMAKVDDSFFHRLEESFLVEEDKKHERHPIFGNIVDEVAYHEKYPTIYHLRKKLVDSTDKADLRLIYLALAHMIKFRGHFLIEGDLNPDNSDVDKLFIQLVQTYNQLFEENPINASGVDAKAILSARLSKSRRLENLIAQLPGEKKNGLFGNLIALSLGLTPNFKSNFDLAEDAKLQLSKDTYDDDLDNLLAQIGDQYADLFLAAKNLSDAILLSDILRVNTEITKAPLSASMIKRYDEHHQDLTLLKALVRQQLPEKYKEIFFDQSKNGYAGYIDGGASQEEFYKFIKPILEKMDGTEELLVKLNREDLLRKQRTFDNGSIPHQIHLGELHAILRRQEDFYPFLKDNREKIEKILTFRIPYYVGPLARGNSRFAWMTRKSEETITPWNFEEVVDKGASAQSFIERMTNFDKNLPNEKVLPKHSLLYEYFTVYNELTKVKYVTEGMRKPAFLSGEQKKAIVDLLFKTNRKVTVKQLKEDYFKKIECFDSVEISGVEDRFNASLGTYHDLLKIIKDKDFLDNEENEDILEDIVLTLTLFEDREMIEERLKTYAHLFDDKVMKQLKRRRYTGWGRLSRKLINGIRDKQSGKTILDFLKSDGFANRNFMQLIHDDSLTFKEDIQKAQVSGQGDSLHEHIANLAGSPAIKKGILQTVKVVDELVKVMGRHKPENIVIEMARENQTTQKGQKNSRERMKRIEEGIKELGSQILKEHPVENTQLQNEKLYLYYLQNGRDMYVDQELDINRLSDYDVDHIVPQSFLKDDSIDNKVLTRSDKARGKSDNVPSEEVVKKMKNYWRQLLNAKLITQRKFDNLTKAERGGLSELDKAGFIKRQLVETRQITKHVAQILDSRMNTKYDENDKLIREVKVITLKSKLVSDFRKDFQFYKVREINNYHHAHDAYLNAVVGTALIKKYPKLESEFVYGDYKVYDVRKMIAKSEQEIGKATAKYFFYSNIMNFFKTEITLANGEIRKRPLIETNGETGEIVWDKGRDFATVRKVLSMPQVNIVKKTEVQTGGFSKESILPKRNSDKLIARKKDWDPKKYGGFDSPTVAYSVLVVAKVEKGKSKKLKSVKELLGITIMERSSFEKNPIDFLEAKGYKEVKKDLIIKLPKYSLFELENGRKRMLASAGELQKGNELALPSKYVNFLYLASHYEKLKGSPEDNEQKQLFVEQHKHYLDEIIEQISEFSKRVILADANLDKVLSAYNKHRDKPIREQAENIIHLFTLTNLGAPAAFKYFDTTIDRKRYTSTKEVLDATLIHQSITGLYETRIDLSQLGGDGGGGSGGGGGTLGDQGSRGSDPLPEPRVTLTVEGIPTEFLVNTGAEHSVLTKPMGKMGSKRTVVAGATGSKVYPWTTKRLLKIGQKQVTHSFLVIPECPAPLLGRDLLTKLKAQIQFSTEGPQVTWEDRPAMCLVLNLEEEYRLHEKPVPPSIDPSWLQLFPMVWAEKAGMGLANQVPPVVVELKSDASPVAVRQYPMSKEAREGIRPHIQRFLDLGILVPCQSPWNTPLLPVKKPGTNDYRPVQDLREVNKRVQDIHPTVPNPYNLLSSLPPSHTWYSVLDLKDAFFCLKLHPNSQPLFAFEWRDPEKGNTGQLTWTRLPQGFKNSPTLFNEALHRDLASFRALNPQVVMLQYVDDLLVAAPTYRDCKEGTRRLLQELSKLGYRVSAKKAQLCREEVTYLGYLLKGGKRWLTPARKATVMKIPTPTTPRQVREFLGTAGFCRLWIPGFASLAAPLYPLTRPKVPFTWTEAHQEAFGRIKEALLSAPALALPDLTKPFALYVDEKEGVARGVLTQTLGPWRRPVAYLSKKLDPVASGWPTCLKAIAAVALLLKDADKLTLGQNVLVIAPHNLESIVRQPPDRWMTNARMTHYQSLLLNERVSFAPPAILNPATLLPVESDDTPIHICSEILAEETGTRPDLRDQPLPGVPAWYTDGSSFIMDGRRQAGAAIVDNKRTVWASNLPEGTSAQKAELIALTQALRLAEGKSINIYTDSRYAFATAHVHGAIYKQRGWLTSAGKDIKNKEEILALLEAIHLPKRVAIIHCPGHQRGTDPVATGNRKADEAAKQAAQSTRILTETTKNAGKRTADGSEFEKRTADGSEFESPKKKAKVE

SEQ ID NO: 1762 - protein, 2218 aa, synthetic construct
MPAAKRVKLDGGDKKYSIGLDIGTNSVGWAVITDEYKVPSKKFKVLGNTDRHSIKKNLIGALLFDSGETAEATRLKRTARRRYTRRKNRICYLQEIFSNEMAKVDDSFFHRLEESFLVEEDKKHERHPIFGNIVDEVAYHEKYPTIYHLRKKLVDSTDKADLRLIYLALAHMIKFRGHFLIEGDLNPDNSDVDKLFIQLVQTYNQLFEENPINASGVDAKAILSARLSKSRRLENLIAQLPGEKKNGLFGNLIALSLGLTPNFKSNFDLAEDAKLQLSKDTYDDDLDNLLAQIGDQYADLFLAAKNLSDAILLSDILRVNTEITKAPLSASMIKRYDEHHQDLTLLKALVRQQLPEKYKEIFFDQSKNGYAGYIDGGASQEEFYKFIKPILEKMDGTEELLVKLNREDLLRKQRTFDNGSIPHQIHLGELHAILRRQEDFYPFLKDNREKIEKILTFRIPYYVGPLARGNSRFAWMTRKSEETITPWNFEEVVDKGASAQSFIERMTNFDKNLPNEKVLPKHSLLYEYFTVYNELTKVKYVTEGMRKPAFLSGEQKKAIVDLLFKTNRKVTVKQLKEDYFKKIECFDSVEISGVEDRFNASLGTYHDLLKIIKDKDFLDNEENEDILEDIVLTLTLFEDREMIEERLKTYAHLFDDKVMKQLKRRRYTGWGRLSRKLINGIRDKQSGKTILDFLKSDGFANRNFMQLIHDDSLTFKEDIQKAQVSGQGDSLHEHIANLAGSPAIKKGILQTVKVVDELVKVMGRHKPENIVIEMARENQTTQKGQKNSRERMKRIEEGIKELGSQILKEHPVENTQLQNEKLYLYYLQNGRDMYVDQELDINRLSDYDVDHIVPQSFLKDDSIDNKVLTRSDKARGKSDNVPSEEVVKKMKNYWRQLLNAKLITQRKFDNLTKAERGGLSELDKAGFIKRQLVETRQITKHVAQILDSRMNTKYDENDKLIREVKVITLKSKLVSDFRKDFQFYKVREINNYHHAHDAYLNAVVGTALIKKYPKLESEFVYGDYKVYDVRKMIAKSEQEIGKATAKYFFYSNIMNFFKTEITLANGEIRKRPLIETNGETGEIVWDKGRDFATVRKVLSMPQVNIVKKTEVQTGGFSKESILPKRNSDKLIARKKDWDPKKYGGFDSPTVAYSVLVVAKVEKGKSKKLKSVKELLGITIMERSSFEKNPIDFLEAKGYKEVKKDLIIKLPKYSLFELENGRKRMLASAGELQKGNELALPSKYVNFLYLASHYEKLKGSPEDNEQKQLFVEQHKHYLDEIIEQISEFSKRVILADANLDKVLSAYNKHRDKPIREQAENIIHLFTLTNLGAPAAFKYFDTTIDRKRYTSTKEVLDATLIHQSITGLYETRIDLSQLGGDGGPAPEAAAKGSSGGTLGDQGSRGSDPLPEPRVTLTVEGIPTEFLVNTGAEHSVLTKPMGKMGSKRTVVAGATGSKVYPWTTKRLLKIGQKQVTHSFLVIPECPAPLLGRDLLTKLKAQIQFSTEGPQVTWEDRPAMCLVLNLEEEYRLHEKPVPPSIDPSWLQLFPMVWAEKAGMGLANQVPPVVVELKSDASPVAVRQYPMSKEAREGIRPHIQRFLDLGILVPCQSPWNTPLLPVKKPGTNDYRPVQDLREVNKRVQDIHPTVPNPYNLLSSLPPSHTWYSVLDLKDAFFCLKLHPNSQPLFAFEWRDPEKGNTGQLTWTRLPQGFKNSPTLFNEALHRDLASFRALNPQVVMLQYVDDLLVAAPTYRDCKEGTRRLLQELSKLGYRVSAKKAQLCREEVTYLGYLLKGGKRWLTPARKATVMKIPTPTTPRQVREFLGTAGFCRLWIPGFASLAAPLYPLTRPKVPFTWTEAHQEAFGRIKEALLSAPALALPDLTKPFALYVDEKEGVARGVLTQTLGPWRRPVAYLSKKLDPVASGWPTCLKAIAAVALLLKDADKLTLGQNVLVIAPHNLESIVRQPPDRWMTNARMTHYQSLLLNERVSFAPPAILNPATLLPVESDDTPIHICSEILAEETGTRPDLRDQPLPGVPAWYTDGSSFIMDGRRQAGAAIVDNKRTVWASNLPEGTSAQKAELIALTQALRLAEGKSINIYTDSRYAFATAHVHGAIYKQRGWLTSAGKDIKNKEEILALLEAIHLPKRVAIIHCPGHQRGTDPVATGNRKADEAAKQAAQSTRILTETTKNAGKRTADGSEFEKRTADGSEFESPKKKAKVE

SEQ ID NO: 1763 - protein, 2215 aa, synthetic construct
MPAAKRVKLDGGDKKYSIGLDIGTNSVGWAVITDEYKVPSKKFKVLGNTDRHSIKKNLIGALLFDSGETAEATRLKRTARRRYTRRKNRICYLQEIFSNEMAKVDDSFFHRLEESFLVEEDKKHERHPIFGNIVDEVAYHEKYPTIYHLRKKLVDSTDKADLRLIYLALAHMIKFRGHFLIEGDLNPDNSDVDKLFIQLVQTYNQLFEENPINASGVDAKAILSARLSKSRRLENLIAQLPGEKKNGLFGNLIALSLGLTPNFKSNFDLAEDAKLQLSKDTYDDDLDNLLAQIGDQYADLFLAAKNLSDAILLSDILRVNTEITKAPLSASMIKRYDEHHQDLTLLKALVRQQLPEKYKEIFFDQSKNGYAGYIDGGASQEEFYKFIKPILEKMDGTEELLVKLNREDLLRKQRTFDNGSIPHQIHLGELHAILRRQEDFYPFLKDNREKIEKILTFRIPYYVGPLARGNSRFAWMTRKSEETITPWNFEEVVDKGASAQSFIERMTNFDKNLPNEKVLPKHSLLYEYFTVYNELTKVKYVTEGMRKPAFLSGEQKKAIVDLLFKTNRKVTVKQLKEDYFKKIECFDSVEISGVEDRFNASLGTYHDLLKIIKDKDFLDNEENEDILEDIVLTLTLFEDREMIEERLKTYAHLFDDKVMKQLKRRRYTGWGRLSRKLINGIRDKQSGKTILDFLKSDGFANRNFMQLIHDDSLTFKEDIQKAQVSGQGDSLHEHIANLAGSPAIKKGILQTVKVVDELVKVMGRHKPENIVIEMARENQTTQKGQKNSRERMKRIEEGIKELGSQILKEHPVENTQLQNEKLYLYYLQNGRDMYVDQELDINRLSDYDVDHIVPQSFLKDDSIDNKVLTRSDKARGKSDNVPSEEVVKKMKNYWRQLLNAKLITQRKFDNLTKAERGGLSELDKAGFIKRQLVETRQITKHVAQILDSRMNTKYDENDKLIREVKVITLKSKLVSDFRKDFQFYKVREINNYHHAHDAYLNAVVGTALIKKYPKLESEFVYGDYKVYDVRKMIAKSEQEIGKATAKYFFYSNIMNFFKTEITLANGEIRKRPLIETNGETGEIVWDKGRDFATVRKVLSMPQVNIVKKTEVQTGGFSKESILPKRNSDKLIARKKDWDPKKYGGFDSPTVAYSVLVVAKVEKGKSKKLKSVKELLGITIMERSSFEKNPIDFLEAKGYKEVKKDLIIKLPKYSLFELENGRKRMLASAGELQKGNELALPSKYVNFLYLASHYEKLKGSPEDNEQKQLFVEQHKHYLDEIIEQISEFSKRVILADANLDKVLSAYNKHRDKPIREQAENIIHLFTLTNLGAPAAFKYFDTTIDRKRYTSTKEVLDATLIHQSITGLYETRIDLSQLGGDGGEAAAKGGSGGTLGDQGSRGSDPLPEPRVTLTVEGIPTEFLVNTGAEHSVLTKPMGKMGSKRTVVAGATGSKVYPWTTKRLLKIGQKQVTHSFLVIPECPAPLLGRDLLTKLKAQIQFSTEGPQVTWEDRPAMCLVLNLEEEYRLHEKPVPPSIDPSWLQLFPMVWAEKAGMGLANQVPPVVVELKSDASPVAVRQYPMSKEAREGIRPHIQRFLDLGILVPCQSPWNTPLLPVKKPGTNDYRPVQDLREVNKRVQDIHPTVPNPYNLLSSLPPSHTWYSVLDLKDAFFCLKLHPNSQPLFAFEWRDPEKGNTGQLTWTRLPQGFKNSPTLFNEALHRDLASFRALNPQVVMLQYVDDLLVAAPTYRDCKEGTRRLLQELSKLGYRVSAKKAQLCREEVTYLGYLLKGGKRWLTPARKATVMKIPTPTTPRQVREFLGTAGFCRLWIPGFASLAAPLYPLTRPKVPFTWTEAHQEAFGRIKEALLSAPALALPDLTKPFALYVDEKEGVARGVLTQTLGPWRRPVAYLSKKLDPVASGWPTCLKAIAAVALLLKDADKLTLGQNVLVIAPHNLESIVRQPPDRWMTNARMTHYQSLLLNERVSFAPPAILNPATLLPVESDDTPIHICSEILAEETGTRPDLRDQPLPGVPAWYTDGSSFIMDGRRQAGAAIVDNKRTVWASNLPEGTSAQKAELIALTQALRLAEGKSINIYTDSRYAFATAHVHGAIYKQRGWLTSAGKDIKNKEEILALLEAIHLPKRVAIIHCPGHQRGTDPVATGNRKADEAAKQAAQSTRILTETTKNAGKRTADGSEFEKRTADGSEFESPKKKAKVE

SEQ ID NO: 1764 - protein, 2216 aa, synthetic construct
MPAAKRVKLDGGDKKYSIGLDIGTNSVGWAVITDEYKVPSKKFKVLGNTDRHSIKKNLIGALLFDSGETAEATRLKRTARRRYTRRKNRICYLQEIFSNEMAKVDDSFFHRLEESFLVEEDKKHERHPIFGNIVDEVAYHEKYPTIYHLRKKLVDSTDKADLRLIYLALAHMIKFRGHFLIEGDLNPDNSDVDKLFIQLVQTYNQLFEENPINASGVDAKAILSARLSKSRRLENLIAQLPGEKKNGLFGNLIALSLGLTPNFKSNFDLAEDAKLQLSKDTYDDDLDNLLAQIGDQYADLFLAAKNLSDAILLSDILRVNTEITKAPLSASMIKRYDEHHQDLTLLKALVRQQLPEKYKEIFFDQSKNGYAGYIDGGASQEEFYKFIKPILEKMDGTEELLVKLNREDLLRKQRTFDNGSIPHQIHLGELHAILRRQEDFYPFLKDNREKIEKILTFRIPYYVGPLARGNSRFAWMTRKSEETITPWNFEEVVDKGASAQSFIERMTNFDKNLPNEKVLPKHSLLYEYFTVYNELTKVKYVTEGMRKPAFLSGEQKKAIVDLLFKTNRKVTVKQLKEDYFKKIECFDSVEISGVEDRFNASLGTYHDLLKIIKDKDFLDNEENEDILEDIVLTLTLFEDREMIEERLKTYAHLFDDKVMKQLKRRRYTGWGRLSRKLINGIRDKQSGKTILDFLKSDGFANRNFMQLIHDDSLTFKEDIQKAQVSGQGDSLHEHIANLAGSPAIKKGILQTVKVVDELVKVMGRHKPENIVIEMARENQTTQKGQKNSRERMKRIEEGIKELGSQILKEHPVENTQLQNEKLYLYYLQNGRDMYVDQELDINRLSDYDVDHIVPQSFLKDDSIDNKVLTRSDKARGKSDNVPSEEVVKKMKNYWRQLLNAKLITQRKFDNLTKAERGGLSELDKAGFIKRQLVETRQITKHVAQILDSRMNTKYDENDKLIREVKVITLKSKLVSDFRKDFQFYKVREINNYHHAHDAYLNAVVGTALIKKYPKLESEFVYGDYKVYDVRKMIAKSEQEIGKATAKYFFYSNIMNFFKTEITLANGEIRKRPLIETNGETGEIVWDKGRDFATVRKVLSMPQVNIVKKTEVQTGGFSKESILPKRNSDKLIARKKDWDPKKYGGFDSPTVAYSVLVVAKVEKGKSKKLKSVKELLGITIMERSSFEKNPIDFLEAKGYKEVKKDLIIKLPKYSLFELENGRKRMLASAGELQKGNELALPSKYVNFLYLASHYEKLKGSPEDNEQKQLFVEQHKHYLDEIIEQISEFSKRVILADANLDKVLSAYNKHRDKPIREQAENIIHLFTLTNLGAPAAFKYFDTTIDRKRYTSTKEVLDATLIHQSITGLYETRIDLSQLGGDGGGGGGSSGGSGGTLGDQGSRGSDPLPEPRVTLTVEGIPTEFLVNTGAEHSVLTKPMGKMGSKRTVVAGATGSKVYPWTTKRLLKIGQKQVTHSFLVIPECPAPLLGRDLLTKLKAQIQFSTEGPQVTWEDRPAMCLVLNLEEEYRLHEKPVPPSIDPSWLQLFPMVWAEKAGMGLANQVPPVVVELKSDASPVAVRQYPMSKEAREGIRPHIQRFLDLGILVPCQSPWNTPLLPVKKPGTNDYRPVQDLREVNKRVQDIHPTVPNPYNLLSSLPPSHTWYSVLDLKDAFFCLKLHPNSQPLFAFEWRDPEKGNTGQLTWTRLPQGFKNSPTLFNEALHRDLASFRALNPQVVMLQYVDDLLVAAPTYRDCKEGTRRLLQELSKLGYRVSAKKAQLCREEVTYLGYLLKGGKRWLTPARKATVMKIPTPTTPRQVREFLGTAGFCRLWIPGFASLAAPLYPLTRPKVPFTWTEAHQEAFGRIKEALLSAPALALPDLTKPFALYVDEKEGVARGVLTQTLGPWRRPVAYLSKKLDPVASGWPTCLKAIAAVALLLKDADKLTLGQNVLVIAPHNLESIVRQPPDRWMTNARMTHYQSLLLNERVSFAPPAILNPATLLPVESDDTPIHICSEILAEETGTRPDLRDQPLPGVPAWYTDGSSFIMDGRRQAGAAIVDNKRTVWASNLPEGTSAQKAELIALTQALRLAEGKSINIYTDSRYAFATAHVHGAIYKQRGWLTSAGKDIKNKEEILALLEAIHLPKRVAIIHCPGHQRGTDPVATGNRKADEAAKQAAQSTRILTETTKNAGKRTADGSEFEKRTADGSEFESPKKKAKVE

SEQ ID NO: 1765 - protein, 2216 aa, synthetic construct
MPAAKRVKLDGGDKKYSIGLDIGTNSVGWAVITDEYKVPSKKFKVLGNTDRHSIKKNLIGALLFDSGETAEATRLKRTARRRYTRRKNRICYLQEIFSNEMAKVDDSFFHRLEESFLVEEDKKHERHPIFGNIVDEVAYHEKYPTIYHLRKKLVDSTDKADLRLIYLALAHMIKFRGHFLIEGDLNPDNSDVDKLFIQLVQTYNQLFEENPINASGVDAKAILSARLSKSRRLENLIAQLPGEKKNGLFGNLIALSLGLTPNFKSNFDLAEDAKLQLSKDTYDDDLDNLLAQIGDQYADLFLAAKNLSDAILLSDILRVNTEITKAPLSASMIKRYDEHHQDLTLLKALVRQQLPEKYKEIFFDQSKNGYAGYIDGGASQEEFYKFIKPILEKMDGTEELLVKLNREDLLRKQRTFDNGSIPHQIHLGELHAILRRQEDFYPFLKDNREKIEKILTFRIPYYVGPLARGNSRFAWMTRKSEETITPWNFEEVVDKGASAQSFIERMTNFDKNLPNEKVLPKHSLLYEYFTVYNELTKVKYVTEGMRKPAFLSGEQKKAIVDLLFKTNRKVTVKQLKEDYFKKIECFDSVEISGVEDRFNASLGTYHDLLKIIKDKDFLDNEENEDILEDIVLTLTLFEDREMIEERLKTYAHLFDDKVMKQLKRRRYTGWGRLSRKLINGIRDKQSGKTILDFLKSDGFANRNFMQLIHDDSLTFKEDIQKAQVSGQGDSLHEHIANLAGSPAIKKGILQTVKVVDELVKVMGRHKPENIVIEMARENQTTQKGQKNSRERMKRIEEGIKELGSQILKEHPVENTQLQNEKLYLYYLQNGRDMYVDQELDINRLSDYDVDHIVPQSFLKDDSIDNKVLTRSDKARGKSDNVPSEEVVKKMKNYWRQLLNAKLITQRKFDNLTKAERGGLSELDKAGFIKRQLVETRQITKHVAQILDSRMNTKYDENDKLIREVKVITLKSKLVSDFRKDFQFYKVREINNYHHAHDAYLNAVVGTALIKKYPKLESEFVYGDYKVYDVRKMIAKSEQEIGKATAKYFFYSNIMNFFKTEITLANGEIRKRPLIETNGETGEIVWDKGRDFATVRKVLSMPQVNIVKKTEVQTGGFSKESILPKRNSDKLIARKKDWDPKKYGGFDSPTVAYSVLVVAKVEKGKSKKLKSVKELLGITIMERSSFEKNPIDFLEAKGYKEVKKDLIIKLPKYSLFELENGRKRMLASAGELQKGNELALPSKYVNFLYLASHYEKLKGSPEDNEQKQLFVEQHKHYLDEIIEQISEFSKRVILADANLDKVLSAYNKHRDKPIREQAENIIHLFTLTNLGAPAAFKYFDTTIDRKRYTSTKEVLDATLIHQSITGLYETRIDLSQLGGDGGPAPGSSGGSGGTLGDQGSRGSDPLPEPRVTLTVEGIPTEFLVNTGAEHSVLTKPMGKMGSKRTVVAGATGSKVYPWTTKRLLKIGQKQVTHSFLVIPECPAPLLGRDLLTKLKAQIQFSTEGPQVTWEDRPAMCLVLNLEEEYRLHEKPVPPSIDPSWLQLFPMVWAEKAGMGLANQVPPVVVELKSDASPVAVRQYPMSKEAREGIRPHIQRFLDLGILVPCQSPWNTPLLPVKKPGTNDYRPVQDLREVNKRVQDIHPTVPNPYNLLSSLPPSHTWYSVLDLKDAFFCLKLHPNSQPLFAFEWRDPEKGNTGQLTWTRLPQGFKNSPTLFNEALHRDLASFRALNPQVVMLQYVDDLLVAAPTYRDCKEGTRRLLQELSKLGYRVSAKKAQLCREEVTYLGYLLKGGKRWLTPARKATVMKIPTPTTPRQVREFLGTAGFCRLWIPGFASLAAPLYPLTRPKVPFTWTEAHQEAFGRIKEALLSAPALALPDLTKPFALYVDEKEGVARGVLTQTLGPWRRPVAYLSKKLDPVASGWPTCLKAIAAVALLLKDADKLTLGQNVLVIAPHNLESIVRQPPDRWMTNARMTHYQSLLLNERVSFAPPAILNPATLLPVESDDTPIHICSEILAEETGTRPDLRDQPLPGVPAWYTDGSSFIMDGRRQAGAAIVDNKRTVWASNLPEGTSAQKAELIALTQALRLAEGKSINIYTDSRYAFATAHVHGAIYKQRGWLTSAGKDIKNKEEILALLEAIHLPKRVAIIHCPGHQRGTDPVATGNRKADEAAKQAAQSTRILTETTKNAGKRTADGSEFEKRTADGSEFESPKKKAKVE

SEQ ID NO: 1766 - protein, 2216 aa, synthetic construct
MPAAKRVKLDGGDKKYSIGLDIGTNSVGWAVITDEYKVPSKKFKVLGNTDRHSIKKNLIGALLFDSGETAEATRLKRTARRRYTRRKNRICYLQEIFSNEMAKVDDSFFHRLEESFLVEEDKKHERHPIFGNIVDEVAYHEKYPTIYHLRKKLVDSTDKADLRLIYLALAHMIKFRGHFLIEGDLNPDNSDVDKLFIQLVQTYNQLFEENPINASGVDAKAILSARLSKSRRLENLIAQLPGEKKNGLFGNLIALSLGLTPNFKSNFDLAEDAKLQLSKDTYDDDLDNLLAQIGDQYADLFLAAKNLSDAILLSDILRVNTEITKAPLSASMIKRYDEHHQDLTLLKALVRQQLPEKYKEIFFDQSKNGYAGYIDGGASQEEFYKFIKPILEKMDGTEELLVKLNREDLLRKQRTFDNGSIPHQIHLGELHAILRRQEDFYPFLKDNREKIEKILTFRIPYYVGPLARGNSRFAWMTRKSEETITPWNFEEVVDKGASAQSFIERMTNFDKNLPNEKVLPKHSLLYEYFTVYNELTKVKYVTEGMRKPAFLSGEQKKAIVDLLFKTNRKVTVKQLKEDYFKKIECFDSVEISGVEDRFNASLGTYHDLLKIIKDKDFLDNEENEDILEDIVLTLTLFEDREMIEERLKTYAHLFDDKVMKQLKRRRYTGWGRLSRKLINGIRDKQSGKTILDFLKSDGFANRNFMQLIHDDSLTFKEDIQKAQVSGQGDSLHEHIANLAGSPAIKKGILQTVKVVDELVKVMGRHKPENIVIEMARENQTTQKGQKNSRERMKRIEEGIKELGSQILKEHPVENTQLQNEKLYLYYLQNGRDMYVDQELDINRLSDYDVDHIVPQSFLKDDSIDNKVLTRSDKARGKSDNVPSEEVVKKMKNYWRQLLNAKLITQRKFDNLTKAERGGLSELDKAGFIKRQLVETRQITKHVAQILDSRMNTKYDENDKLIREVKVITLKSKLVSDFRKDFQFYKVREINNYHHAHDAYLNAVVGTALIKKYPKLESEFVYGDYKVYDVRKMIAKSEQEIGKATAKYFFYSNIMNFFKTEITLANGEIRKRPLIETNGETGEIVWDKGRDFATVRKVLSMPQVNIVKKTEVQTGGFSKESILPKRNSDKLIARKKDWDPKKYGGFDSPTVAYSVLVVAKVEKGKSKKLKSVKELLGITIMERSSFEKNPIDFLEAKGYKEVKKDLIIKLPKYSLFELENGRKRMLASAGELQKGNELALPSKYVNFLYLASHYEKLKGSPEDNEQKQLFVEQHKHYLDEIIEQISEFSKRVILADANLDKVLSAYNKHRDKPIREQAENIIHLFTLTNLGAPAAFKYFDTTIDRKRYTSTKEVLDATLIHQSITGLYETRIDLSQLGGDGGGGSGGSGGSGGTLGDQGSRGSDPLPEPRVTLTVEGIPTEFLVNTGAEHSVLTKPMGKMGSKRTVVAGATGSKVYPWTTKRLLKIGQKQVTHSFLVIPECPAPLLGRDLLTKLKAQIQFSTEGPQVTWEDRPAMCLVLNLEEEYRLHEKPVPPSIDPSWLQLFPMVWAEKAGMGLANQVPPVVVELKSDASPVAVRQYPMSKEAREGIRPHIQRFLDLGILVPCQSPWNTPLLPVKKPGTNDYRPVQDLREVNKRVQDIHPTVPNPYNLLSSLPPSHTWYSVLDLKDAFFCLKLHPNSQPLFAFEWRDPEKGNTGQLTWTRLPQGFKNSPTLFNEALHRDLASFRALNPQVVMLQYVDDLLVAAPTYRDCKEGTRRLLQELSKLGYRVSAKKAQLCREEVTYLGYLLKGGKRWLTPARKATVMKIPTPTTPRQVREFLGTAGFCRLWIPGFASLAAPLYPLTRPKVPFTWTEAHQEAFGRIKEALLSAPALALPDLTKPFALYVDEKEGVARGVLTQTLGPWRRPVAYLSKKLDPVASGWPTCLKAIAAVALLLKDADKLTLGQNVLVIAPHNLESIVRQPPDRWMTNARMTHYQSLLLNERVSFAPPAILNPATLLPVESDDTPIHICSEILAEETGTRPDLRDQPLPGVPAWYTDGSSFIMDGRRQAGAAIVDNKRTVWASNLPEGTSAQKAELIALTQALRLAEGKSINIYTDSRYAFATAHVHGAIYKQRGWLTSAGKDIKNKEEILALLEAIHLPKRVAIIHCPGHQRGTDPVATGNRKADEAAKQAAQSTRILTETTKNAGKRTADGSEFEKRTADGSEFESPKKKAKVE

SEQ ID NO: 1767 - protein, 2222 aa, synthetic construct
MPAAKRVKLDGGDKKYSIGLDIGTNSVGWAVITDEYKVPSKKFKVLGNTDRHSIKKNLIGALLFDSGETAEATRLKRTARRRYTRRKNRICYLQEIFSNEMAKVDDSFFHRLEESFLVEEDKKHERHPIFGNIVDEVAYHEKYPTIYHLRKKLVDSTDKADLRLIYLALAHMIKFRGHFLIEGDLNPDNSDVDKLFIQLVQTYNQLFEENPINASGVDAKAILSARLSKSRRLENLIAQLPGEKKNGLFGNLIALSLGLTPNFKSNFDLAEDAKLQLSKDTYDDDLDNLLAQIGDQYADLFLAAKNLSDAILLSDILRVNTEITKAPLSASMIKRYDEHHQDLTLLKALVRQQLPEKYKEIFFDQSKNGYAGYIDGGASQEEFYKFIKPILEKMDGTEELLVKLNREDLLRKQRTFDNGSIPHQIHLGELHAILRRQEDFYPFLKDNREKIEKILTFRIPYYVGPLARGNSRFAWMTRKSEETITPWNFEEVVDKGASAQSFIERMTNFDKNLPNEKVLPKHSLLYEYFTVYNELTKVKYVTEGMRKPAFLSGEQKKAIVDLLFKTNRKVTVKQLKEDYFKKIECFDSVEISGVEDRFNASLGTYHDLLKIIKDKDFLDNEENEDILEDIVLTLTLFEDREMIEERLKTYAHLFDDKVMKQLKRRRYTGWGRLSRKLINGIRDKQSGKTILDFLKSDGFANRNFMQLIHDDSLTFKEDIQKAQVSGQGDSLHEHIANLAGSPAIKKGILQTVKVVDELVKVMGRHKPENIVIEMARENQTTQKGQKNSRERMKRIEEGIKELGSQILKEHPVENTQLQNEKLYLYYLQNGRDMYVDQELDINRLSDYDVDHIVPQSFLKDDSIDNKVLTRSDKARGKSDNVPSEEVVKKMKNYWRQLLNAKLITQRKFDNLTKAERGGLSELDKAGFIKRQLVETRQITKHVAQILDSRMNTKYDENDKLIREVKVITLKSKLVSDFRKDFQFYKVREINNYHHAHDAYLNAVVGTALIKKYPKLESEFVYGDYKVYDVRKMIAKSEQEIGKATAKYFFYSNIMNFFKTEITLANGEIRKRPLIETNGETGEIVWDKGRDFATVRKVLSMPQVNIVKKTEVQTGGFSKESILPKRNSDKLIARKKDWDPKKYGGFDSPTVAYSVLVVAKVEKGKSKKLKSVKELLGITIMERSSFEKNPIDFLEAKGYKEVKKDLIIKLPKYSLFELENGRKRMLASAGELQKGNELALPSKYVNFLYLASHYEKLKGSPEDNEQKQLFVEQHKHYLDEIIEQISEFSKRVILADANLDKVLSAYNKHRDKPIREQAENIIHLFTLTNLGAPAAFKYFDTTIDRKRYTSTKEVLDATLIHQSITGLYETRIDLSQLGGDGGGGGGSEAAAKGGGGSGGTLGDQGSRGSDPLPEPRVTLTVEGIPTEFLVNTGAEHSVLTKPMGKMGSKRTVVAGATGSKVYPWTTKRLLKIGQKQVTHSFLVIPECPAPLLGRDLLTKLKAQIQFSTEGPQVTWEDRPAMCLVLNLEEEYRLHEKPVPPSIDPSWLQLFPMVWAEKAGMGLANQVPPVVVELKSDASPVAVRQYPMSKEAREGIRPHIQRFLDLGILVPCQSPWNTPLLPVKKPGTNDYRPVQDLREVNKRVQDIHPTVPNPYNLLSSLPPSHTWYSVLDLKDAFFCLKLHPNSQPLFAFEWRDPEKGNTGQLTWTRLPQGFKNSPTLFNEALHRDLASFRALNPQVVMLQYVDDLLVAAPTYRDCKEGTRRLLQELSKLGYRVSAKKAQLCREEVTYLGYLLKGGKRWLTPARKATVMKIPTPTTPRQVREFLGTAGFCRLWIPGFASLAAPLYPLTRPKVPFTWTEAHQEAFGRIKEALLSAPALALPDLTKPFALYVDEKEGVARGVLTQTLGPWRRPVAYLSKKLDPVASGWPTCLKAIAAVALLLKDADKLTLGQNVLVIAPHNLESIVRQPPDRWMTNARMTHYQSLLLNERVSFAPPAILNPATLLPVESDDTPIHICSEILAEETGTRPDLRDQPLPGVPAWYTDGSSFIMDGRRQAGAAIVDNKRTVWASNLPEGTSAQKAELIALTQALRLAEGKSINIYTDSRYAFATAHVHGAIYKQRGWLTSAGKDIKNKEEILALLEAIHLPKRVAIIHCPGHQRGTDPVATGNRKADEAAKQAAQSTRILTETTKNAGKRTADGSEFEKRTADGSEFESPKKKAKVE

SEQ ID NO: 1768 - protein, 2213 aa, synthetic construct
MPAAKRVKLDGGDKKYSIGLDIGTNSVGWAVITDEYKVPSKKFKVLGNTDRHSIKKNLIGALLFDSGETAEATRLKRTARRRYTRRKNRICYLQEIFSNEMAKVDDSFFHRLEESFLVEEDKKHERHPIFGNIVDEVAYHEKYPTIYHLRKKLVDSTDKADLRLIYLALAHMIKFRGHFLIEGDLNPDNSDVDKLFIQLVQTYNQLFEENPINASGVDAKAILSARLSKSRRLENLIAQLPGEKKNGLFGNLIALSLGLTPNFKSNFDLAEDAKLQLSKDTYDDDLDNLLAQIGDQYADLFLAAKNLSDAILLSDILRVNTEITKAPLSASMIKRYDEHHQDLTLLKALVRQQLPEKYKEIFFDQSKNGYAGYIDGGASQEEFYKFIKPILEKMDGTEELLVKLNREDLLRKQRTFDNGSIPHQIHLGELHAILRRQEDFYPFLKDNREKIEKILTFRIPYYVGPLARGNSRFAWMTRKSEETITPWNFEEVVDKGASAQSFIERMTNFDKNLPNEKVLPKHSLLYEYFTVYNELTKVKYVTEGMRKPAFLSGEQKKAIVDLLFKTNRKVTVKQLKEDYFKKIECFDSVEISGVEDRFNASLGTYHDLLKIIKDKDFLDNEENEDILEDIVLTLTLFEDREMIEERLKTYAHLFDDKVMKQLKRRRYTGWGRLSRKLINGIRDKQSGKTILDFLKSDGFANRNFMQLIHDDSLTFKEDIQKAQVSGQGDSLHEHIANLAGSPAIKKGILQTVKVVDELVKVMGRHKPENIVIEMARENQTTQKGQKNSRERMKRIEEGIKELGSQILKEHPVENTQLQNEKLYLYYLQNGRDMYVDQELDINRLSDYDVDHIVPQSFLKDDSIDNKVLTRSDKARGKSDNVPSEEVVKKMKNYWRQLLNAKLITQRKFDNLTKAERGGLSELDKAGFIKRQLVETRQITKHVAQILDSRMNTKYDENDKLIREVKVITLKSKLVSDFRKDFQFYKVREINNYHHAHDAYLNAVVGTALIKKYPKLESEFVYGDYKVYDVRKMIAKSEQEIGKATAKYFFYSNIMNFFKTEITLANGEIRKRPLIETNGETGEIVWDKGRDFATVRKVLSMPQVNIVKKTEVQTGGFSKESILPKRNSDKLIARKKDWDPKKYGGFDSPTVAYSVLVVAKVEKGKSKKLKSVKELLGITIMERSSFEKNPIDFLEAKGYKEVKKDLIIKLPKYSLFELENGRKRMLASAGELQKGNELALPSKYVNFLYLASHYEKLKGSPEDNEQKQLFVEQHKHYLDEIIEQISEFSKRVILADANLDKVLSAYNKHRDKPIREQAENIIHLFTLTNLGAPAAFKYFDTTIDRKRYTSTKEVLDATLIHQSITGLYETRIDLSQLGGDGGGGSGSSGGTLGDQGSRGSDPLPEPRVTLTVEGIPTEFLVNTGAEHSVLTKPMGKMGSKRTVVAGATGSKVYPWTTKRLLKIGQKQVTHSFLVIPECPAPLLGRDLLTKLKAQIQFSTEGPQVTWEDRPAMCLVLNLEEEYRLHEKPVPPSIDPSWLQLFPMVWAEKAGMGLANQVPPVVVELKSDASPVAVRQYPMSKEAREGIRPHIQRFLDLGILVPCQSPWNTPLLPVKKPGTNDYRPVQDLREVNKRVQDIHPTVPNPYNLLSSLPPSHTWYSVLDLKDAFFCLKLHPNSQPLFAFEWRDPEKGNTGQLTWTRLPQGFKNSPTLFNEALHRDLASFRALNPQVVMLQYVDDLLVAAPTYRDCKEGTRRLLQELSKLGYRVSAKKAQLCREEVTYLGYLLKGGKRWLTPARKATVMKIPTPTTPRQVREFLGTAGFCRLWIPGFASLAAPLYPLTRPKVPFTWTEAHQEAFGRIKEALLSAPALALPDLTKPFALYVDEKEGVARGVLTQTLGPWRRPVAYLSKKLDPVASGWPTCLKAIAAVALLLKDADKLTLGQNVLVIAPHNLESIVRQPPDRWMTNARMTHYQSLLLNERVSFAPPAILNPATLLPVESDDTPIHICSEILAEETGTRPDLRDQPLPGVPAWYTDGSSFIMDGRRQAGAAIVDNKRTVWASNLPEGTSAQKAELIALTQALRLAEGKSINIYTDSRYAFATAHVHGAIYKQRGWLTSAGKDIKNKEEILALLEAIHLPKRVAIIHCPGHQRGTDPVATGNRKADEAAKQAAQSTRILTETTKNAGKRTADGSEFEKRTADGSEFESPKKKAKVE

SEQ ID NO: 1769 - protein, 2218 aa, synthetic construct
MPAAKRVKLDGGDKKYSIGLDIGTNSVGWAVITDEYKVPSKKFKVLGNTDRHSIKKNLIGALLFDSGETAEATRLKRTARRRYTRRKNRICYLQEIFSNEMAKVDDSFFHRLEESFLVEEDKKHERHPIFGNIVDEVAYHEKYPTIYHLRKKLVDSTDKADLRLIYLALAHMIKFRGHFLIEGDLNPDNSDVDKLFIQLVQTYNQLFEENPINASGVDAKAILSARLSKSRRLENLIAQLPGEKKNGLFGNLIALSLGLTPNFKSNFDLAEDAKLQLSKDTYDDDLDNLLAQIGDQYADLFLAAKNLSDAILLSDILRVNTEITKAPLSASMIKRYDEHHQDLTLLKALVRQQLPEKYKEIFFDQSKNGYAGYIDGGASQEEFYKFIKPILEKMDGTEELLVKLNREDLLRKQRTFDNGSIPHQIHLGELHAILRRQEDFYPFLKDNREKIEKILTFRIPYYVGPLARGNSRFAWMTRKSEETITPWNFEEVVDKGASAQSFIERMTNFDKNLPNEKVLPKHSLLYEYFTVYNELTKVKYVTEGMRKPAFLSGEQKKAIVDLLFKTNRKVTVKQLKEDYFKKIECFDSVEISGVEDRFNASLGTYHDLLKIIKDKDFLDNEENEDILEDIVLTLTLFEDREMIEERLKTYAHLFDDKVMKQLKRRRYTGWGRLSRKLINGIRDKQSGKTILDFLKSDGFANRNFMQLIHDDSLTFKEDIQKAQVSGQGDSLHEHIANLAGSPAIKKGILQTVKVVDELVKVMGRHKPENIVIEMARENQTTQKGQKNSRERMKRIEEGIKELGSQILKEHPVENTQLQNEKLYLYYLQNGRDMYVDQELDINRLSDYDVDHIVPQSFLKDDSIDNKVLTRSDKARGKSDNVPSEEVVKKMKNYWRQLLNAKLITQRKFDNLTKAERGGLSELDKAGFIKRQLVETRQITKHVAQILDSRMNTKYDENDKLIREVKVITLKSKLVSDFRKDFQFYKVREINNYHHAHDAYLNAVVGTALIKKYPKLESEFVYGDYKVYDVRKMIAKSEQEIGKATAKYFFYSNIMNFFKTEITLANGEIRKRPLIETNGETGEIVWDKGRDFATVRKVLSMPQVNIVKKTEVQTGGFSKESILPKRNSDKLIARKKDWDPKKYGGFDSPTVAYSVLVVAKVEKGKSKKLKSVKELLGITIMERSSFEKNPIDFLEAKGYKEVKKDLIIKLPKYSLFELENGRKRMLASAGELQKGNELALPSKYVNFLYLASHYEKLKGSPEDNEQKQLFVEQHKHYLDEIIEQISEFSKRVILADANLDKVLSAYNKHRDKPIREQAENIIHLFTLTNLGAPAAFKYFDTTIDRKRYTSTKEVLDATLIHQSITGLYETRIDLSQLGGDGGGGSEAAAKGSSGGTLGDQGSRGSDPLPEPRVTLTVEGIPTEFLVNTGAEHSVLTKPMGKMGSKRTVVAGATGSKVYPWTTKRLLKIGQKQVTHSFLVIPECPAPLLGRDLLTKLKAQIQFSTEGPQVTWEDRPAMCLVLNLEEEYRLHEKPVPPSIDPSWLQLFPMVWAEKAGMGLANQVPPVVVELKSDASPVAVRQYPMSKEAREGIRPHIQRFLDLGILVPCQSPWNTPLLPVKKPGTNDYRPVQDLREVNKRVQDIHPTVPNPYNLLSSLPPSHTWYSVLDLKDAFFCLKLHPNSQPLFAFEWRDPEKGNTGQLTWTRLPQGFKNSPTLFNEALHRDLASFRALNPQVVMLQYVDDLLVAAPTYRDCKEGTRRLLQELSKLGYRVSAKKAQLCREEVTYLGYLLKGGKRWLTPARKATVMKIPTPTTPRQVREFLGKAGFCRLFIPGFASLAAPLYPLTRPKVPFTWTEAHQEAFGRIKEALLSAPALALPDLTKPFALYVDEKEGVARGVLTQTLGPWRRPVAYLSKKLDPVASGWPTCLKAIAAVALLLKDADKLTLGQNVLVIAPHNLESIVRQPPDRWMTNARMTHYQSLLLNERVSFAPPAILNPATLLPVESDDTPIHICSEILAEETGTRPDLRDQPLPGVPAWYTDGSSFIMDGRRQAGAAIVDNKRTVWASNLPEGTSAQKAELIALTQALRLAEGKSINIYTDSRYAFATAHVHGAIYKQRGWLTSAGKDIKNKEEILALLEAIHLPKRVAIIHCPGHQRGTDPVATGNRKADEAAKQAAQSTRILTETTKNAGKRTADGSEFEKRTADGSEFESPKKKAKVE

SEQ ID NO: 1770 - protein, 2218 aa, synthetic construct
MPAAKRVKLDGGDKKYSIGLDIGTNSVGWAVITDEYKVPSKKFKVLGNTDRHSIKKNLIGALLFDSGETAEATRLKRTARRRYTRRKNRICYLQEIFSNEMAKVDDSFFHRLEESFLVEEDKKHERHPIFGNIVDEVAYHEKYPTIYHLRKKLVDSTDKADLRLIYLALAHMIKFRGHFLIEGDLNPDNSDVDKLFIQLVQTYNQLFEENPINASGVDAKAILSARLSKSRRLENLIAQLPGEKKNGLFGNLIALSLGLTPNFKSNFDLAEDAKLQLSKDTYDDDLDNLLAQIGDQYADLFLAAKNLSDAILLSDILRVNTEITKAPLSASMIKRYDEHHQDLTLLKALVRQQLPEKYKEIFFDQSKNGYAGYIDGGASQEEFYKFIKPILEKMDGTEELLVKLNREDLLRKQRTFDNGSIPHQIHLGELHAILRRQEDFYPFLKDNREKIEKILTFRIPYYVGPLARGNSRFAWMTRKSEETITPWNFEEVVDKGASAQSFIERMTNFDKNLPNEKVLPKHSLLYEYFTVYNELTKVKYVTEGMRKPAFLSGEQKKAIVDLLFKTNRKVTVKQLKEDYFKKIECFDSVEISGVEDRFNASLGTYHDLLKIIKDKDFLDNEENEDILEDIVLTLTLFEDREMIEERLKTYAHLFDDKVMKQLKRRRYTGWGRLSRKLINGIRDKQSGKTILDFLKSDGFANRNFMQLIHDDSLTFKEDIQKAQVSGQGDSLHEHIANLAGSPAIKKGILQTVKVVDELVKVMGRHKPENIVIEMARENQTTQKGQKNSRERMKRIEEGIKELGSQILKEHPVENTQLQNEKLYLYYLQNGRDMYVDQELDINRLSDYDVDHIVPQSFLKDDSIDNKVLTRSDKARGKSDNVPSEEVVKKMKNYWRQLLNAKLITQRKFDNLTKAERGGLSELDKAGFIKRQLVETRQITKHVAQILDSRMNTKYDENDKLIREVKVITLKSKLVSDFRKDFQFYKVREINNYHHAHDAYLNAVVGTALIKKYPKLESEFVYGDYKVYDVRKMIAKSEQEIGKATAKYFFYSNIMNFFKTEITLANGEIRKRPLIETNGETGEIVWDKGRDFATVRKVLSMPQVNIVKKTEVQTGGFSKESILPKRNSDKLIARKKDWDPKKYGGFDSPTVAYSVLVVAKVEKGKSKKLKSVKELLGITIMERSSFEKNPIDFLEAKGYKEVKKDLIIKLPKYSLFELENGRKRMLASAGELQKGNELALPSKYVNFLYLASHYEKLKGSPEDNEQKQLFVEQHKHYLDEIIEQISEFSKRVILADANLDKVLSAYNKHRDKPIREQAENIIHLFTLTNLGAPAAFKYFDTTIDRKRYTSTKEVLDATLIHQSITGLYETRIDLSQLGGDGGEAAAKGGGPAPGGTLGDQGSRGSDPLPEPRVTLTVEGIPTEFLVNTGAEHSVLTKPMGKMGSKRTVVAGATGSKVYPWTTKRLLKIGQKQVTHSFLVIPECPAPLLGRDLLTKLKAQIQFSTEGPQVTWEDRPAMCLVLNLEEEYRLHEKPVPPSIDPSWLQLFPMVWAEKAGMGLANQVPPVVVELKSDASPVAVRQYPMSKEAREGIRPHIQRFLDLGILVPCQSPWNTPLLPVKKPGTNDYRPVQDLREVNKRVQDIHPTVPNPYNLLSSLPPSHTWYSVLDLKDAFFCLKLHPNSQPLFAFEWRDPEKGNTGQLTWTRLPQGFKNSPTLFNEALHRDLASFRALNPQVVMLQYVDDLLVAAPTYRDCKEGTRRLLQELSKLGYRVSAKKAQLCREEVTYLGYLLKGGKRWLTPARKATVMKIPTPTTPRQVREFLGKAGFCRLFIPGFASLAAPLYPLTRPKVPFTWTEAHQEAFGRIKEALLSAPALALPDLTKPFALYVDEKEGVARGVLTQTLGPWRRPVAYLSKKLDPVASGWPTCLKAIAAVALLLKDADKLTLGQNVLVIAPHNLESIVRQPPDRWMTNARMTHYQSLLLNERVSFAPPAILNPATLLPVESDDTPIHICSEILAEETGTRPDLRDQPLPGVPAWYTDGSSFIMDGRRQAGAAIVDNKRTVWASNLPEGTSAQKAELIALTQALRLAEGKSINIYTDSRYAFATAHVHGAIYKQRGWLTSAGKDIKNKEEILALLEAIHLPKRVAIIHCPGHQRGTDPVATGNRKADEAAKQAAQSTRILTETTKNAGKRTADGSEFEKRTADGSEFESPKKKAKVE

SEQ ID NO: 1771 - protein, 2218 aa, synthetic construct
MPAAKRVKLDGGDKKYSIGLDIGTNSVGWAVITDEYKVPSKKFKVLGNTDRHSIKKNLIGALLFDSGETAEATRLKRTARRRYTRRKNRICYLQEIFSNEMAKVDDSFFHRLEESFLVEEDKKHERHPIFGNIVDEVAYHEKYPTIYHLRKKLVDSTDKADLRLIYLALAHMIKFRGHFLIEGDLNPDNSDVDKLFIQLVQTYNQLFEENPINASGVDAKAILSARLSKSRRLENLIAQLPGEKKNGLFGNLIALSLGLTPNFKSNFDLAEDAKLQLSKDTYDDDLDNLLAQIGDQYADLFLAAKNLSDAILLSDILRVNTEITKAPLSASMIKRYDEHHQDLTLLKALVRQQLPEKYKEIFFDQSKNGYAGYIDGGASQEEFYKFIKPILEKMDGTEELLVKLNREDLLRKQRTFDNGSIPHQIHLGELHAILRRQEDFYPFLKDNREKIEKILTFRIPYYVGPLARGNSRFAWMTRKSEETITPWNFEEVVDKGASAQSFIERMTNFDKNLPNEKVLPKHSLLYEYFTVYNELTKVKYVTEGMRKPAFLSGEQKKAIVDLLFKTNRKVTVKQLKEDYFKKIECFDSVEISGVEDRFNASLGTYHDLLKIIKDKDFLDNEENEDILEDIVLTLTLFEDREMIEERLKTYAHLFDDKVMKQLKRRRYTGWGRLSRKLINGIRDKQSGKTILDFLKSDGFANRNFMQLIHDDSLTFKEDIQKAQVSGQGDSLHEHIANLAGSPAIKKGILQTVKVVDELVKVMGRHKPENIVIEMARENQTTQKGQKNSRERMKRIEEGIKELGSQILKEHPVENTQLQNEKLYLYYLQNGRDMYVDQELDINRLSDYDVDHIVPQSFLKDDSIDNKVLTRSDKARGKSDNVPSEEVVKKMKNYWRQLLNAKLITQRKFDNLTKAERGGLSELDKAGFIKRQLVETRQITKHVAQILDSRMNTKYDENDKLIREVKVITLKSKLVSDFRKDFQFYKVREINNYHHAHDAYLNAVVGTALIKKYPKLESEFVYGDYKVYDVRKMIAKSEQEIGKATAKYFFYSNIMNFFKTEITLANGEIRKRPLIETNGETGEIVWDKGRDFATVRKVLSMPQVNIVKKTEVQTGGFSKESILPKRNSDKLIARKKDWDPKKYGGFDSPTVAYSVLVVAKVEKGKSKKLKSVKELLGITIMERSSFEKNPIDFLEAKGYKEVKKDLIIKLPKYSLFELENGRKRMLASAGELQKGNELALPSKYVNFLYLASHYEKLKGSPEDNEQKQLFVEQHKHYLDEIIEQISEFSKRVILADANLDKVLSAYNKHRDKPIREQAENIIHLFTLTNLGAPAAFKYFDTTIDRKRYTSTKEVLDATLIHQSITGLYETRIDLSQLGGDGGGGGEAAAKGGSGGTLGDQGSRGSDPLPEPRVTLTVEGIPTEFLVNTGAEHSVLTKPMGKMGSKRTVVAGATGSKVYPWTTKRLLKIGQKQVTHSFLVIPECPAPLLGRDLLTKLKAQIQFSTEGPQVTWEDRPAMCLVLNLEEEYRLHEKPVPPSIDPSWLQLFPMVWAEKAGMGLANQVPPVVVELKSDASPVAVRQYPMSKEAREGIRPHIQRFLDLGILVPCQSPWNTPLLPVKKPGTNDYRPVQDLREVNKRVQDIHPTVPNPYNLLSSLPPSHTWYSVLDLKDAFFCLKLHPNSQPLFAFEWRDPEKGNTGQLTWTRLPQGFKNSPTLFNEALHRDLASFRALNPQVVMLQYVDDLLVAAPTYRDCKEGTRRLLQELSKLGYRVSAKKAQLCREEVTYLGYLLKGGKRWLTPARKATVMKIPTPTTPRQVREFLGKAGFCRLFIPGFASLAAPLYPLTRPKVPFTWTEAHQEAFGRIKEALLSAPALALPDLTKPFALYVDEKEGVARGVLTQTLGPWRRPVAYLSKKLDPVASGWPTCLKAIAAVALLLKDADKLTLGQNVLVIAPHNLESIVRQPPDRWMTNARMTHYQSLLLNERVSFAPPAILNPATLLPVESDDTPIHICSEILAEETGTRPDLRDQPLPGVPAWYTDGSSFIMDGRRQAGAAIVDNKRTVWASNLPEGTSAQKAELIALTQALRLAEGKSINIYTDSRYAFATAHVHGAIYKQRGWLTSAGKDIKNKEEILALLEAIHLPKRVAIIHCPGHQRGTDPVATGNRKADEAAKQAAQSTRILTETTKNAGKRTADGSEFEKRTADGSEFESPKKKAKVE

SEQ ID NO: 1772 - protein, 2213 aa, synthetic construct
MPAAKRVKLDGGDKKYSIGLDIGTNSVGWAVITDEYKVPSKKFKVLGNTDRHSIKKNLIGALLFDSGETAEATRLKRTARRRYTRRKNRICYLQEIFSNEMAKVDDSFFHRLEESFLVEEDKKHERHPIFGNIVDEVAYHEKYPTIYHLRKKLVDSTDKADLRLIYLALAHMIKFRGHFLIEGDLNPDNSDVDKLFIQLVQTYNQLFEENPINASGVDAKAILSARLSKSRRLENLIAQLPGEKKNGLFGNLIALSLGLTPNFKSNFDLAEDAKLQLSKDTYDDDLDNLLAQIGDQYADLFLAAKNLSDAILLSDILRVNTEITKAPLSASMIKRYDEHHQDLTLLKALVRQQLPEKYKEIFFDQSKNGYAGYIDGGASQEEFYKFIKPILEKMDGTEELLVKLNREDLLRKQRTFDNGSIPHQIHLGELHAILRRQEDFYPFLKDNREKIEKILTFRIPYYVGPLARGNSRFAWMTRKSEETITPWNFEEVVDKGASAQSFIERMTNFDKNLPNEKVLPKHSLLYEYFTVYNELTKVKYVTEGMRKPAFLSGEQKKAIVDLLFKTNRKVTVKQLKEDYFKKIECFDSVEISGVEDRFNASLGTYHDLLKIIKDKDFLDNEENEDILEDIVLTLTLFEDREMIEERLKTYAHLFDDKVMKQLKRRRYTGWGRLSRKLINGIRDKQSGKTILDFLKSDGFANRNFMQLIHDDSLTFKEDIQKAQVSGQGDSLHEHIANLAGSPAIKKGILQTVKVVDELVKVMGRHKPENIVIEMARENQTTQKGQKNSRERMKRIEEGIKELGSQILKEHPVENTQLQNEKLYLYYLQNGRDMYVDQELDINRLSDYDVDHIVPQSFLKDDSIDNKVLTRSDKARGKSDNVPSEEVVKKMKNYWRQLLNAKLITQRKFDNLTKAERGGLSELDKAGFIKRQLVETRQITKHVAQILDSRMNTKYDENDKLIREVKVITLKSKLVSDFRKDFQFYKVREINNYHHAHDAYLNAVVGTALIKKYPKLESEFVYGDYKVYDVRKMIAKSEQEIGKATAKYFFYSNIMNFFKTEITLANGEIRKRPLIETNGETGEIVWDKGRDFATVRKVLSMPQVNIVKKTEVQTGGFSKESILPKRNSDKLIARKKDWDPKKYGGFDSPTVAYSVLVVAKVEKGKSKKLKSVKELLGITIMERSSFEKNPIDFLEAKGYKEVKKDLIIKLPKYSLFELENGRKRMLASAGELQKGNELALPSKYVNFLYLASHYEKLKGSPEDNEQKQLFVEQHKHYLDEIIEQISEFSKRVILADANLDKVLSAYNKHRDKPIREQAENIIHLFTLTNLGAPAAFKYFDTTIDRKRYTSTKEVLDATLIHQSITGLYETRIDLSQLGGDGGGGGGSSGGTLGDQGSRGSDPLPEPRVTLTVEGIPTEFLVNTGAEHSVLTKPMGKMGSKRTVVAGATGSKVYPWTTKRLLKIGQKQVTHSFLVIPECPAPLLGRDLLTKLKAQIQFSTEGPQVTWEDRPAMCLVLNLEEEYRLHEKPVPPSIDPSWLQLFPMVWAEKAGMGLANQVPPVVVELKSDASPVAVRQYPMSKEAREGIRPHIQRFLDLGILVPCQSPWNTPLLPVKKPGTNDYRPVQDLREVNKRVQDIHPTVPNPYNLLSSLPPSHTWYSVLDLKDAFFCLKLHPNSQPLFAFEWRDPEKGNTGQLTWTRLPQGFKNSPTLFNEALHRDLASFRALNPQVVMLQYVDDLLVAAPTYRDCKEGTRRLLQELSKLGYRVSAKKAQLCREEVTYLGYLLKGGKRWLTPARKATVMKIPTPTTPRQVREFLGKAGFCRLFIPGFASLAAPLYPLTRPKVPFTWTEAHQEAFGRIKEALLSAPALALPDLTKPFALYVDEKEGVARGVLTQTLGPWRRPVAYLSKKLDPVASGWPTCLKAIAAVALLLKDADKLTLGQNVLVIAPHNLESIVRQPPDRWMTNARMTHYQSLLLNERVSFAPPAILNPATLLPVESDDTPIHICSEILAEETGTRPDLRDQPLPGVPAWYTDGSSFIMDGRRQAGAAIVDNKRTVWASNLPEGTSAQKAELIALTQALRLAEGKSINIYTDSRYAFATAHVHGAIYKQRGWLTSAGKDIKNKEEILALLEAIHLPKRVAIIHCPGHQRGTDPVATGNRKADEAAKQAAQSTRILTETTKNAGKRTADGSEFEKRTADGSEFESPKKKAKVE

SEQ ID NO: 1773 - protein, 2217 aa, synthetic construct
MPAAKRVKLDGGDKKYSIGLDIGTNSVGWAVITDEYKVPSKKFKVLGNTDRHSIKKNLIGALLFDSGETAEATRLKRTARRRYTRRKNRICYLQEIFSNEMAKVDDSFFHRLEESFLVEEDKKHERHPIFGNIVDEVAYHEKYPTIYHLRKKLVDSTDKADLRLIYLALAHMIKFRGHFLIEGDLNPDNSDVDKLFIQLVQTYNQLFEENPINASGVDAKAILSARLSKSRRLENLIAQLPGEKKNGLFGNLIALSLGLTPNFKSNFDLAEDAKLQLSKDTYDDDLDNLLAQIGDQYADLFLAAKNLSDAILLSDILRVNTEITKAPLSASMIKRYDEHHQDLTLLKALVRQQLPEKYKEIFFDQSKNGYAGYIDGGASQEEFYKFIKPILEKMDGTEELLVKLNREDLLRKQRTFDNGSIPHQIHLGELHAILRRQEDFYPFLKDNREKIEKILTFRIPYYVGPLARGNSRFAWMTRKSEETITPWNFEEVVDKGASAQSFIERMTNFDKNLPNEKVLPKHSLLYEYFTVYNELTKVKYVTEGMRKPAFLSGEQKKAIVDLLFKTNRKVTVKQLKEDYFKKIECFDSVEISGVEDRFNASLGTYHDLLKIIKDKDFLDNEENEDILEDIVLTLTLFEDREMIEERLKTYAHLFDDKVMKQLKRRRYTGWGRLSRKLINGIRDKQSGKTILDFLKSDGFANRNFMQLIHDDSLTFKEDIQKAQVSGQGDSLHEHIANLAGSPAIKKGILQTVKVVDELVKVMGRHKPENIVIEMARENQTTQKGQKNSRERMKRIEEGIKELGSQILKEHPVENTQLQNEKLYLYYLQNGRDMYVDQELDINRLSDYDVDHIVPQSFLKDDSIDNKVLTRSDKARGKSDNVPSEEVVKKMKNYWRQLLNAKLITQRKFDNLTKAERGGLSELDKAGFIKRQLVETRQITKHVAQILDSRMNTKYDENDKLIREVKVITLKSKLVSDFRKDFQFYKVREINNYHHAHDAYLNAVVGTALIKKYPKLESEFVYGDYKVYDVRKMIAKSEQEIGKATAKYFFYSNIMNFFKTEITLANGEIRKRPLIETNGETGEIVWDKGRDFATVRKVLSMPQVNIVKKTEVQTGGFSKESILPKRNSDKLIARKKDWDPKKYGGFDSPTVAYSVLVVAKVEKGKSKKLKSVKELLGITIMERSSFEKNPIDFLEAKGYKEVKKDLIIKLPKYSLFELENGRKRMLASAGELQKGNELALPSKYVNFLYLASHYEKLKGSPEDNEQKQLFVEQHKHYLDEIIEQISEFSKRVILADANLDKVLSAYNKHRDKPIREQAENIIHLFTLTNLGAPAAFKYFDTTIDRKRYTSTKEVLDATLIHQSITGLYETRIDLSQLGGDGGEAAAKEAAAKGGTLGDQGSRGSDPLPEPRVTLTVEGIPTEFLVNTGAEHSVLTKPMGKMGSKRTVVAGATGSKVYPWTTKRLLKIGQKQVTHSFLVIPECPAPLLGRDLLTKLKAQIQFSTEGPQVTWEDRPAMCLVLNLEEEYRLHEKPVPPSIDPSWLQLFPMVWAEKAGMGLANQVPPVVVELKSDASPVAVRQYPMSKEAREGIRPHIQRFLDLGILVPCQSPWNTPLLPVKKPGTNDYRPVQDLREVNKRVQDIHPTVPNPYNLLSSLPPSHTWYSVLDLKDAFFCLKLHPNSQPLFAFEWRDPEKGNTGQLTWTRLPQGFKNSPTLFNEALHRDLASFRALNPQVVMLQYVDDLLVAAPTYRDCKEGTRRLLQELSKLGYRVSAKKAQLCREEVTYLGYLLKGGKRWLTPARKATVMKIPTPTTPRQVREFLGKAGFCRLFIPGFASLAAPLYPLTRPKVPFTWTEAHQEAFGRIKEALLSAPALALPDLTKPFALYVDEKEGVARGVLTQTLGPWRRPVAYLSKKLDPVASGWPTCLKAIAAVALLLKDADKLTLGQNVLVIAPHNLESIVRQPPDRWMTNARMTHYQSLLLNERVSFAPPAILNPATLLPVESDDTPIHICSEILAEETGTRPDLRDQPLPGVPAWYTDGSSFIMDGRRQAGAAIVDNKRTVWASNLPEGTSAQKAELIALTQALRLAEGKSINIYTDSRYAFATAHVHGAIYKQRGWLTSAGKDIKNKEEILALLEAIHLPKRVAIIHCPGHQRGTDPVATGNRKADEAAKQAAQSTRILTETTKNAGKRTADGSEFEKRTADGSEFESPKKKAKVE

SEQ ID NO: 1774 - protein, 2216 aa, synthetic construct
MPAAKRVKLDGGDKKYSIGLDIGTNSVGWAVITDEYKVPSKKFKVLGNTDRHSIKKNLIGALLFDSGETAEATRLKRTARRRYTRRKNRICYLQEIFSNEMAKVDDSFFHRLEESFLVEEDKKHERHPIFGNIVDEVAYHEKYPTIYHLRKKLVDSTDKADLRLIYLALAHMIKFRGHFLIEGDLNPDNSDVDKLFIQLVQTYNQLFEENPINASGVDAKAILSARLSKSRRLENLIAQLPGEKKNGLFGNLIALSLGLTPNFKSNFDLAEDAKLQLSKDTYDDDLDNLLAQIGDQYADLFLAAKNLSDAILLSDILRVNTEITKAPLSASMIKRYDEHHQDLTLLKALVRQQLPEKYKEIFFDQSKNGYAGYIDGGASQEEFYKFIKPILEKMDGTEELLVKLNREDLLRKQRTFDNGSIPHQIHLGELHAILRRQEDFYPFLKDNREKIEKILTFRIPYYVGPLARGNSRFAWMTRKSEETITPWNFEEVVDKGASAQSFIERMTNFDKNLPNEKVLPKHSLLYEYFTVYNELTKVKYVTEGMRKPAFLSGEQKKAIVDLLFKTNRKVTVKQLKEDYFKKIECFDSVEISGVEDRFNASLGTYHDLLKIIKDKDFLDNEENEDILEDIVLTLTLFEDREMIEERLKTYAHLFDDKVMKQLKRRRYTGWGRLSRKLINGIRDKQSGKTILDFLKSDGFANRNFMQLIHDDSLTFKEDIQKAQVSGQGDSLHEHIANLAGSPAIKKGILQTVKVVDELVKVMGRHKPENIVIEMARENQTTQKGQKNSRERMKRIEEGIKELGSQILKEHPVENTQLQNEKLYLYYLQNGRDMYVDQELDINRLSDYDVDHIVPQSFLKDDSIDNKVLTRSDKARGKSDNVPSEEVVKKMKNYWRQLLNAKLITQRKFDNLTKAERGGLSELDKAGFIKRQLVETRQITKHVAQILDSRMNTKYDENDKLIREVKVITLKSKLVSDFRKDFQFYKVREINNYHHAHDAYLNAVVGTALIKKYPKLESEFVYGDYKVYDVRKMIAKSEQEIGKATAKYFFYSNIMNFFKTEITLANGEIRKRPLIETNGETGEIVWDKGRDFATVRKVLSMPQVNIVKKTEVQTGGFSKESILPKRNSDKLIARKKDWDPKKYGGFDSPTVAYSVLVVAKVEKGKSKKLKSVKELLGITIMERSSFEKNPIDFLEAKGYKEVKKDLIIKLPKYSLFELENGRKRMLASAGELQKGNELALPSKYVNFLYLASHYEKLKGSPEDNEQKQLFVEQHKHYLDEIIEQISEFSKRVILADANLDKVLSAYNKHRDKPIREQAENIIHLFTLTNLGAPAAFKYFDTTIDRKRYTSTKEVLDATLIHQSITGLYETRIDLSQLGGDGGPAPGGGGSSGGTLGDQGSRGSDPLPEPRVTLTVEGIPTEFLVNTGAEHSVLTKPMGKMGSKRTVVAGATGSKVYPWTTKRLLKIGQKQVTHSFLVIPECPAPLLGRDLLTKLKAQIQFSTEGPQVTWEDRPAMCLVLNLEEEYRLHEKPVPPSIDPSWLQLFPMVWAEKAGMGLANQVPPVVVELKSDASPVAVRQYPMSKEAREGIRPHIQRFLDLGILVPCQSPWNTPLLPVKKPGTNDYRPVQDLREVNKRVQDIHPTVPNPYNLLSSLPPSHTWYSVLDLKDAFFCLKLHPNSQPLFAFEWRDPEKGNTGQLTWTRLPQGFKNSPTLFNEALHRDLASFRALNPQVVMLQYVDDLLVAAPTYRDCKEGTRRLLQELSKLGYRVSAKKAQLCREEVTYLGYLLKGGKRWLTPARKATVMKIPTPTTPRQVREFLGKAGFCRLFIPGFASLAAPLYPLTRPKVPFTWTEAHQEAFGRIKEALLSAPALALPDLTKPFALYVDEKEGVARGVLTQTLGPWRRPVAYLSKKLDPVASGWPTCLKAIAAVALLLKDADKLTLGQNVLVIAPHNLESIVRQPPDRWMTNARMTHYQSLLLNERVSFAPPAILNPATLLPVESDDTPIHICSEILAEETGTRPDLRDQPLPGVPAWYTDGSSFIMDGRRQAGAAIVDNKRTVWASNLPEGTSAQKAELIALTQALRLAEGKSINIYTDSRYAFATAHVHGAIYKQRGWLTSAGKDIKNKEEILALLEAIHLPKRVAIIHCPGHQRGTDPVATGNRKADEAAKQAAQSTRILTETTKNAGKRTADGSEFEKRTADGSEFESPKKKAKVE

SEQ ID NO: 1775 - protein, 2216 aa, synthetic construct
MPAAKRVKLDGGDKKYSIGLDIGTNSVGWAVITDEYKVPSKKFKVLGNTDRHSIKKNLIGALLFDSGETAEATRLKRTARRRYTRRKNRICYLQEIFSNEMAKVDDSFFHRLEESFLVEEDKKHERHPIFGNIVDEVAYHEKYPTIYHLRKKLVDSTDKADLRLIYLALAHMIKFRGHFLIEGDLNPDNSDVDKLFIQLVQTYNQLFEENPINASGVDAKAILSARLSKSRRLENLIAQLPGEKKNGLFGNLIALSLGLTPNFKSNFDLAEDAKLQLSKDTYDDDLDNLLAQIGDQYADLFLAAKNLSDAILLSDILRVNTEITKAPLSASMIKRYDEHHQDLTLLKALVRQQLPEKYKEIFFDQSKNGYAGYIDGGASQEEFYKFIKPILEKMDGTEELLVKLNREDLLRKQRTFDNGSIPHQIHLGELHAILRRQEDFYPFLKDNREKIEKILTFRIPYYVGPLARGNSRFAWMTRKSEETITPWNFEEVVDKGASAQSFIERMTNFDKNLPNEKVLPKHSLLYEYFTVYNELTKVKYVTEGMRKPAFLSGEQKKAIVDLLFKTNRKVTVKQLKEDYFKKIECFDSVEISGVEDRFNASLGTYHDLLKIIKDKDFLDNEENEDILEDIVLTLTLFEDREMIEERLKTYAHLFDDKVMKQLKRRRYTGWGRLSRKLINGIRDKQSGKTILDFLKSDGFANRNFMQLIHDDSLTFKEDIQKAQVSGQGDSLHEHIANLAGSPAIKKGILQTVKVVDELVKVMGRHKPENIVIEMARENQTTQKGQKNSRERMKRIEEGIKELGSQILKEHPVENTQLQNEKLYLYYLQNGRDMYVDQELDINRLSDYDVDHIVPQSFLKDDSIDNKVLTRSDKARGKSDNVPSEEVVKKMKNYWRQLLNAKLITQRKFDNLTKAERGGLSELDKAGFIKRQLVETRQITKHVAQILDSRMNTKYDENDKLIREVKVITLKSKLVSDFRKDFQFYKVREINNYHHAHDAYLNAVVGTALIKKYPKLESEFVYGDYKVYDVRKMIAKSEQEIGKATAKYFFYSNIMNFFKTEITLANGEIRKRPLIETNGETGEIVWDKGRDFATVRKVLSMPQVNIVKKTEVQTGGFSKESILPKRNSDKLIARKKDWDPKKYGGFDSPTVAYSVLVVAKVEKGKSKKLKSVKELLGITIMERSSFEKNPIDFLEAKGYKEVKKDLIIKLPKYSLFELENGRKRMLASAGELQKGNELALPSKYVNFLYLASHYEKLKGSPEDNEQKQLFVEQHKHYLDEIIEQISEFSKRVILADANLDKVLSAYNKHRDKPIREQAENIIHLFTLTNLGAPAAFKYFDTTIDRKRYTSTKEVLDATLIHQSITGLYETRIDLSQLGGDGGGGGGGSGSSGGTLGDQGSRGSDPLPEPRVTLTVEGIPTEFLVNTGAEHSVLTKPMGKMGSKRTVVAGATGSKVYPWTTKRLLKIGQKQVTHSFLVIPECPAPLLGRDLLTKLKAQIQFSTEGPQVTWEDRPAMCLVLNLEEEYRLHEKPVPPSIDPSWLQLFPMVWAEKAGMGLANQVPPVVVELKSDASPVAVRQYPMSKEAREGIRPHIQRFLDLGILVPCQSPWNTPLLPVKKPGTNDYRPVQDLREVNKRVQDIHPTVPNPYNLLSSLPPSHTWYSVLDLKDAFFCLKLHPNSQPLFAFEWRDPEKGNTGQLTWTRLPQGFKNSPTLFNEALHRDLASFRALNPQVVMLQYVDDLLVAAPTYRDCKEGTRRLLQELSKLGYRVSAKKAQLCREEVTYLGYLLKGGKRWLTPARKATVMKIPTPTTPRQVREFLGKAGFCRLFIPGFASLAAPLYPLTRPKVPFTWTEAHQEAFGRIKEALLSAPALALPDLTKPFALYVDEKEGVARGVLTQTLGPWRRPVAYLSKKLDPVASGWPTCLKAIAAVALLLKDADKLTLGQNVLVIAPHNLESIVRQPPDRWMTNARMTHYQSLLLNERVSFAPPAILNPATLLPVESDDTPIHICSEILAEETGTRPDLRDQPLPGVPAWYTDGSSFIMDGRRQAGAAIVDNKRTVWASNLPEGTSAQKAELIALTQALRLAEGKSINIYTDSRYAFATAHVHGAIYKQRGWLTSAGKDIKNKEEILALLEAIHLPKRVAIIHCPGHQRGTDPVATGNRKADEAAKQAAQSTRILTETTKNAGKRTADGSEFEKRTADGSEFESPKKKAKVE

SEQ ID NO: 1776 - protein, 2210 aa, synthetic construct
MPAAKRVKLDGGDKKYSIGLDIGTNSVGWAVITDEYKVPSKKFKVLGNTDRHSIKKNLIGALLFDSGETAEATRLKRTARRRYTRRKNRICYLQEIFSNEMAKVDDSFFHRLEESFLVEEDKKHERHPIFGNIVDEVAYHEKYPTIYHLRKKLVDSTDKADLRLIYLALAHMIKFRGHFLIEGDLNPDNSDVDKLFIQLVQTYNQLFEENPINASGVDAKAILSARLSKSRRLENLIAQLPGEKKNGLFGNLIALSLGLTPNFKSNFDLAEDAKLQLSKDTYDDDLDNLLAQIGDQYADLFLAAKNLSDAILLSDILRVNTEITKAPLSASMIKRYDEHHQDLTLLKALVRQQLPEKYKEIFFDQSKNGYAGYIDGGASQEEFYKFIKPILEKMDGTEELLVKLNREDLLRKQRTFDNGSIPHQIHLGELHAILRRQEDFYPFLKDNREKIEKILTFRIPYYVGPLARGNSRFAWMTRKSEETITPWNFEEVVDKGASAQSFIERMTNFDKNLPNEKVLPKHSLLYEYFTVYNELTKVKYVTEGMRKPAFLSGEQKKAIVDLLFKTNRKVTVKQLKEDYFKKIECFDSVEISGVEDRFNASLGTYHDLLKIIKDKDFLDNEENEDILEDIVLTLTLFEDREMIEERLKTYAHLFDDKVMKQLKRRRYTGWGRLSRKLINGIRDKQSGKTILDFLKSDGFANRNFMQLIHDDSLTFKEDIQKAQVSGQGDSLHEHIANLAGSPAIKKGILQTVKVVDELVKVMGRHKPENIVIEMARENQTTQKGQKNSRERMKRIEEGIKELGSQILKEHPVENTQLQNEKLYLYYLQNGRDMYVDQELDINRLSDYDVDHIVPQSFLKDDSIDNKVLTRSDKARGKSDNVPSEEVVKKMKNYWRQLLNAKLITQRKFDNLTKAERGGLSELDKAGFIKRQLVETRQITKHVAQILDSRMNTKYDENDKLIREVKVITLKSKLVSDFRKDFQFYKVREINNYHHAHDAYLNAVVGTALIKKYPKLESEFVYGDYKVYDVRKMIAKSEQEIGKATAKYFFYSNIMNFFKTEITLANGEIRKRPLIETNGETGEIVWDKGRDFATVRKVLSMPQVNIVKKTEVQTGGFSKESILPKRNSDKLIARKKDWDPKKYGGFDSPTVAYSVLVVAKVEKGKSKKLKSVKELLGITIMERSSFEKNPIDFLEAKGYKEVKKDLIIKLPKYSLFELENGRKRMLASAGELQKGNELALPSKYVNFLYLASHYEKLKGSPEDNEQKQLFVEQHKHYLDEIIEQISEFSKRVILADANLDKVLSAYNKHRDKPIREQAENIIHLFTLTNLGAPAAFKYFDTTIDRKRYTSTKEVLDATLIHQSITGLYETRIDLSQLGGDGGGSSGGTLGDQGSRGSDPLPEPRVTLTVEGIPTEFLVNTGAEHSVLTKPMGKMGSKRTVVAGATGSKVYPWTTKRLLKIGQKQVTHSFLVIPECPAPLLGRDLLTKLKAQIQFSTEGPQVTWEDRPAMCLVLNLEEEYRLHEKPVPPSIDPSWLQLFPMVWAEKAGMGLANQVPPVVVELKSDASPVAVRQYPMSKEAREGIRPHIQRFLDLGILVPCQSPWNTPLLPVKKPGTNDYRPVQDLREVNKRVQDIHPTVPNPYNLLSSLPPSHTWYSVLDLKDAFFCLKLHPNSQPLFAFEWRDPEKGNTGQLTWTRLPQGFKNSPTLFNEALHRDLASFRALNPQVVMLQYVDDLLVAAPTYRDCKEGTRRLLQELSKLGYRVSAKKAQLCREEVTYLGYLLKGGKRWLTPARKATVMKIPTPTTPRQVREFLGKAGFCRLFIPGFASLAAPLYPLTRPKVPFTWTEAHQEAFGRIKEALLSAPALALPDLTKPFALYVDEKEGVARGVLTQTLGPWRRPVAYLSKKLDPVASGWPTCLKAIAAVALLLKDADKLTLGQNVLVIAPHNLESIVRQPPDRWMTNARMTHYQSLLLNERVSFAPPAILNPATLLPVESDDTPIHICSEILAEETGTRPDLRDQPLPGVPAWYTDGSSFIMDGRRQAGAAIVDNKRTVWASNLPEGTSAQKAELIALTQALRLAEGKSINIYTDSRYAFATAHVHGAIYKQRGWLTSAGKDIKNKEEILALLEAIHLPKRVAIIHCPGHQRGTDPVATGNRKADEAAKQAAQSTRILTETTKNAGKRTADGSEFEKRTADGSEFESPKKKAKVE

SEQ ID NO: 1777 - protein, 2222 aa, synthetic construct
MPAAKRVKLDGGDKKYSIGLDIGTNSVGWAVITDEYKVPSKKFKVLGNTDRHSIKKNLIGALLFDSGETAEATRLKRTARRRYTRRKNRICYLQEIFSNEMAKVDDSFFHRLEESFLVEEDKKHERHPIFGNIVDEVAYHEKYPTIYHLRKKLVDSTDKADLRLIYLALAHMIKFRGHFLIEGDLNPDNSDVDKLFIQLVQTYNQLFEENPINASGVDAKAILSARLSKSRRLENLIAQLPGEKKNGLFGNLIALSLGLTPNFKSNFDLAEDAKLQLSKDTYDDDLDNLLAQIGDQYADLFLAAKNLSDAILLSDILRVNTEITKAPLSASMIKRYDEHHQDLTLLKALVRQQLPEKYKEIFFDQSKNGYAGYIDGGASQEEFYKFIKPILEKMDGTEELLVKLNREDLLRKQRTFDNGSIPHQIHLGELHAILRRQEDFYPFLKDNREKIEKILTFRIPYYVGPLARGNSRFAWMTRKSEETITPWNFEEVVDKGASAQSFIERMTNFDKNLPNEKVLPKHSLLYEYFTVYNELTKVKYVTEGMRKPAFLSGEQKKAIVDLLFKTNRKVTVKQLKEDYFKKIECFDSVEISGVEDRFNASLGTYHDLLKIIKDKDFLDNEENEDILEDIVLTLTLFEDREMIEERLKTYAHLFDDKVMKQLKRRRYTGWGRLSRKLINGIRDKQSGKTILDFLKSDGFANRNFMQLIHDDSLTFKEDIQKAQVSGQGDSLHEHIANLAGSPAIKKGILQTVKVVDELVKVMGRHKPENIVIEMARENQTTQKGQKNSRERMKRIEEGIKELGSQILKEHPVENTQLQNEKLYLYYLQNGRDMYVDQELDINRLSDYDVDHIVPQSFLKDDSIDNKVLTRSDKARGKSDNVPSEEVVKKMKNYWRQLLNAKLITQRKFDNLTKAERGGLSELDKAGFIKRQLVETRQITKHVAQILDSRMNTKYDENDKLIREVKVITLKSKLVSDFRKDFQFYKVREINNYHHAHDAYLNAVVGTALIKKYPKLESEFVYGDYKVYDVRKMIAKSEQEIGKATAKYFFYSNIMNFFKTEITLANGEIRKRPLIETNGETGEIVWDKGRDFATVRKVLSMPQVNIVKKTEVQTGGFSKESILPKRNSDKLIARKKDWDPKKYGGFDSPTVAYSVLVVAKVEKGKSKKLKSVKELLGITIMERSSFEKNPIDFLEAKGYKEVKKDLIIKLPKYSLFELENGRKRMLASAGELQKGNELALPSKYVNFLYLASHYEKLKGSPEDNEQKQLFVEQHKHYLDEIIEQISEFSKRVILADANLDKVLSAYNKHRDKPIREQAENIIHLFTLTNLGAPAAFKYFDTTIDRKRYTSTKEVLDATLIHQSITGLYETRIDLSQLGGDGGGGGGSEAAAKGGGGSGGTLGDQGSRGSDPLPEPRVTLTVEGIPTEFLVNTGAEHSVLTKPMGKMGSKRTVVAGATGSKVYPWTTKRLLKIGQKQVTHSFLVIPECPAPLLGRDLLTKLKAQIQFSTEGPQVTWEDRPAMCLVLNLEEEYRLHEKPVPPSIDPSWLQLFPMVWAEKAGMGLANQVPPVVVELKSDASPVAVRQYPMSKEAREGIRPHIQRFLDLGILVPCQSPWNTPLLPVKKPGTNDYRPVQDLREVNKRVQDIHPTVPNPYNLLSSLPPSHTWYSVLDLKDAFFCLKLHPNSQPLFAFEWRDPEKGNTGQLTWTRLPQGFKNSPTLFNEALHRDLASFRALNPQVVMLQYVDDLLVAAPTYRDCKEGTRRLLQELSKLGYRVSAKKAQLCREEVTYLGYLLKGGKRWLTPARKATVMKIPTPTTPRQVREFLGKAGFCRLFIPGFASLAAPLYPLTRPKVPFTWTEAHQEAFGRIKEALLSAPALALPDLTKPFALYVDEKEGVARGVLTQTLGPWRRPVAYLSKKLDPVASGWPTCLKAIAAVALLLKDADKLTLGQNVLVIAPHNLESIVRQPPDRWMTNARMTHYQSLLLNERVSFAPPAILNPATLLPVESDDTPIHICSEILAEETGTRPDLRDQPLPGVPAWYTDGSSFIMDGRRQAGAAIVDNKRTVWASNLPEGTSAQKAELIALTQALRLAEGKSINIYTDSRYAFATAHVHGAIYKQRGWLTSAGKDIKNKEEILALLEAIHLPKRVAIIHCPGHQRGTDPVATGNRKADEAAKQAAQSTRILTETTKNAGKRTADGSEFEKRTADGSEFESPKKKAKVE

SEQ ID NO: 1778 - protein, 2237 aa, synthetic construct
MPAAKRVKLDGGDKKYSIGLDIGTNSVGWAVITDEYKVPSKKFKVLGNTDRHSIKKNLIGALLFDSGETAEATRLKRTARRRYTRRKNRICYLQEIFSNEMAKVDDSFFHRLEESFLVEEDKKHERHPIFGNIVDEVAYHEKYPTIYHLRKKLVDSTDKADLRLIYLALAHMIKFRGHFLIEGDLNPDNSDVDKLFIQLVQTYNQLFEENPINASGVDAKAILSARLSKSRRLENLIAQLPGEKKNGLFGNLIALSLGLTPNFKSNFDLAEDAKLQLSKDTYDDDLDNLLAQIGDQYADLFLAAKNLSDAILLSDILRVNTEITKAPLSASMIKRYDEHHQDLTLLKALVRQQLPEKYKEIFFDQSKNGYAGYIDGGASQEEFYKFIKPILEKMDGTEELLVKLNREDLLRKQRTFDNGSIPHQIHLGELHAILRRQEDFYPFLKDNREKIEKILTFRIPYYVGPLARGNSRFAWMTRKSEETITPWNFEEVVDKGASAQSFIERMTNFDKNLPNEKVLPKHSLLYEYFTVYNELTKVKYVTEGMRKPAFLSGEQKKAIVDLLFKTNRKVTVKQLKEDYFKKIECFDSVEISGVEDRFNASLGTYHDLLKIIKDKDFLDNEENEDILEDIVLTLTLFEDREMIEERLKTYAHLFDDKVMKQLKRRRYTGWGRLSRKLINGIRDKQSGKTILDFLKSDGFANRNFMQLIHDDSLTFKEDIQKAQVSGQGDSLHEHIANLAGSPAIKKGILQTVKVVDELVKVMGRHKPENIVIEMARENQTTQKGQKNSRERMKRIEEGIKELGSQILKEHPVENTQLQNEKLYLYYLQNGRDMYVDQELDINRLSDYDVDHIVPQSFLKDDSIDNKVLTRSDKARGKSDNVPSEEVVKKMKNYWRQLLNAKLITQRKFDNLTKAERGGLSELDKAGFIKRQLVETRQITKHVAQILDSRMNTKYDENDKLIREVKVITLKSKLVSDFRKDFQFYKVREINNYHHAHDAYLNAVVGTALIKKYPKLESEFVYGDYKVYDVRKMIAKSEQEIGKATAKYFFYSNIMNFFKTEITLANGEIRKRPLIETNGETGEIVWDKGRDFATVRKVLSMPQVNIVKKTEVQTGGFSKESILPKRNSDKLIARKKDWDPKKYGGFDSPTVAYSVLVVAKVEKGKSKKLKSVKELLGITIMERSSFEKNPIDFLEAKGYKEVKKDLIIKLPKYSLFELENGRKRMLASAGELQKGNELALPSKYVNFLYLASHYEKLKGSPEDNEQKQLFVEQHKHYLDEIIEQISEFSKRVILADANLDKVLSAYNKHRDKPIREQAENIIHLFTLTNLGAPAAFKYFDTTIDRKRYTSTKEVLDATLIHQSITGLYETRIDLSQLGGDGGEAAAKEAAAKEAAAKEAAAKEAAAKEAAAKGGTLGDQGSRGSDPLPEPRVTLTVEGIPTEFLVNTGAEHSVLTKPMGKMGSKRTVVAGATGSKVYPWTTKRLLKIGQKQVTHSFLVIPECPAPLLGRDLLTKLKAQIQFSTEGPQVTWEDRPAMCLVLNLEEEYRLHEKPVPPSIDPSWLQLFPMVWAEKAGMGLANQVPPVVVELKSDASPVAVRQYPMSKEAREGIRPHIQRFLDLGILVPCQSPWNTPLLPVKKPGTNDYRPVQDLREVNKRVQDIHPTVPNPYNLLSSLPPSHTWYSVLDLKDAFFCLKLHPNSQPLFAFEWRDPEKGNTGQLTWTRLPQGFKNSPTLFNEALHRDLASFRALNPQVVMLQYVDDLLVAAPTYRDCKEGTRRLLQELSKLGYRVSAKKAQLCREEVTYLGYLLKGGKRWLTPARKATVMKIPTPTTPRQVREFLGKAGFCRLFIPGFASLAAPLYPLTRPKVPFTWTEAHQEAFGRIKEALLSAPALALPDLTKPFALYVDEKEGVARGVLTQTLGPWRRPVAYLSKKLDPVASGWPTCLKAIAAVALLLKDADKLTLGQNVLVIAPHNLESIVRQPPDRWMTNARMTHYQSLLLNERVSFAPPAILNPATLLPVESDDTPIHICSEILAEETGTRPDLRDQPLPGVPAWYTDGSSFIMDGRRQAGAAIVDNKRTVWASNLPEGTSAQKAELIALTQALRLAEGKSINIYTDSRYAFATAHVHGAIYKQRGWLTSAGKDIKNKEEILALLEAIHLPKRVAIIHCPGHQRGTDPVATGNRKADEAAKQAAQSTRILTETTKNAGKRTADGSEFEKRTADGSEFESPKKKAKVE

SEQ ID NO: 1779 - protein, 2216 aa, synthetic construct
MPAAKRVKLDGGDKKYSIGLDIGTNSVGWAVITDEYKVPSKKFKVLGNTDRHSIKKNLIGALLFDSGETAEATRLKRTARRRYTRRKNRICYLQEIFSNEMAKVDDSFFHRLEESFLVEEDKKHERHPIFGNIVDEVAYHEKYPTIYHLRKKLVDSTDKADLRLIYLALAHMIKFRGHFLIEGDLNPDNSDVDKLFIQLVQTYNQLFEENPINASGVDAKAILSARLSKSRRLENLIAQLPGEKKNGLFGNLIALSLGLTPNFKSNFDLAEDAKLQLSKDTYDDDLDNLLAQIGDQYADLFLAAKNLSDAILLSDILRVNTEITKAPLSASMIKRYDEHHQDLTLLKALVRQQLPEKYKEIFFDQSKNGYAGYIDGGASQEEFYKFIKPILEKMDGTEELLVKLNREDLLRKQRTFDNGSIPHQIHLGELHAILRRQEDFYPFLKDNREKIEKILTFRIPYYVGPLARGNSRFAWMTRKSEETITPWNFEEVVDKGASAQSFIERMTNFDKNLPNEKVLPKHSLLYEYFTVYNELTKVKYVTEGMRKPAFLSGEQKKAIVDLLFKTNRKVTVKQLKEDYFKKIECFDSVEISGVEDRFNASLGTYHDLLKIIKDKDFLDNEENEDILEDIVLTLTLFEDREMIEERLKTYAHLFDDKVMKQLKRRRYTGWGRLSRKLINGIRDKQSGKTILDFLKSDGFANRNFMQLIHDDSLTFKEDIQKAQVSGQGDSLHEHIANLAGSPAIKKGILQTVKVVDELVKVMGRHKPENIVIEMARENQTTQKGQKNSRERMKRIEEGIKELGSQILKEHPVENTQLQNEKLYLYYLQNGRDMYVDQELDINRLSDYDVDHIVPQSFLKDDSIDNKVLTRSDKARGKSDNVPSEEVVKKMKNYWRQLLNAKLITQRKFDNLTKAERGGLSELDKAGFIKRQLVETRQITKHVAQILDSRMNTKYDENDKLIREVKVITLKSKLVSDFRKDFQFYKVREINNYHHAHDAYLNAVVGTALIKKYPKLESEFVYGDYKVYDVRKMIAKSEQEIGKATAKYFFYSNIMNFFKTEITLANGEIRKRPLIETNGETGEIVWDKGRDFATVRKVLSMPQVNIVKKTEVQTGGFSKESILPKRNSDKLIARKKDWDPKKYGGFDSPTVAYSVLVVAKVEKGKSKKLKSVKELLGITIMERSSFEKNPIDFLEAKGYKEVKKDLIIKLPKYSLFELENGRKRMLASAGELQKGNELALPSKYVNFLYLASHYEKLKGSPEDNEQKQLFVEQHKHYLDEIIEQISEFSKRVILADANLDKVLSAYNKHRDKPIREQAENIIHLFTLTNLGAPAAFKYFDTTIDRKRYTSTKEVLDATLIHQSITGLYETRIDLSQLGGDGGGGSPAPGGGGGTLGDQGSRGSDPLPEPRVTLTVEGIPTEFLVNTGAEHSVLTKPMGKMGSKRTVVAGATGSKVYPWTTKRLLKIGQKQVTHSFLVIPECPAPLLGRDLLTKLKAQIQFSTEGPQVTWEDRPAMCLVLNLEEEYRLHEKPVPPSIDPSWLQLFPMVWAEKAGMGLANQVPPVVVELKSDASPVAVRQYPMSKEAREGIRPHIQRFLDLGILVPCQSPWNTPLLPVKKPGTNDYRPVQDLREVNKRVQDIHPTVPNPYNLLSSLPPSHTWYSVLDLKDAFFCLKLHPNSQPLFAFEWRDPEKGNTGQLTWTRLPQGFKNSPTLFNEALHRDLASFRALNPQVVMLQYVDDLLVAAPTYRDCKEGTRRLLQELSKLGYRVSAKKAQLCREEVTYLGYLLKGGKRWLTPARKATVMKIPTPTTPRQVREFLGKAGFCRLFIPGFASLAAPLYPLTRPKVPFTWTEAHQEAFGRIKEALLSAPALALPDLTKPFALYVDEKEGVARGVLTQTLGPWRRPVAYLSKKLDPVASGWPTCLKAIAAVALLLKDADKLTLGQNVLVIAPHNLESIVRQPPDRWMTNARMTHYQSLLLNERVSFAPPAILNPATLLPVESDDTPIHICSEILAEETGTRPDLRDQPLPGVPAWYTDGSSFIMDGRRQAGAAIVDNKRTVWASNLPEGTSAQKAELIALTQALRLAEGKSINIYTDSRYAFATAHVHGAIYKQRGWLTSAGKDIKNKEEILALLEAIHLPKRVAIIHCPGHQRGTDPVATGNRKADEAAKQAAQSTRILTETTKNAGKRTADGSEFEKRTADGSEFESPKKKAKVE

SEQ ID NO: 1780 - protein, 2213 aa, synthetic construct
MPAAKRVKLDGGDKKYSIGLDIGTNSVGWAVITDEYKVPSKKFKVLGNTDRHSIKKNLIGALLFDSGETAEATRLKRTARRRYTRRKNRICYLQEIFSNEMAKVDDSFFHRLEESFLVEEDKKHERHPIFGNIVDEVAYHEKYPTIYHLRKKLVDSTDKADLRLIYLALAHMIKFRGHFLIEGDLNPDNSDVDKLFIQLVQTYNQLFEENPINASGVDAKAILSARLSKSRRLENLIAQLPGEKKNGLFGNLIALSLGLTPNFKSNFDLAEDAKLQLSKDTYDDDLDNLLAQIGDQYADLFLAAKNLSDAILLSDILRVNTEITKAPLSASMIKRYDEHHQDLTLLKALVRQQLPEKYKEIFFDQSKNGYAGYIDGGASQEEFYKFIKPILEKMDGTEELLVKLNREDLLRKQRTFDNGSIPHQIHLGELHAILRRQEDFYPFLKDNREKIEKILTFRIPYYVGPLARGNSRFAWMTRKSEETITPWNFEEVVDKGASAQSFIERMTNFDKNLPNEKVLPKHSLLYEYFTVYNELTKVKYVTEGMRKPAFLSGEQKKAIVDLLFKTNRKVTVKQLKEDYFKKIECFDSVEISGVEDRFNASLGTYHDLLKIIKDKDFLDNEENEDILEDIVLTLTLFEDREMIEERLKTYAHLFDDKVMKQLKRRRYTGWGRLSRKLINGIRDKQSGKTILDFLKSDGFANRNFMQLIHDDSLTFKEDIQKAQVSGQGDSLHEHIANLAGSPAIKKGILQTVKVVDELVKVMGRHKPENIVIEMARENQTTQKGQKNSRERMKRIEEGIKELGSQILKEHPVENTQLQNEKLYLYYLQNGRDMYVDQELDINRLSDYDVDHIVPQSFLKDDSIDNKVLTRSDKARGKSDNVPSEEVVKKMKNYWRQLLNAKLITQRKFDNLTKAERGGLSELDKAGFIKRQLVETRQITKHVAQILDSRMNTKYDENDKLIREVKVITLKSKLVSDFRKDFQFYKVREINNYHHAHDAYLNAVVGTALIKKYPKLESEFVYGDYKVYDVRKMIAKSEQEIGKATAKYFFYSNIMNFFKTEITLANGEIRKRPLIETNGETGEIVWDKGRDFATVRKVLSMPQVNIVKKTEVQTGGFSKESILPKRNSDKLIARKKDWDPKKYGGFDSPTVAYSVLVVAKVEKGKSKKLKSVKELLGITIMERSSFEKNPIDFLEAKGYKEVKKDLIIKLPKYSLFELENGRKRMLASAGELQKGNELALPSKYVNFLYLASHYEKLKGSPEDNEQKQLFVEQHKHYLDEIIEQISEFSKRVILADANLDKVLSAYNKHRDKPIREQAENIIHLFTLTNLGAPAAFKYFDTTIDRKRYTSTKEVLDATLIHQSITGLYETRIDLSQLGGDGGPAPGSSGGTLGDQGSRGSDPLPEPRVTLTVEGIPTEFLVNTGAEHSVLTKPMGKMGSKRTVVAGATGSKVYPWTTKRLLKIGQKQVTHSFLVIPECPAPLLGRDLLTKLKAQIQFSTEGPQVTWEDRPAMCLVLNLEEEYRLHEKPVPPSIDPSWLQLFPMVWAEKAGMGLANQVPPVVVELKSDASPVAVRQYPMSKEAREGIRPHIQRFLDLGILVPCQSPWNTPLLPVKKPGTNDYRPVQDLREVNKRVQDIHPTVPNPYNLLSSLPPSHTWYSVLDLKDAFFCLKLHPNSQPLFAFEWRDPEKGNTGQLTWTRLPQGFKNSPTLFNEALHRDLASFRALNPQVVMLQYVDDLLVAAPTYRDCKEGTRRLLQELSKLGYRVSAKKAQLCREEVTYLGYLLKGGKRWLTPARKATVMKIPTPTTPRQVREFLGKAGFCRLFIPGFASLAAPLYPLTRPKVPFTWTEAHQEAFGRIKEALLSAPALALPDLTKPFALYVDEKEGVARGVLTQTLGPWRRPVAYLSKKLDPVASGWPTCLKAIAAVALLLKDADKLTLGQNVLVIAPHNLESIVRQPPDRWMTNARMTHYQSLLLNERVSFAPPAILNPATLLPVESDDTPIHICSEILAEETGTRPDLRDQPLPGVPAWYTDGSSFIMDGRRQAGAAIVDNKRTVWASNLPEGTSAQKAELIALTQALRLAEGKSINIYTDSRYAFATAHVHGAIYKQRGWLTSAGKDIKNKEEILALLEAIHLPKRVAIIHCPGHQRGTDPVATGNRKADEAAKQAAQSTRILTETTKNAGKRTADGSEFEKRTADGSEFESPKKKAKVE

SEQ ID NO: 1781 - protein, 2222 aa, synthetic construct
MPAAKRVKLDGGDKKYSIGLDIGTNSVGWAVITDEYKVPSKKFKVLGNTDRHSIKKNLIGALLFDSGETAEATRLKRTARRRYTRRKNRICYLQEIFSNEMAKVDDSFFHRLEESFLVEEDKKHERHPIFGNIVDEVAYHEKYPTIYHLRKKLVDSTDKADLRLIYLALAHMIKFRGHFLIEGDLNPDNSDVDKLFIQLVQTYNQLFEENPINASGVDAKAILSARLSKSRRLENLIAQLPGEKKNGLFGNLIALSLGLTPNFKSNFDLAEDAKLQLSKDTYDDDLDNLLAQIGDQYADLFLAAKNLSDAILLSDILRVNTEITKAPLSASMIKRYDEHHQDLTLLKALVRQQLPEKYKEIFFDQSKNGYAGYIDGGASQEEFYKFIKPILEKMDGTEELLVKLNREDLLRKQRTFDNGSIPHQIHLGELHAILRRQEDFYPFLKDNREKIEKILTFRIPYYVGPLARGNSRFAWMTRKSEETITPWNFEEVVDKGASAQSFIERMTNFDKNLPNEKVLPKHSLLYEYFTVYNELTKVKYVTEGMRKPAFLSGEQKKAIVDLLFKTNRKVTVKQLKEDYFKKIECFDSVEISGVEDRFNASLGTYHDLLKIIKDKDFLDNEENEDILEDIVLTLTLFEDREMIEERLKTYAHLFDDKVMKQLKRRRYTGWGRLSRKLINGIRDKQSGKTILDFLKSDGFANRNFMQLIHDDSLTFKEDIQKAQVSGQGDSLHEHIANLAGSPAIKKGILQTVKVVDELVKVMGRHKPENIVIEMARENQTTQKGQKNSRERMKRIEEGIKELGSQILKEHPVENTQLQNEKLYLYYLQNGRDMYVDQELDINRLSDYDVDHIVPQSFLKDDSIDNKVLTRSDKARGKSDNVPSEEVVKKMKNYWRQLLNAKLITQRKFDNLTKAERGGLSELDKAGFIKRQLVETRQITKHVAQILDSRMNTKYDENDKLIREVKVITLKSKLVSDFRKDFQFYKVREINNYHHAHDAYLNAVVGTALIKKYPKLESEFVYGDYKVYDVRKMIAKSEQEIGKATAKYFFYSNIMNFFKTEITLANGEIRKRPLIETNGETGEIVWDKGRDFATVRKVLSMPQVNIVKKTEVQTGGFSKESILPKRNSDKLIARKKDWDPKKYGGFDSPTVAYSVLVVAKVEKGKSKKLKSVKELLGITIMERSSFEKNPIDFLEAKGYKEVKKDLIIKLPKYSLFELENGRKRMLASAGELQKGNELALPSKYVNFLYLASHYEKLKGSPEDNEQKQLFVEQHKHYLDEIIEQISEFSKRVILADANLDKVLSAYNKHRDKPIREQAENIIHLFTLTNLGAPAAFKYFDTTIDRKRYTSTKEVLDATLIHQSITGLYETRIDLSQLGGDGGEAAAKGGGGSEAAAKGGTLGDQGSRGSDPLPEPRVTLTVEGIPTEFLVNTGAEHSVLTKPMGKMGSKRTVVAGATGSKVYPWTTKRLLKIGQKQVTHSFLVIPECPAPLLGRDLLTKLKAQIQFSTEGPQVTWEDRPAMCLVLNLEEEYRLHEKPVPPSIDPSWLQLFPMVWAEKAGMGLANQVPPVVVELKSDASPVAVRQYPMSKEAREGIRPHIQRFLDLGILVPCQSPWNTPLLPVKKPGTNDYRPVQDLREVNKRVQDIHPTVPNPYNLLSSLPPSHTWYSVLDLKDAFFCLKLHPNSQPLFAFEWRDPEKGNTGQLTWTRLPQGFKNSPTLFNEALHRDLASFRALNPQVVMLQYVDDLLVAAPTYRDCKEGTRRLLQELSKLGYRVSAKKAQLCREEVTYLGYLLKGGKRWLTPARKATVMKIPTPTTPRQVREFLGKAGFCRLFIPGFASLAAPLYPLTRPKVPFTWTEAHQEAFGRIKEALLSAPALALPDLTKPFALYVDEKEGVARGVLTQTLGPWRRPVAYLSKKLDPVASGWPTCLKAIAAVALLLKDADKLTLGQNVLVIAPHNLESIVRQPPDRWMTNARMTHYQSLLLNERVSFAPPAILNPATLLPVESDDTPIHICSEILAEETGTRPDLRDQPLPGVPAWYTDGSSFIMDGRRQAGAAIVDNKRTVWASNLPEGTSAQKAELIALTQALRLAEGKSINIYTDSRYAFATAHVHGAIYKQRGWLTSAGKDIKNKEEILALLEAIHLPKRVAIIHCPGHQRGTDPVATGNRKADEAAKQAAQSTRILTETTKNAGKRTADGSEFEKRTADGSEFESPKKKAKVE

SEQ ID NO: 1782 - protein, 2219 aa, synthetic construct
MPAAKRVKLDGGDKKYSIGLDIGTNSVGWAVITDEYKVPSKKFKVLGNTDRHSIKKNLIGALLFDSGETAEATRLKRTARRRYTRRKNRICYLQEIFSNEMAKVDDSFFHRLEESFLVEEDKKHERHPIFGNIVDEVAYHEKYPTIYHLRKKLVDSTDKADLRLIYLALAHMIKFRGHFLIEGDLNPDNSDVDKLFIQLVQTYNQLFEENPINASGVDAKAILSARLSKSRRLENLIAQLPGEKKNGLFGNLIALSLGLTPNFKSNFDLAEDAKLQLSKDTYDDDLDNLLAQIGDQYADLFLAAKNLSDAILLSDILRVNTEITKAPLSASMIKRYDEHHQDLTLLKALVRQQLPEKYKEIFFDQSKNGYAGYIDGGASQEEFYKFIKPILEKMDGTEELLVKLNREDLLRKQRTFDNGSIPHQIHLGELHAILRRQEDFYPFLKDNREKIEKILTFRIPYYVGPLARGNSRFAWMTRKSEETITPWNFEEVVDKGASAQSFIERMTNFDKNLPNEKVLPKHSLLYEYFTVYNELTKVKYVTEGMRKPAFLSGEQKKAIVDLLFKTNRKVTVKQLKEDYFKKIECFDSVEISGVEDRFNASLGTYHDLLKIIKDKDFLDNEENEDILEDIVLTLTLFEDREMIEERLKTYAHLFDDKVMKQLKRRRYTGWGRLSRKLINGIRDKQSGKTILDFLKSDGFANRNFMQLIHDDSLTFKEDIQKAQVSGQGDSLHEHIANLAGSPAIKKGILQTVKVVDELVKVMGRHKPENIVIEMARENQTTQKGQKNSRERMKRIEEGIKELGSQILKEHPVENTQLQNEKLYLYYLQNGRDMYVDQELDINRLSDYDVDHIVPQSFLKDDSIDNKVLTRSDKARGKSDNVPSEEVVKKMKNYWRQLLNAKLITQRKFDNLTKAERGGLSELDKAGFIKRQLVETRQITKHVAQILDSRMNTKYDENDKLIREVKVITLKSKLVSDFRKDFQFYKVREINNYHHAHDAYLNAVVGTALIKKYPKLESEFVYGDYKVYDVRKMIAKSEQEIGKATAKYFFYSNIMNFFKTEITLANGEIRKRPLIETNGETGEIVWDKGRDFATVRKVLSMPQVNIVKKTEVQTGGFSKESILPKRNSDKLIARKKDWDPKKYGGFDSPTVAYSVLVVAKVEKGKSKKLKSVKELLGITIMERSSFEKNPIDFLEAKGYKEVKKDLIIKLPKYSLFELENGRKRMLASAGELQKGNELALPSKYVNFLYLASHYEKLKGSPEDNEQKQLFVEQHKHYLDEIIEQISEFSKRVILADANLDKVLSAYNKHRDKPIREQAENIIHLFTLTNLGAPAAFKYFDTTIDRKRYTSTKEVLDATLIHQSITGLYETRIDLSQLGGDGGGSAGSAAGSGEFGGTLGDQGSRGSDPLPEPRVTLTVEGIPTEFLVNTGAEHSVLTKPMGKMGSKRTVVAGATGSKVYPWTTKRLLKIGQKQVTHSFLVIPECPAPLLGRDLLTKLKAQIQFSTEGPQVTWEDRPAMCLVLNLEEEYRLHEKPVPPSIDPSWLQLFPMVWAEKAGMGLANQVPPVVVELKSDASPVAVRQYPMSKEAREGIRPHIQRFLDLGILVPCQSPWNTPLLPVKKPGTNDYRPVQDLREVNKRVQDIHPTVPNPYNLLSSLPPSHTWYSVLDLKDAFFCLKLHPNSQPLFAFEWRDPEKGNTGQLTWTRLPQGFKNSPTLFNEALHRDLASFRALNPQVVMLQYVDDLLVAAPTYRDCKEGTRRLLQELSKLGYRVSAKKAQLCREEVTYLGYLLKGGKRWLTPARKATVMKIPTPTTPRQVREFLGKAGFCRLFIPGFASLAAPLYPLTRPKVPFTWTEAHQEAFGRIKEALLSAPALALPDLTKPFALYVDEKEGVARGVLTQTLGPWRRPVAYLSKKLDPVASGWPTCLKAIAAVALLLKDADKLTLGQNVLVIAPHNLESIVRQPPDRWMTNARMTHYQSLLLNERVSFAPPAILNPATLLPVESDDTPIHICSEILAEETGTRPDLRDQPLPGVPAWYTDGSSFIMDGRRQAGAAIVDNKRTVWASNLPEGTSAQKAELIALTQALRLAEGKSINIYTDSRYAFATAHVHGAIYKQRGWLTSAGKDIKNKEEILALLEAIHLPKRVAIIHCPGHQRGTDPVATGNRKADEAAKQAAQSTRILTETTKNAGKRTADGSEFEKRTADGSEFESPKKKAKVE

SEQ ID NO: 1783 - protein, 2218 aa, synthetic construct
MPAAKRVKLDGGDKKYSIGLDIGTNSVGWAVITDEYKVPSKKFKVLGNTDRHSIKKNLIGALLFDSGETAEATRLKRTARRRYTRRKNRICYLQEIFSNEMAKVDDSFFHRLEESFLVEEDKKHERHPIFGNIVDEVAYHEKYPTIYHLRKKLVDSTDKADLRLIYLALAHMIKFRGHFLIEGDLNPDNSDVDKLFIQLVQTYNQLFEENPINASGVDAKAILSARLSKSRRLENLIAQLPGEKKNGLFGNLIALSLGLTPNFKSNFDLAEDAKLQLSKDTYDDDLDNLLAQIGDQYADLFLAAKNLSDAILLSDILRVNTEITKAPLSASMIKRYDEHHQDLTLLKALVRQQLPEKYKEIFFDQSKNGYAGYIDGGASQEEFYKFIKPILEKMDGTEELLVKLNREDLLRKQRTFDNGSIPHQIHLGELHAILRRQEDFYPFLKDNREKIEKILTFRIPYYVGPLARGNSRFAWMTRKSEETITPWNFEEVVDKGASAQSFIERMTNFDKNLPNEKVLPKHSLLYEYFTVYNELTKVKYVTEGMRKPAFLSGEQKKAIVDLLFKTNRKVTVKQLKEDYFKKIECFDSVEISGVEDRFNASLGTYHDLLKIIKDKDFLDNEENEDILEDIVLTLTLFEDREMIEERLKTYAHLFDDKVMKQLKRRRYTGWGRLSRKLINGIRDKQSGKTILDFLKSDGFANRNFMQLIHDDSLTFKEDIQKAQVSGQGDSLHEHIANLAGSPAIKKGILQTVKVVDELVKVMGRHKPENIVIEMARENQTTQKGQKNSRERMKRIEEGIKELGSQILKEHPVENTQLQNEKLYLYYLQNGRDMYVDQELDINRLSDYDVDHIVPQSFLKDDSIDNKVLTRSDKARGKSDNVPSEEVVKKMKNYWRQLLNAKLITQRKFDNLTKAERGGLSELDKAGFIKRQLVETRQITKHVAQILDSRMNTKYDENDKLIREVKVITLKSKLVSDFRKDFQFYKVREINNYHHAHDAYLNAVVGTALIKKYPKLESEFVYGDYKVYDVRKMIAKSEQEIGKATAKYFFYSNIMNFFKTEITLANGEIRKRPLIETNGETGEIVWDKGRDFATVRKVLSMPQVNIVKKTEVQTGGFSKESILPKRNSDKLIARKKDWDPKKYGGFDSPTVAYSVLVVAKVEKGKSKKLKSVKELLGITIMERSSFEKNPIDFLEAKGYKEVKKDLIIKLPKYSLFELENGRKRMLASAGELQKGNELALPSKYVNFLYLASHYEKLKGSPEDNEQKQLFVEQHKHYLDEIIEQISEFSKRVILADANLDKVLSAYNKHRDKPIREQAENIIHLFTLTNLGAPAAFKYFDTTIDRKRYTSTKEVLDATLIHQSITGLYETRIDLSQLGGDGGPAPAPAPAPAPGGTLGDQGSRGSDPLPEPRVTLTVEGIPTEFLVNTGAEHSVLTKPMGKMGSKRTVVAGATGSKVYPWTTKRLLKIGQKQVTHSFLVIPECPAPLLGRDLLTKLKAQIQFSTEGPQVTWEDRPAMCLVLNLEEEYRLHEKPVPPSIDPSWLQLFPMVWAEKAGMGLANQVPPVVVELKSDASPVAVRQYPMSKEAREGIRPHIQRFLDLGILVPCQSPWNTPLLPVKKPGTNDYRPVQDLREVNKRVQDIHPTVPNPYNLLSSLPPSHTWYSVLDLKDAFFCLKLHPNSQPLFAFEWRDPEKGNTGQLTWTRLPQGFKNSPTLFNEALHRDLASFRALNPQVVMLQYVDDLLVAAPTYRDCKEGTRRLLQELSKLGYRVSAKKAQLCREEVTYLGYLLKGGKRWLTPARKATVMKIPTPTTPRQVREFLGKAGFCRLFIPGFASLAAPLYPLTRPKVPFTWTEAHQEAFGRIKEALLSAPALALPDLTKPFALYVDEKEGVARGVLTQTLGPWRRPVAYLSKKLDPVASGWPTCLKAIAAVALLLKDADKLTLGQNVLVIAPHNLESIVRQPPDRWMTNARMTHYQSLLLNERVSFAPPAILNPATLLPVESDDTPIHICSEILAEETGTRPDLRDQPLPGVPAWYTDGSSFIMDGRRQAGAAIVDNKRTVWASNLPEGTSAQKAELIALTQALRLAEGKSINIYTDSRYAFATAHVHGAIYKQRGWLTSAGKDIKNKEEILALLEAIHLPKRVAIIHCPGHQRGTDPVATGNRKADEAAKQAAQSTRILTETTKNAGKRTADGSEFEKRTADGSEFESPKKKAKVE

SEQ ID NO: 1784 - protein, 2253 aa, synthetic construct
MPAAKRVKLDGGDKKYSIGLDIGTNSVGWAVITDEYKVPSKKFKVLGNTDRHSIKKNLIGALLFDSGETAEATRLKRTARRRYTRRKNRICYLQEIFSNEMAKVDDSFFHRLEESFLVEEDKKHERHPIFGNIVDEVAYHEKYPTIYHLRKKLVDSTDKADLRLIYLALAHMIKFRGHFLIEGDLNPDNSDVDKLFIQLVQTYNQLFEENPINASGVDAKAILSARLSKSRRLENLIAQLPGEKKNGLFGNLIALSLGLTPNFKSNFDLAEDAKLQLSKDTYDDDLDNLLAQIGDQYADLFLAAKNLSDAILLSDILRVNTEITKAPLSASMIKRYDEHHQDLTLLKALVRQQLPEKYKEIFFDQSKNGYAGYIDGGASQEEFYKFIKPILEKMDGTEELLVKLNREDLLRKQRTFDNGSIPHQIHLGELHAILRRQEDFYPFLKDNREKIEKILTFRIPYYVGPLARGNSRFAWMTRKSEETITPWNFEEVVDKGASAQSFIERMTNFDKNLPNEKVLPKHSLLYEYFTVYNELTKVKYVTEGMRKPAFLSGEQKKAIVDLLFKTNRKVTVKQLKEDYFKKIECFDSVEISGVEDRFNASLGTYHDLLKIIKDKDFLDNEENEDILEDIVLTLTLFEDREMIEERLKTYAHLFDDKVMKQLKRRRYTGWGRLSRKLINGIRDKQSGKTILDFLKSDGFANRNFMQLIHDDSLTFKEDIQKAQVSGQGDSLHEHIANLAGSPAIKKGILQTVKVVDELVKVMGRHKPENIVIEMARENQTTQKGQKNSRERMKRIEEGIKELGSQILKEHPVENTQLQNEKLYLYYLQNGRDMYVDQELDINRLSDYDVDHIVPQSFLKDDSIDNKVLTRSDKARGKSDNVPSEEVVKKMKNYWRQLLNAKLITQRKFDNLTKAERGGLSELDKAGFIKRQLVETRQITKHVAQILDSRMNTKYDENDKLIREVKVITLKSKLVSDFRKDFQFYKVREINNYHHAHDAYLNAVVGTALIKKYPKLESEFVYGDYKVYDVRKMIAKSEQEIGKATAKYFFYSNIMNFFKTEITLANGEIRKRPLIETNGETGEIVWDKGRDFATVRKVLSMPQVNIVKKTEVQTGGFSKESILPKRNSDKLIARKKDWDPKKYGGFDSPTVAYSVLVVAKVEKGKSKKLKSVKELLGITIMERSSFEKNPIDFLEAKGYKEVKKDLIIKLPKYSLFELENGRKRMLASAGELQKGNELALPSKYVNFLYLASHYEKLKGSPEDNEQKQLFVEQHKHYLDEIIEQISEFSKRVILADANLDKVLSAYNKHRDKPIREQAENIIHLFTLTNLGAPAAFKYFDTTIDRKRYTSTKEVLDATLIHQSITGLYETRIDLSQLGGDGGAEAAAKEAAAKEAAAKEAAAKALEAEAAAKEAAAKEAAAKEAAAKAGGTLGDQGSRGSDPLPEPRVTLTVEGIPTEFLVNTGAEHSVLTKPMGKMGSKRTVVAGATGSKVYPWTTKRLLKIGQKQVTHSFLVIPECPAPLLGRDLLTKLKAQIQFSTEGPQVTWEDRPAMCLVLNLEEEYRLHEKPVPPSIDPSWLQLFPMVWAEKAGMGLANQVPPVVVELKSDASPVAVRQYPMSKEAREGIRPHIQRFLDLGILVPCQSPWNTPLLPVKKPGTNDYRPVQDLREVNKRVQDIHPTVPNPYNLLSSLPPSHTWYSVLDLKDAFFCLKLHPNSQPLFAFEWRDPEKGNTGQLTWTRLPQGFKNSPTLFNEALHRDLASFRALNPQVVMLQYVDDLLVAAPTYRDCKEGTRRLLQELSKLGYRVSAKKAQLCREEVTYLGYLLKGGKRWLTPARKATVMKIPTPTTPRQVREFLGKAGFCRLFIPGFASLAAPLYPLTRPKVPFTWTEAHQEAFGRIKEALLSAPALALPDLTKPFALYVDEKEGVARGVLTQTLGPWRRPVAYLSKKLDPVASGWPTCLKAIAAVALLLKDADKLTLGQNVLVIAPHNLESIVRQPPDRWMTNARMTHYQSLLLNERVSFAPPAILNPATLLPVESDDTPIHICSEILAEETGTRPDLRDQPLPGVPAWYTDGSSFIMDGRRQAGAAIVDNKRTVWASNLPEGTSAQKAELIALTQALRLAEGKSINIYTDSRYAFATAHVHGAIYKQRGWLTSAGKDIKNKEEILALLEAIHLPKRVAIIHCPGHQRGTDPVATGNRKADEAAKQAAQSTRILTETTKNAGKRTADGSEFEKRTADGSEFESPKKKAKVE

SEQ ID NO: 1785 - protein, 2216 aa, synthetic construct
MPAAKRVKLDGGDKKYSIGLDIGTNSVGWAVITDEYKVPSKKFKVLGNTDRHSIKKNLIGALLFDSGETAEATRLKRTARRRYTRRKNRICYLQEIFSNEMAKVDDSFFHRLEESFLVEEDKKHERHPIFGNIVDEVAYHEKYPTIYHLRKKLVDSTDKADLRLIYLALAHMIKFRGHFLIEGDLNPDNSDVDKLFIQLVQTYNQLFEENPINASGVDAKAILSARLSKSRRLENLIAQLPGEKKNGLFGNLIALSLGLTPNFKSNFDLAEDAKLQLSKDTYDDDLDNLLAQIGDQYADLFLAAKNLSDAILLSDILRVNTEITKAPLSASMIKRYDEHHQDLTLLKALVRQQLPEKYKEIFFDQSKNGYAGYIDGGASQEEFYKFIKPILEKMDGTEELLVKLNREDLLRKQRTFDNGSIPHQIHLGELHAILRRQEDFYPFLKDNREKIEKILTFRIPYYVGPLARGNSRFAWMTRKSEETITPWNFEEVVDKGASAQSFIERMTNFDKNLPNEKVLPKHSLLYEYFTVYNELTKVKYVTEGMRKPAFLSGEQKKAIVDLLFKTNRKVTVKQLKEDYFKKIECFDSVEISGVEDRFNASLGTYHDLLKIIKDKDFLDNEENEDILEDIVLTLTLFEDREMIEERLKTYAHLFDDKVMKQLKRRRYTGWGRLSRKLINGIRDKQSGKTILDFLKSDGFANRNFMQLIHDDSLTFKEDIQKAQVSGQGDSLHEHIANLAGSPAIKKGILQTVKVVDELVKVMGRHKPENIVIEMARENQTTQKGQKNSRERMKRIEEGIKELGSQILKEHPVENTQLQNEKLYLYYLQNGRDMYVDQELDINRLSDYDVDHIVPQSFLKDDSIDNKVLTRSDKARGKSDNVPSEEVVKKMKNYWRQLLNAKLITQRKFDNLTKAERGGLSELDKAGFIKRQLVETRQITKHVAQILDSRMNTKYDENDKLIREVKVITLKSKLVSDFRKDFQFYKVREINNYHHAHDAYLNAVVGTALIKKYPKLESEFVYGDYKVYDVRKMIAKSEQEIGKATAKYFFYSNIMNFFKTEITLANGEIRKRPLIETNGETGEIVWDKGRDFATVRKVLSMPQVNIVKKTEVQTGGFSKESILPKRNSDKLIARKKDWDPKKYGGFDSPTVAYSVLVVAKVEKGKSKKLKSVKELLGITIMERSSFEKNPIDFLEAKGYKEVKKDLIIKLPKYSLFELENGRKRMLASAGELQKGNELALPSKYVNFLYLASHYEKLKGSPEDNEQKQLFVEQHKHYLDEIIEQISEFSKRVILADANLDKVLSAYNKHRDKPIREQAENIIHLFTLTNLGAPAAFKYFDTTIDRKRYTSTKEVLDATLIHQSITGLYETRIDLSQLGGDGGGGSGSSGGGGGTLGDQGSRGSDPLPEPRVTLTVEGIPTEFLVNTGAEHSVLTKPMGKMGSKRTVVAGATGSKVYPWTTKRLLKIGQKQVTHSFLVIPECPAPLLGRDLLTKLKAQIQFSTEGPQVTWEDRPAMCLVLNLEEEYRLHEKPVPPSIDPSWLQLFPMVWAEKAGMGLANQVPPVVVELKSDASPVAVRQYPMSKEAREGIRPHIQRFLDLGILVPCQSPWNTPLLPVKKPGTNDYRPVQDLREVNKRVQDIHPTVPNPYNLLSSLPPSHTWYSVLDLKDAFFCLKLHPNSQPLFAFEWRDPEKGNTGQLTWTRLPQGFKNSPTLFNEALHRDLASFRALNPQVVMLQYVDDLLVAAPTYRDCKEGTRRLLQELSKLGYRVSAKKAQLCREEVTYLGYLLKGGKRWLTPARKATVMKIPTPTTPRQVREFLGKAGFCRLFIPGFASLAAPLYPLTRPKVPFTWTEAHQEAFGRIKEALLSAPALALPDLTKPFALYVDEKEGVARGVLTQTLGPWRRPVAYLSKKLDPVASGWPTCLKAIAAVALLLKDADKLTLGQNVLVIAPHNLESIVRQPPDRWMTNARMTHYQSLLLNERVSFAPPAILNPATLLPVESDDTPIHICSEILAEETGTRPDLRDQPLPGVPAWYTDGSSFIMDGRRQAGAAIVDNKRTVWASNLPEGTSAQKAELIALTQALRLAEGKSINIYTDSRYAFATAHVHGAIYKQRGWLTSAGKDIKNKEEILALLEAIHLPKRVAIIHCPGHQRGTDPVATGNRKADEAAKQAAQSTRILTETTKNAGKRTADGSEFEKRTADGSEFESPKKKAKVE

SEQ ID NO: 1786 - protein, 2218 aa, synthetic construct
MPAAKRVKLDGGDKKYSIGLDIGTNSVGWAVITDEYKVPSKKFKVLGNTDRHSIKKNLIGALLFDSGETAEATRLKRTARRRYTRRKNRICYLQEIFSNEMAKVDDSFFHRLEESFLVEEDKKHERHPIFGNIVDEVAYHEKYPTIYHLRKKLVDSTDKADLRLIYLALAHMIKFRGHFLIEGDLNPDNSDVDKLFIQLVQTYNQLFEENPINASGVDAKAILSARLSKSRRLENLIAQLPGEKKNGLFGNLIALSLGLTPNFKSNFDLAEDAKLQLSKDTYDDDLDNLLAQIGDQYADLFLAAKNLSDAILLSDILRVNTEITKAPLSASMIKRYDEHHQDLTLLKALVRQQLPEKYKEIFFDQSKNGYAGYIDGGASQEEFYKFIKPILEKMDGTEELLVKLNREDLLRKQRTFDNGSIPHQIHLGELHAILRRQEDFYPFLKDNREKIEKILTFRIPYYVGPLARGNSRFAWMTRKSEETITPWNFEEVVDKGASAQSFIERMTNFDKNLPNEKVLPKHSLLYEYFTVYNELTKVKYVTEGMRKPAFLSGEQKKAIVDLLFKTNRKVTVKQLKEDYFKKIECFDSVEISGVEDRFNASLGTYHDLLKIIKDKDFLDNEENEDILEDIVLTLTLFEDREMIEERLKTYAHLFDDKVMKQLKRRRYTGWGRLSRKLINGIRDKQSGKTILDFLKSDGFANRNFMQLIHDDSLTFKEDIQKAQVSGQGDSLHEHIANLAGSPAIKKGILQTVKVVDELVKVMGRHKPENIVIEMARENQTTQKGQKNSRERMKRIEEGIKELGSQILKEHPVENTQLQNEKLYLYYLQNGRDMYVDQELDINRLSDYDVDHIVPQSFLKDDSIDNKVLTRSDKARGKSDNVPSEEVVKKMKNYWRQLLNAKLITQRKFDNLTKAERGGLSELDKAGFIKRQLVETRQITKHVAQILDSRMNTKYDENDKLIREVKVITLKSKLVSDFRKDFQFYKVREINNYHHAHDAYLNAVVGTALIKKYPKLESEFVYGDYKVYDVRKMIAKSEQEIGKATAKYFFYSNIMNFFKTEITLANGEIRKRPLIETNGETGEIVWDKGRDFATVRKVLSMPQVNIVKKTEVQTGGFSKESILPKRNSDKLIARKKDWDPKKYGGFDSPTVAYSVLVVAKVEKGKSKKLKSVKELLGITIMERSSFEKNPIDFLEAKGYKEVKKDLIIKLPKYSLFELENGRKRMLASAGELQKGNELALPSKYVNFLYLASHYEKLKGSPEDNEQKQLFVEQHKHYLDEIIEQISEFSKRVILADANLDKVLSAYNKHRDKPIREQAENIIHLFTLTNLGAPAAFKYFDTTIDRKRYTSTKEVLDATLIHQSITGLYETRIDLSQLGGDGGEAAAKPAPGGSGGTLGDQGSRGSDPLPEPRVTLTVEGIPTEFLVNTGAEHSVLTKPMGKMGSKRTVVAGATGSKVYPWTTKRLLKIGQKQVTHSFLVIPECPAPLLGRDLLTKLKAQIQFSTEGPQVTWEDRPAMCLVLNLEEEYRLHEKPVPPSIDPSWLQLFPMVWAEKAGMGLANQVPPVVVELKSDASPVAVRQYPMSKEAREGIRPHIQRFLDLGILVPCQSPWNTPLLPVKKPGTNDYRPVQDLREVNKRVQDIHPTVPNPYNLLSSLPPSHTWYSVLDLKDAFFCLKLHPNSQPLFAFEWRDPEKGNTGQLTWTRLPQGFKNSPTLFNEALHRDLASFRALNPQVVMLQYVDDLLVAAPTYRDCKEGTRRLLQELSKLGYRVSAKKAQLCREEVTYLGYLLKGGKRWLTPARKATVMKIPTPTTPRQVREFLGKAGFCRLFIPGFASLAAPLYPLTRPKVPFTWTEAHQEAFGRIKEALLSAPALALPDLTKPFALYVDEKEGVARGVLTQTLGPWRRPVAYLSKKLDPVASGWPTCLKAIAAVALLLKDADKLTLGQNVLVIAPHNLESIVRQPPDRWMTNARMTHYQSLLLNERVSFAPPAILNPATLLPVESDDTPIHICSEILAEETGTRPDLRDQPLPGVPAWYTDGSSFIMDGRRQAGAAIVDNKRTVWASNLPEGTSAQKAELIALTQALRLAEGKSINIYTDSRYAFATAHVHGAIYKQRGWLTSAGKDIKNKEEILALLEAIHLPKRVAIIHCPGHQRGTDPVATGNRKADEAAKQAAQSTRILTETTKNAGKRTADGSEFEKRTADGSEFESPKKKAKVE

SEQ ID NO: 1787 - protein, 2218 aa, synthetic construct
MPAAKRVKLDGGDKKYSIGLDIGTNSVGWAVITDEYKVPSKKFKVLGNTDRHSIKKNLIGALLFDSGETAEATRLKRTARRRYTRRKNRICYLQEIFSNEMAKVDDSFFHRLEESFLVEEDKKHERHPIFGNIVDEVAYHEKYPTIYHLRKKLVDSTDKADLRLIYLALAHMIKFRGHFLIEGDLNPDNSDVDKLFIQLVQTYNQLFEENPINASGVDAKAILSARLSKSRRLENLIAQLPGEKKNGLFGNLIALSLGLTPNFKSNFDLAEDAKLQLSKDTYDDDLDNLLAQIGDQYADLFLAAKNLSDAILLSDILRVNTEITKAPLSASMIKRYDEHHQDLTLLKALVRQQLPEKYKEIFFDQSKNGYAGYIDGGASQEEFYKFIKPILEKMDGTEELLVKLNREDLLRKQRTFDNGSIPHQIHLGELHAILRRQEDFYPFLKDNREKIEKILTFRIPYYVGPLARGNSRFAWMTRKSEETITPWNFEEVVDKGASAQSFIERMTNFDKNLPNEKVLPKHSLLYEYFTVYNELTKVKYVTEGMRKPAFLSGEQKKAIVDLLFKTNRKVTVKQLKEDYFKKIECFDSVEISGVEDRFNASLGTYHDLLKIIKDKDFLDNEENEDILEDIVLTLTLFEDREMIEERLKTYAHLFDDKVMKQLKRRRYTGWGRLSRKLINGIRDKQSGKTILDFLKSDGFANRNFMQLIHDDSLTFKEDIQKAQVSGQGDSLHEHIANLAGSPAIKKGILQTVKVVDELVKVMGRHKPENIVIEMARENQTTQKGQKNSRERMKRIEEGIKELGSQILKEHPVENTQLQNEKLYLYYLQNGRDMYVDQELDINRLSDYDVDHIVPQSFLKDDSIDNKVLTRSDKARGKSDNVPSEEVVKKMKNYWRQLLNAKLITQRKFDNLTKAERGGLSELDKAGFIKRQLVETRQITKHVAQILDSRMNTKYDENDKLIREVKVITLKSKLVSDFRKDFQFYKVREINNYHHAHDAYLNAVVGTALIKKYPKLESEFVYGDYKVYDVRKMIAKSEQEIGKATAKYFFYSNIMNFFKTEITLANGEIRKRPLIETNGETGEIVWDKGRDFATVRKVLSMPQVNIVKKTEVQTGGFSKESILPKRNSDKLIARKKDWDPKKYGGFDSPTVAYSVLVVAKVEKGKSKKLKSVKELLGITIMERSSFEKNPIDFLEAKGYKEVKKDLIIKLPKYSLFELENGRKRMLASAGELQKGNELALPSKYVNFLYLASHYEKLKGSPEDNEQKQLFVEQHKHYLDEIIEQISEFSKRVILADANLDKVLSAYNKHRDKPIREQAENIIHLFTLTNLGAPAAFKYFDTTIDRKRYTSTKEVLDATLIHQSITGLYETRIDLSQLGGDGGGGSPAPEAAAKGGTLGDQGSRGSDPLPEPRVTLTVEGIPTEFLVNTGAEHSVLTKPMGKMGSKRTVVAGATGSKVYPWTTKRLLKIGQKQVTHSFLVIPECPAPLLGRDLLTKLKAQIQFSTEGPQVTWEDRPAMCLVLNLEEEYRLHEKPVPPSIDPSWLQLFPMVWAEKAGMGLANQVPPVVVELKSDASPVAVRQYPMSKEAREGIRPHIQRFLDLGILVPCQSPWNTPLLPVKKPGTNDYRPVQDLREVNKRVQDIHPTVPNPYNLLSSLPPSHTWYSVLDLKDAFFCLKLHPNSQPLFAFEWRDPEKGNTGQLTWTRLPQGFKNSPTLFNEALHRDLASFRALNPQVVMLQYVDDLLVAAPTYRDCKEGTRRLLQELSKLGYRVSAKKAQLCREEVTYLGYLLKGGKRWLTPARKATVMKIPTPTTPRQVREFLGKAGFCRLFIPGFASLAAPLYPLTRPKVPFTWTEAHQEAFGRIKEALLSAPALALPDLTKPFALYVDEKEGVARGVLTQTLGPWRRPVAYLSKKLDPVASGWPTCLKAIAAVALLLKDADKLTLGQNVLVIAPHNLESIVRQPPDRWMTNARMTHYQSLLLNERVSFAPPAILNPATLLPVESDDTPIHICSEILAEETGTRPDLRDQPLPGVPAWYTDGSSFIMDGRRQAGAAIVDNKRTVWASNLPEGTSAQKAELIALTQALRLAEGKSINIYTDSRYAFATAHVHGAIYKQRGWLTSAGKDIKNKEEILALLEAIHLPKRVAIIHCPGHQRGTDPVATGNRKADEAAKQAAQSTRILTETTKNAGKRTADGSEFEKRTADGSEFESPKKKAKVE

SEQ ID NO: 1788 - protein, 2212 aa, synthetic construct
MPAAKRVKLDGGDKKYSIGLDIGTNSVGWAVITDEYKVPSKKFKVLGNTDRHSIKKNLIGALLFDSGETAEATRLKRTARRRYTRRKNRICYLQEIFSNEMAKVDDSFFHRLEESFLVEEDKKHERHPIFGNIVDEVAYHEKYPTIYHLRKKLVDSTDKADLRLIYLALAHMIKFRGHFLIEGDLNPDNSDVDKLFIQLVQTYNQLFEENPINASGVDAKAILSARLSKSRRLENLIAQLPGEKKNGLFGNLIALSLGLTPNFKSNFDLAEDAKLQLSKDTYDDDLDNLLAQIGDQYADLFLAAKNLSDAILLSDILRVNTEITKAPLSASMIKRYDEHHQDLTLLKALVRQQLPEKYKEIFFDQSKNGYAGYIDGGASQEEFYKFIKPILEKMDGTEELLVKLNREDLLRKQRTFDNGSIPHQIHLGELHAILRRQEDFYPFLKDNREKIEKILTFRIPYYVGPLARGNSRFAWMTRKSEETITPWNFEEVVDKGASAQSFIERMTNFDKNLPNEKVLPKHSLLYEYFTVYNELTKVKYVTEGMRKPAFLSGEQKKAIVDLLFKTNRKVTVKQLKEDYFKKIECFDSVEISGVEDRFNASLGTYHDLLKIIKDKDFLDNEENEDILEDIVLTLTLFEDREMIEERLKTYAHLFDDKVMKQLKRRRYTGWGRLSRKLINGIRDKQSGKTILDFLKSDGFANRNFMQLIHDDSLTFKEDIQKAQVSGQGDSLHEHIANLAGSPAIKKGILQTVKVVDELVKVMGRHKPENIVIEMARENQTTQKGQKNSRERMKRIEEGIKELGSQILKEHPVENTQLQNEKLYLYYLQNGRDMYVDQELDINRLSDYDVDHIVPQSFLKDDSIDNKVLTRSDKARGKSDNVPSEEVVKKMKNYWRQLLNAKLITQRKFDNLTKAERGGLSELDKAGFIKRQLVETRQITKHVAQILDSRMNTKYDENDKLIREVKVITLKSKLVSDFRKDFQFYKVREINNYHHAHDAYLNAVVGTALIKKYPKLESEFVYGDYKVYDVRKMIAKSEQEIGKATAKYFFYSNIMNFFKTEITLANGEIRKRPLIETNGETGEIVWDKGRDFATVRKVLSMPQVNIVKKTEVQTGGFSKESILPKRNSDKLIARKKDWDPKKYGGFDSPTVAYSVLVVAKVEKGKSKKLKSVKELLGITIMERSSFEKNPIDFLEAKGYKEVKKDLIIKLPKYSLFELENGRKRMLASAGELQKGNELALPSKYVNFLYLASHYEKLKGSPEDNEQKQLFVEQHKHYLDEIIEQISEFSKRVILADANLDKVLSAYNKHRDKPIREQAENIIHLFTLTNLGAPAAFKYFDTTIDRKRYTSTKEVLDATLIHQSITGLYETRIDLSQLGGDGGGGGGSGGTLGDQGSRGSDPLPEPRVTLTVEGIPTEFLVNTGAEHSVLTKPMGKMGSKRTVVAGATGSKVYPWTTKRLLKIGQKQVTHSFLVIPECPAPLLGRDLLTKLKAQIQFSTEGPQVTWEDRPAMCLVLNLEEEYRLHEKPVPPSIDPSWLQLFPMVWAEKAGMGLANQVPPVVVELKSDASPVAVRQYPMSKEAREGIRPHIQRFLDLGILVPCQSPWNTPLLPVKKPGTNDYRPVQDLREVNKRVQDIHPTVPNPYNLLSSLPPSHTWYSVLDLKDAFFCLKLHPNSQPLFAFEWRDPEKGNTGQLTWTRLPQGFKNSPTLFNEALHRDLASFRALNPQVVMLQYVDDLLVAAPTYRDCKEGTRRLLQELSKLGYRVSAKKAQLCREEVTYLGYLLKGGKRWLTPARKATVMKIPTPTTPRQVREFLGKAGFCRLFIPGFASLAAPLYPLTRPKVPFTWTEAHQEAFGRIKEALLSAPALALPDLTKPFALYVDEKEGVARGVLTQTLGPWRRPVAYLSKKLDPVASGWPTCLKAIAAVALLLKDADKLTLGQNVLVIAPHNLESIVRQPPDRWMTNARMTHYQSLLLNERVSFAPPAILNPATLLPVESDDTPIHICSEILAEETGTRPDLRDQPLPGVPAWYTDGSSFIMDGRRQAGAAIVDNKRTVWASNLPEGTSAQKAELIALTQALRLAEGKSINIYTDSRYAFATAHVHGAIYKQRGWLTSAGKDIKNKEEILALLEAIHLPKRVAIIHCPGHQRGTDPVATGNRKADEAAKQAAQSTRILTETTKNAGKRTADGSEFEKRTADGSEFESPKKKAKVE

SEQ ID NO: 1789 - protein, 2218 aa, synthetic construct
MPAAKRVKLDGGDKKYSIGLDIGTNSVGWAVITDEYKVPSKKFKVLGNTDRHSIKKNLIGALLFDSGETAEATRLKRTARRRYTRRKNRICYLQEIFSNEMAKVDDSFFHRLEESFLVEEDKKHERHPIFGNIVDEVAYHEKYPTIYHLRKKLVDSTDKADLRLIYLALAHMIKFRGHFLIEGDLNPDNSDVDKLFIQLVQTYNQLFEENPINASGVDAKAILSARLSKSRRLENLIAQLPGEKKNGLFGNLIALSLGLTPNFKSNFDLAEDAKLQLSKDTYDDDLDNLLAQIGDQYADLFLAAKNLSDAILLSDILRVNTEITKAPLSASMIKRYDEHHQDLTLLKALVRQQLPEKYKEIFFDQSKNGYAGYIDGGASQEEFYKFIKPILEKMDGTEELLVKLNREDLLRKQRTFDNGSIPHQIHLGELHAILRRQEDFYPFLKDNREKIEKILTFRIPYYVGPLARGNSRFAWMTRKSEETITPWNFEEVVDKGASAQSFIERMTNFDKNLPNEKVLPKHSLLYEYFTVYNELTKVKYVTEGMRKPAFLSGEQKKAIVDLLFKTNRKVTVKQLKEDYFKKIECFDSVEISGVEDRFNASLGTYHDLLKIIKDKDFLDNEENEDILEDIVLTLTLFEDREMIEERLKTYAHLFDDKVMKQLKRRRYTGWGRLSRKLINGIRDKQSGKTILDFLKSDGFANRNFMQLIHDDSLTFKEDIQKAQVSGQGDSLHEHIANLAGSPAIKKGILQTVKVVDELVKVMGRHKPENIVIEMARENQTTQKGQKNSRERMKRIEEGIKELGSQILKEHPVENTQLQNEKLYLYYLQNGRDMYVDQELDINRLSDYDVDHIVPQSFLKDDSIDNKVLTRSDKARGKSDNVPSEEVVKKMKNYWRQLLNAKLITQRKFDNLTKAERGGLSELDKAGFIKRQLVETRQITKHVAQILDSRMNTKYDENDKLIREVKVITLKSKLVSDFRKDFQFYKVREINNYHHAHDAYLNAVVGTALIKKYPKLESEFVYGDYKVYDVRKMIAKSEQEIGKATAKYFFYSNIMNFFKTEITLANGEIRKRPLIETNGETGEIVWDKGRDFATVRKVLSMPQVNIVKKTEVQTGGFSKESILPKRNSDKLIARKKDWDPKKYGGFDSPTVAYSVLVVAKVEKGKSKKLKSVKELLGITIMERSSFEKNPIDFLEAKGYKEVKKDLIIKLPKYSLFELENGRKRMLASAGELQKGNELALPSKYVNFLYLASHYEKLKGSPEDNEQKQLFVEQHKHYLDEIIEQISEFSKRVILADANLDKVLSAYNKHRDKPIREQAENIIHLFTLTNLGAPAAFKYFDTTIDRKRYTSTKEVLDATLIHQSITGLYETRIDLSQLGGDGGGGGEAAAKPAPGGTLGDQGSRGSDPLPEPRVTLTVEGIPTEFLVNTGAEHSVLTKPMGKMGSKRTVVAGATGSKVYPWTTKRLLKIGQKQVTHSFLVIPECPAPLLGRDLLTKLKAQIQFSTEGPQVTWEDRPAMCLVLNLEEEYRLHEKPVPPSIDPSWLQLFPMVWAEKAGMGLANQVPPVVVELKSDASPVAVRQYPMSKEAREGIRPHIQRFLDLGILVPCQSPWNTPLLPVKKPGTNDYRPVQDLREVNKRVQDIHPTVPNPYNLLSSLPPSHTWYSVLDLKDAFFCLKLHPNSQPLFAFEWRDPEKGNTGQLTWTRLPQGFKNSPTLFNEALHRDLASFRALNPQVVMLQYVDDLLVAAPTYRDCKEGTRRLLQELSKLGYRVSAKKAQLCREEVTYLGYLLKGGKRWLTPARKATVMKIPTPTTPRQVREFLGKAGFCRLFIPGFASLAAPLYPLTRPKVPFTWTEAHQEAFGRIKEALLSAPALALPDLTKPFALYVDEKEGVARGVLTQTLGPWRRPVAYLSKKLDPVASGWPTCLKAIAAVALLLKDADKLTLGQNVLVIAPHNLESIVRQPPDRWMTNARMTHYQSLLLNERVSFAPPAILNPATLLPVESDDTPIHICSEILAEETGTRPDLRDQPLPGVPAWYTDGSSFIMDGRRQAGAAIVDNKRTVWASNLPEGTSAQKAELIALTQALRLAEGKSINIYTDSRYAFATAHVHGAIYKQRGWLTSAGKDIKNKEEILALLEAIHLPKRVAIIHCPGHQRGTDPVATGNRKADEAAKQAAQSTRILTETTKNAGKRTADGSEFEKRTADGSEFESPKKKAKVE

SEQ ID NO: 1790 - protein, 2214 aa, synthetic construct
MPAAKRVKLDGGDKKYSIGLDIGTNSVGWAVITDEYKVPSKKFKVLGNTDRHSIKKNLIGALLFDSGETAEATRLKRTARRRYTRRKNRICYLQEIFSNEMAKVDDSFFHRLEESFLVEEDKKHERHPIFGNIVDEVAYHEKYPTIYHLRKKLVDSTDKADLRLIYLALAHMIKFRGHFLIEGDLNPDNSDVDKLFIQLVQTYNQLFEENPINASGVDAKAILSARLSKSRRLENLIAQLPGEKKNGLFGNLIALSLGLTPNFKSNFDLAEDAKLQLSKDTYDDDLDNLLAQIGDQYADLFLAAKNLSDAILLSDILRVNTEITKAPLSASMIKRYDEHHQDLTLLKALVRQQLPEKYKEIFFDQSKNGYAGYIDGGASQEEFYKFIKPILEKMDGTEELLVKLNREDLLRKQRTFDNGSIPHQIHLGELHAILRRQEDFYPFLKDNREKIEKILTFRIPYYVGPLARGNSRFAWMTRKSEETITPWNFEEVVDKGASAQSFIERMTNFDKNLPNEKVLPKHSLLYEYFTVYNELTKVKYVTEGMRKPAFLSGEQKKAIVDLLFKTNRKVTVKQLKEDYFKKIECFDSVEISGVEDRFNASLGTYHDLLKIIKDKDFLDNEENEDILEDIVLTLTLFEDREMIEERLKTYAHLFDDKVMKQLKRRRYTGWGRLSRKLINGIRDKQSGKTILDFLKSDGFANRNFMQLIHDDSLTFKEDIQKAQVSGQGDSLHEHIANLAGSPAIKKGILQTVKVVDELVKVMGRHKPENIVIEMARENQTTQKGQKNSRERMKRIEEGIKELGSQILKEHPVENTQLQNEKLYLYYLQNGRDMYVDQELDINRLSDYDVDHIVPQSFLKDDSIDNKVLTRSDKARGKSDNVPSEEVVKKMKNYWRQLLNAKLITQRKFDNLTKAERGGLSELDKAGFIKRQLVETRQITKHVAQILDSRMNTKYDENDKLIREVKVITLKSKLVSDFRKDFQFYKVREINNYHHAHDAYLNAVVGTALIKKYPKLESEFVYGDYKVYDVRKMIAKSEQEIGKATAKYFFYSNIMNFFKTEITLANGEIRKRPLIETNGETGEIVWDKGRDFATVRKVLSMPQVNIVKKTEVQTGGFSKESILPKRNSDKLIARKKDWDPKKYGGFDSPTVAYSVLVVAKVEKGKSKKLKSVKELLGITIMERSSFEKNPIDFLEAKGYKEVKKDLIIKLPKYSLFELENGRKRMLASAGELQKGNELALPSKYVNFLYLASHYEKLKGSPEDNEQKQLFVEQHKHYLDEIIEQISEFSKRVILADANLDKVLSAYNKHRDKPIREQAENIIHLFTLTNLGAPAAFKYFDTTIDRKRYTSTKEVLDATLIHQSITGLYETRIDLSQLGGDGGGGGGGGGGGTLGDQGSRGSDPLPEPRVTLTVEGIPTEFLVNTGAEHSVLTKPMGKMGSKRTVVAGATGSKVYPWTTKRLLKIGQKQVTHSFLVIPECPAPLLGRDLLTKLKAQIQFSTEGPQVTWEDRPAMCLVLNLEEEYRLHEKPVPPSIDPSWLQLFPMVWAEKAGMGLANQVPPVVVELKSDASPVAVRQYPMSKEAREGIRPHIQRFLDLGILVPCQSPWNTPLLPVKKPGTNDYRPVQDLREVNKRVQDIHPTVPNPYNLLSSLPPSHTWYSVLDLKDAFFCLKLHPNSQPLFAFEWRDPEKGNTGQLTWTRLPQGFKNSPTLFNEALHRDLASFRALNPQVVMLQYVDDLLVAAPTYRDCKEGTRRLLQELSKLGYRVSAKKAQLCREEVTYLGYLLKGGKRWLTPARKATVMKIPTPTTPRQVREFLGKAGFCRLFIPGFASLAAPLYPLTRPKVPFTWTEAHQEAFGRIKEALLSAPALALPDLTKPFALYVDEKEGVARGVLTQTLGPWRRPVAYLSKKLDPVASGWPTCLKAIAAVALLLKDADKLTLGQNVLVIAPHNLESIVRQPPDRWMTNARMTHYQSLLLNERVSFAPPAILNPATLLPVESDDTPIHICSEILAEETGTRPDLRDQPLPGVPAWYTDGSSFIMDGRRQAGAAIVDNKRTVWASNLPEGTSAQKAELIALTQALRLAEGKSINIYTDSRYAFATAHVHGAIYKQRGWLTSAGKDIKNKEEILALLEAIHLPKRVAIIHCPGHQRGTDPVATGNRKADEAAKQAAQSTRILTETTKNAGKRTADGSEFEKRTADGSEFESPKKKAKVE

SEQ ID NO: 1791 - protein, 2210 aa, synthetic construct
MPAAKRVKLDGGDKKYSIGLDIGTNSVGWAVITDEYKVPSKKFKVLGNTDRHSIKKNLIGALLFDSGETAEATRLKRTARRRYTRRKNRICYLQEIFSNEMAKVDDSFFHRLEESFLVEEDKKHERHPIFGNIVDEVAYHEKYPTIYHLRKKLVDSTDKADLRLIYLALAHMIKFRGHFLIEGDLNPDNSDVDKLFIQLVQTYNQLFEENPINASGVDAKAILSARLSKSRRLENLIAQLPGEKKNGLFGNLIALSLGLTPNFKSNFDLAEDAKLQLSKDTYDDDLDNLLAQIGDQYADLFLAAKNLSDAILLSDILRVNTEITKAPLSASMIKRYDEHHQDLTLLKALVRQQLPEKYKEIFFDQSKNGYAGYIDGGASQEEFYKFIKPILEKMDGTEELLVKLNREDLLRKQRTFDNGSIPHQIHLGELHAILRRQEDFYPFLKDNREKIEKILTFRIPYYVGPLARGNSRFAWMTRKSEETITPWNFEEVVDKGASAQSFIERMTNFDKNLPNEKVLPKHSLLYEYFTVYNELTKVKYVTEGMRKPAFLSGEQKKAIVDLLFKTNRKVTVKQLKEDYFKKIECFDSVEISGVEDRFNASLGTYHDLLKIIKDKDFLDNEENEDILEDIVLTLTLFEDREMIEERLKTYAHLFDDKVMKQLKRRRYTGWGRLSRKLINGIRDKQSGKTILDFLKSDGFANRNFMQLIHDDSLTFKEDIQKAQVSGQGDSLHEHIANLAGSPAIKKGILQTVKVVDELVKVMGRHKPENIVIEMARENQTTQKGQKNSRERMKRIEEGIKELGSQILKEHPVENTQLQNEKLYLYYLQNGRDMYVDQELDINRLSDYDVDHIVPQSFLKDDSIDNKVLTRSDKARGKSDNVPSEEVVKKMKNYWRQLLNAKLITQRKFDNLTKAERGGLSELDKAGFIKRQLVETRQITKHVAQILDSRMNTKYDENDKLIREVKVITLKSKLVSDFRKDFQFYKVREINNYHHAHDAYLNAVVGTALIKKYPKLESEFVYGDYKVYDVRKMIAKSEQEIGKATAKYFFYSNIMNFFKTEITLANGEIRKRPLIETNGETGEIVWDKGRDFATVRKVLSMPQVNIVKKTEVQTGGFSKESILPKRNSDKLIARKKDWDPKKYGGFDSPTVAYSVLVVAKVEKGKSKKLKSVKELLGITIMERSSFEKNPIDFLEAKGYKEVKKDLIIKLPKYSLFELENGRKRMLASAGELQKGNELALPSKYVNFLYLASHYEKLKGSPEDNEQKQLFVEQHKHYLDEIIEQISEFSKRVILADANLDKVLSAYNKHRDKPIREQAENIIHLFTLTNLGAPAAFKYFDTTIDRKRYTSTKEVLDATLIHQSITGLYETRIDLSQLGGDGGGGSGGTLGDQGSRGSDPLPEPRVTLTVEGIPTEFLVNTGAEHSVLTKPMGKMGSKRTVVAGATGSKVYPWTTKRLLKIGQKQVTHSFLVIPECPAPLLGRDLLTKLKAQIQFSTEGPQVTWEDRPAMCLVLNLEEEYRLHEKPVPPSIDPSWLQLFPMVWAEKAGMGLANQVPPVVVELKSDASPVAVRQYPMSKEAREGIRPHIQRFLDLGILVPCQSPWNTPLLPVKKPGTNDYRPVQDLREVNKRVQDIHPTVPNPYNLLSSLPPSHTWYSVLDLKDAFFCLKLHPNSQPLFAFEWRDPEKGNTGQLTWTRLPQGFKNSPTLFNEALHRDLASFRALNPQVVMLQYVDDLLVAAPTYRDCKEGTRRLLQELSKLGYRVSAKKAQLCREEVTYLGYLLKGGKRWLTPARKATVMKIPTPTTPRQVREFLGKAGFCRLFIPGFASLAAPLYPLTRPKVPFTWTEAHQEAFGRIKEALLSAPALALPDLTKPFALYVDEKEGVARGVLTQTLGPWRRPVAYLSKKLDPVASGWPTCLKAIAAVALLLKDADKLTLGQNVLVIAPHNLESIVRQPPDRWMTNARMTHYQSLLLNERVSFAPPAILNPATLLPVESDDTPIHICSEILAEETGTRPDLRDQPLPGVPAWYTDGSSFIMDGRRQAGAAIVDNKRTVWASNLPEGTSAQKAELIALTQALRLAEGKSINIYTDSRYAFATAHVHGAIYKQRGWLTSAGKDIKNKEEILALLEAIHLPKRVAIIHCPGHQRGTDPVATGNRKADEAAKQAAQSTRILTETTKNAGKRTADGSEFEKRTADGSEFESPKKKAKVE

SEQ ID NO: 1792 - protein, 2216 aa, synthetic construct
MPAAKRVKLDGGDKKYSIGLDIGTNSVGWAVITDEYKVPSKKFKVLGNTDRHSIKKNLIGALLFDSGETAEATRLKRTARRRYTRRKNRICYLQEIFSNEMAKVDDSFFHRLEESFLVEEDKKHERHPIFGNIVDEVAYHEKYPTIYHLRKKLVDSTDKADLRLIYLALAHMIKFRGHFLIEGDLNPDNSDVDKLFIQLVQTYNQLFEENPINASGVDAKAILSARLSKSRRLENLIAQLPGEKKNGLFGNLIALSLGLTPNFKSNFDLAEDAKLQLSKDTYDDDLDNLLAQIGDQYADLFLAAKNLSDAILLSDILRVNTEITKAPLSASMIKRYDEHHQDLTLLKALVRQQLPEKYKEIFFDQSKNGYAGYIDGGASQEEFYKFIKPILEKMDGTEELLVKLNREDLLRKQRTFDNGSIPHQIHLGELHAILRRQEDFYPFLKDNREKIEKILTFRIPYYVGPLARGNSRFAWMTRKSEETITPWNFEEVVDKGASAQSFIERMTNFDKNLPNEKVLPKHSLLYEYFTVYNELTKVKYVTEGMRKPAFLSGEQKKAIVDLLFKTNRKVTVKQLKEDYFKKIECFDSVEISGVEDRFNASLGTYHDLLKIIKDKDFLDNEENEDILEDIVLTLTLFEDREMIEERLKTYAHLFDDKVMKQLKRRRYTGWGRLSRKLINGIRDKQSGKTILDFLKSDGFANRNFMQLIHDDSLTFKEDIQKAQVSGQGDSLHEHIANLAGSPAIKKGILQTVKVVDELVKVMGRHKPENIVIEMARENQTTQKGQKNSRERMKRIEEGIKELGSQILKEHPVENTQLQNEKLYLYYLQNGRDMYVDQELDINRLSDYDVDHIVPQSFLKDDSIDNKVLTRSDKARGKSDNVPSEEVVKKMKNYWRQLLNAKLITQRKFDNLTKAERGGLSELDKAGFIKRQLVETRQITKHVAQILDSRMNTKYDENDKLIREVKVITLKSKLVSDFRKDFQFYKVREINNYHHAHDAYLNAVVGTALIKKYPKLESEFVYGDYKVYDVRKMIAKSEQEIGKATAKYFFYSNIMNFFKTEITLANGEIRKRPLIETNGETGEIVWDKGRDFATVRKVLSMPQVNIVKKTEVQTGGFSKESILPKRNSDKLIARKKDWDPKKYGGFDSPTVAYSVLVVAKVEKGKSKKLKSVKELLGITIMERSSFEKNPIDFLEAKGYKEVKKDLIIKLPKYSLFELENGRKRMLASAGELQKGNELALPSKYVNFLYLASHYEKLKGSPEDNEQKQLFVEQHKHYLDEIIEQISEFSKRVILADANLDKVLSAYNKHRDKPIREQAENIIHLFTLTNLGAPAAFKYFDTTIDRKRYTSTKEVLDATLIHQSITGLYETRIDLSQLGGDGGPAPGGSGGGGGTLGDQGSRGSDPLPEPRVTLTVEGIPTEFLVNTGAEHSVLTKPMGKMGSKRTVVAGATGSKVYPWTTKRLLKIGQKQVTHSFLVIPECPAPLLGRDLLTKLKAQIQFSTEGPQVTWEDRPAMCLVLNLEEEYRLHEKPVPPSIDPSWLQLFPMVWAEKAGMGLANQVPPVVVELKSDASPVAVRQYPMSKEAREGIRPHIQRFLDLGILVPCQSPWNTPLLPVKKPGTNDYRPVQDLREVNKRVQDIHPTVPNPYNLLSSLPPSHTWYSVLDLKDAFFCLKLHPNSQPLFAFEWRDPEKGNTGQLTWTRLPQGFKNSPTLFNEALHRDLASFRALNPQVVMLQYVDDLLVAAPTYRDCKEGTRRLLQELSKLGYRVSAKKAQLCREEVTYLGYLLKGGKRWLTPARKATVMKIPTPTTPRQVREFLGKAGFCRLFIPGFASLAAPLYPLTRPKVPFTWTEAHQEAFGRIKEALLSAPALALPDLTKPFALYVDEKEGVARGVLTQTLGPWRRPVAYLSKKLDPVASGWPTCLKAIAAVALLLKDADKLTLGQNVLVIAPHNLESIVRQPPDRWMTNARMTHYQSLLLNERVSFAPPAILNPATLLPVESDDTPIHICSEILAEETGTRPDLRDQPLPGVPAWYTDGSSFIMDGRRQAGAAIVDNKRTVWASNLPEGTSAQKAELIALTQALRLAEGKSINIYTDSRYAFATAHVHGAIYKQRGWLTSAGKDIKNKEEILALLEAIHLPKRVAIIHCPGHQRGTDPVATGNRKADEAAKQAAQSTRILTETTKNAGKRTADGSEFEKRTADGSEFESPKKKAKVE

SEQ ID NO: 1793 - protein, 2220 aa, synthetic construct
MPAAKRVKLDGGDKKYSIGLDIGTNSVGWAVITDEYKVPSKKFKVLGNTDRHSIKKNLIGALLFDSGETAEATRLKRTARRRYTRRKNRICYLQEIFSNEMAKVDDSFFHRLEESFLVEEDKKHERHPIFGNIVDEVAYHEKYPTIYHLRKKLVDSTDKADLRLIYLALAHMIKFRGHFLIEGDLNPDNSDVDKLFIQLVQTYNQLFEENPINASGVDAKAILSARLSKSRRLENLIAQLPGEKKNGLFGNLIALSLGLTPNFKSNFDLAEDAKLQLSKDTYDDDLDNLLAQIGDQYADLFLAAKNLSDAILLSDILRVNTEITKAPLSASMIKRYDEHHQDLTLLKALVRQQLPEKYKEIFFDQSKNGYAGYIDGGASQEEFYKFIKPILEKMDGTEELLVKLNREDLLRKQRTFDNGSIPHQIHLGELHAILRRQEDFYPFLKDNREKIEKILTFRIPYYVGPLARGNSRFAWMTRKSEETITPWNFEEVVDKGASAQSFIERMTNFDKNLPNEKVLPKHSLLYEYFTVYNELTKVKYVTEGMRKPAFLSGEQKKAIVDLLFKTNRKVTVKQLKEDYFKKIECFDSVEISGVEDRFNASLGTYHDLLKIIKDKDFLDNEENEDILEDIVLTLTLFEDREMIEERLKTYAHLFDDKVMKQLKRRRYTGWGRLSRKLINGIRDKQSGKTILDFLKSDGFANRNFMQLIHDDSLTFKEDIQKAQVSGQGDSLHEHIANLAGSPAIKKGILQTVKVVDELVKVMGRHKPENIVIEMARENQTTQKGQKNSRERMKRIEEGIKELGSQILKEHPVENTQLQNEKLYLYYLQNGRDMYVDQELDINRLSDYDVDHIVPQSFLKDDSIDNKVLTRSDKARGKSDNVPSEEVVKKMKNYWRQLLNAKLITQRKFDNLTKAERGGLSELDKAGFIKRQLVETRQITKHVAQILDSRMNTKYDENDKLIREVKVITLKSKLVSDFRKDFQFYKVREINNYHHAHDAYLNAVVGTALIKKYPKLESEFVYGDYKVYDVRKMIAKSEQEIGKATAKYFFYSNIMNFFKTEITLANGEIRKRPLIETNGETGEIVWDKGRDFATVRKVLSMPQVNIVKKTEVQTGGFSKESILPKRNSDKLIARKKDWDPKKYGGFDSPTVAYSVLVVAKVEKGKSKKLKSVKELLGITIMERSSFEKNPIDFLEAKGYKEVKKDLIIKLPKYSLFELENGRKRMLASAGELQKGNELALPSKYVNFLYLASHYEKLKGSPEDNEQKQLFVEQHKHYLDEIIEQISEFSKRVILADANLDKVLSAYNKHRDKPIREQAENIIHLFTLTNLGAPAAFKYFDTTIDRKRYTSTKEVLDATLIHQSITGLYETRIDLSQLGGDGGPAPAPAPAPAPAPGGTLGDQGSRGSDPLPEPRVTLTVEGIPTEFLVNTGAEHSVLTKPMGKMGSKRTVVAGATGSKVYPWTTKRLLKIGQKQVTHSFLVIPECPAPLLGRDLLTKLKAQIQFSTEGPQVTWEDRPAMCLVLNLEEEYRLHEKPVPPSIDPSWLQLFPMVWAEKAGMGLANQVPPVVVELKSDASPVAVRQYPMSKEAREGIRPHIQRFLDLGILVPCQSPWNTPLLPVKKPGTNDYRPVQDLREVNKRVQDIHPTVPNPYNLLSSLPPSHTWYSVLDLKDAFFCLKLHPNSQPLFAFEWRDPEKGNTGQLTWTRLPQGFKNSPTLFNEALHRDLASFRALNPQVVMLQYVDDLLVAAPTYRDCKEGTRRLLQELSKLGYRVSAKKAQLCREEVTYLGYLLKGGKRWLTPARKATVMKIPTPTTPRQVREFLGKAGFCRLFIPGFASLAAPLYPLTRPKVPFTWTEAHQEAFGRIKEALLSAPALALPDLTKPFALYVDEKEGVARGVLTQTLGPWRRPVAYLSKKLDPVASGWPTCLKAIAAVALLLKDADKLTLGQNVLVIAPHNLESIVRQPPDRWMTNARMTHYQSLLLNERVSFAPPAILNPATLLPVESDDTPIHICSEILAEETGTRPDLRDQPLPGVPAWYTDGSSFIMDGRRQAGAAIVDNKRTVWASNLPEGTSAQKAELIALTQALRLAEGKSINIYTDSRYAFATAHVHGAIYKQRGWLTSAGKDIKNKEEILALLEAIHLPKRVAIIHCPGHQRGTDPVATGNRKADEAAKQAAQSTRILTETTKNAGKRTADGSEFEKRTADGSEFESPKKKAKVE

SEQ ID NO: 1794 - protein, 2213 aa, synthetic construct
MPAAKRVKLDGGDKKYSIGLDIGTNSVGWAVITDEYKVPSKKFKVLGNTDRHSIKKNLIGALLFDSGETAEATRLKRTARRRYTRRKNRICYLQEIFSNEMAKVDDSFFHRLEESFLVEEDKKHERHPIFGNIVDEVAYHEKYPTIYHLRKKLVDSTDKADLRLIYLALAHMIKFRGHFLIEGDLNPDNSDVDKLFIQLVQTYNQLFEENPINASGVDAKAILSARLSKSRRLENLIAQLPGEKKNGLFGNLIALSLGLTPNFKSNFDLAEDAKLQLSKDTYDDDLDNLLAQIGDQYADLFLAAKNLSDAILLSDILRVNTEITKAPLSASMIKRYDEHHQDLTLLKALVRQQLPEKYKEIFFDQSKNGYAGYIDGGASQEEFYKFIKPILEKMDGTEELLVKLNREDLLRKQRTFDNGSIPHQIHLGELHAILRRQEDFYPFLKDNREKIEKILTFRIPYYVGPLARGNSRFAWMTRKSEETITPWNFEEVVDKGASAQSFIERMTNFDKNLPNEKVLPKHSLLYEYFTVYNELTKVKYVTEGMRKPAFLSGEQKKAIVDLLFKTNRKVTVKQLKEDYFKKIECFDSVEISGVEDRFNASLGTYHDLLKIIKDKDFLDNEENEDILEDIVLTLTLFEDREMIEERLKTYAHLFDDKVMKQLKRRRYTGWGRLSRKLINGIRDKQSGKTILDFLKSDGFANRNFMQLIHDDSLTFKEDIQKAQVSGQGDSLHEHIANLAGSPAIKKGILQTVKVVDELVKVMGRHKPENIVIEMARENQTTQKGQKNSRERMKRIEEGIKELGSQILKEHPVENTQLQNEKLYLYYLQNGRDMYVDQELDINRLSDYDVDHIVPQSFLKDDSIDNKVLTRSDKARGKSDNVPSEEVVKKMKNYWRQLLNAKLITQRKFDNLTKAERGGLSELDKAGFIKRQLVETRQITKHVAQILDSRMNTKYDENDKLIREVKVITLKSKLVSDFRKDFQFYKVREINNYHHAHDAYLNAVVGTALIKKYPKLESEFVYGDYKVYDVRKMIAKSEQEIGKATAKYFFYSNIMNFFKTEITLANGEIRKRPLIETNGETGEIVWDKGRDFATVRKVLSMPQVNIVKKTEVQTGGFSKESILPKRNSDKLIARKKDWDPKKYGGFDSPTVAYSVLVVAKVEKGKSKKLKSVKELLGITIMERSSFEKNPIDFLEAKGYKEVKKDLIIKLPKYSLFELENGRKRMLASAGELQKGNELALPSKYVNFLYLASHYEKLKGSPEDNEQKQLFVEQHKHYLDEIIEQISEFSKRVILADANLDKVLSAYNKHRDKPIREQAENIIHLFTLTNLGAPAAFKYFDTTIDRKRYTSTKEVLDATLIHQSITGLYETRIDLSQLGGDGGPAPGGGGGTLGDQGSRGSDPLPEPRVTLTVEGIPTEFLVNTGAEHSVLTKPMGKMGSKRTVVAGATGSKVYPWTTKRLLKIGQKQVTHSFLVIPECPAPLLGRDLLTKLKAQIQFSTEGPQVTWEDRPAMCLVLNLEEEYRLHEKPVPPSIDPSWLQLFPMVWAEKAGMGLANQVPPVVVELKSDASPVAVRQYPMSKEAREGIRPHIQRFLDLGILVPCQSPWNTPLLPVKKPGTNDYRPVQDLREVNKRVQDIHPTVPNPYNLLSSLPPSHTWYSVLDLKDAFFCLKLHPNSQPLFAFEWRDPEKGNTGQLTWTRLPQGFKNSPTLFNEALHRDLASFRALNPQVVMLQYVDDLLVAAPTYRDCKEGTRRLLQELSKLGYRVSAKKAQLCREEVTYLGYLLKGGKRWLTPARKATVMKIPTPTTPRQVREFLGKAGFCRLFIPGFASLAAPLYPLTRPKVPFTWTEAHQEAFGRIKEALLSAPALALPDLTKPFALYVDEKEGVARGVLTQTLGPWRRPVAYLSKKLDPVASGWPTCLKAIAAVALLLKDADKLTLGQNVLVIAPHNLESIVRQPPDRWMTNARMTHYQSLLLNERVSFAPPAILNPATLLPVESDDTPIHICSEILAEETGTRPDLRDQPLPGVPAWYTDGSSFIMDGRRQAGAAIVDNKRTVWASNLPEGTSAQKAELIALTQALRLAEGKSINIYTDSRYAFATAHVHGAIYKQRGWLTSAGKDIKNKEEILALLEAIHLPKRVAIIHCPGHQRGTDPVATGNRKADEAAKQAAQSTRILTETTKNAGKRTADGSEFEKRTADGSEFESPKKKAKVE

SEQ ID NO: 1795 - protein, 2218 aa, synthetic construct
MPAAKRVKLDGGDKKYSIGLDIGTNSVGWAVITDEYKVPSKKFKVLGNTDRHSIKKNLIGALLFDSGETAEATRLKRTARRRYTRRKNRICYLQEIFSNEMAKVDDSFFHRLEESFLVEEDKKHERHPIFGNIVDEVAYHEKYPTIYHLRKKLVDSTDKADLRLIYLALAHMIKFRGHFLIEGDLNPDNSDVDKLFIQLVQTYNQLFEENPINASGVDAKAILSARLSKSRRLENLIAQLPGEKKNGLFGNLIALSLGLTPNFKSNFDLAEDAKLQLSKDTYDDDLDNLLAQIGDQYADLFLAAKNLSDAILLSDILRVNTEITKAPLSASMIKRYDEHHQDLTLLKALVRQQLPEKYKEIFFDQSKNGYAGYIDGGASQEEFYKFIKPILEKMDGTEELLVKLNREDLLRKQRTFDNGSIPHQIHLGELHAILRRQEDFYPFLKDNREKIEKILTFRIPYYVGPLARGNSRFAWMTRKSEETITPWNFEEVVDKGASAQSFIERMTNFDKNLPNEKVLPKHSLLYEYFTVYNELTKVKYVTEGMRKPAFLSGEQKKAIVDLLFKTNRKVTVKQLKEDYFKKIECFDSVEISGVEDRFNASLGTYHDLLKIIKDKDFLDNEENEDILEDIVLTLTLFEDREMIEERLKTYAHLFDDKVMKQLKRRRYTGWGRLSRKLINGIRDKQSGKTILDFLKSDGFANRNFMQLIHDDSLTFKEDIQKAQVSGQGDSLHEHIANLAGSPAIKKGILQTVKVVDELVKVMGRHKPENIVIEMARENQTTQKGQKNSRERMKRIEEGIKELGSQILKEHPVENTQLQNEKLYLYYLQNGRDMYVDQELDINRLSDYDVDHIVPQSFLKDDSIDNKVLTRSDKARGKSDNVPSEEVVKKMKNYWRQLLNAKLITQRKFDNLTKAERGGLSELDKAGFIKRQLVETRQITKHVAQILDSRMNTKYDENDKLIREVKVITLKSKLVSDFRKDFQFYKVREINNYHHAHDAYLNAVVGTALIKKYPKLESEFVYGDYKVYDVRKMIAKSEQEIGKATAKYFFYSNIMNFFKTEITLANGEIRKRPLIETNGETGEIVWDKGRDFATVRKVLSMPQVNIVKKTEVQTGGFSKESILPKRNSDKLIARKKDWDPKKYGGFDSPTVAYSVLVVAKVEKGKSKKLKSVKELLGITIMERSSFEKNPIDFLEAKGYKEVKKDLIIKLPKYSLFELENGRKRMLASAGELQKGNELALPSKYVNFLYLASHYEKLKGSPEDNEQKQLFVEQHKHYLDEIIEQISEFSKRVILADANLDKVLSAYNKHRDKPIREQAENIIHLFTLTNLGAPAAFKYFDTTIDRKRYTSTKEVLDATLIHQSITGLYETRIDLSQLGGDGGGSSPAPEAAAKGGTLGDQGSRGSDPLPEPRVTLTVEGIPTEFLVNTGAEHSVLTKPMGKMGSKRTVVAGATGSKVYPWTTKRLLKIGQKQVTHSFLVIPECPAPLLGRDLLTKLKAQIQFSTEGPQVTWEDRPAMCLVLNLEEEYRLHEKPVPPSIDPSWLQLFPMVWAEKAGMGLANQVPPVVVELKSDASPVAVRQYPMSKEAREGIRPHIQRFLDLGILVPCQSPWNTPLLPVKKPGTNDYRPVQDLREVNKRVQDIHPTVPNPYNLLSSLPPSHTWYSVLDLKDAFFCLKLHPNSQPLFAFEWRDPEKGNTGQLTWTRLPQGFKNSPTLFNEALHRDLASFRALNPQVVMLQYVDDLLVAAPTYRDCKEGTRRLLQELSKLGYRVSAKKAQLCREEVTYLGYLLKGGKRWLTPARKATVMKIPTPTTPRQVREFLGKAGFCRLFIPGFASLAAPLYPLTRPKVPFTWTEAHQEAFGRIKEALLSAPALALPDLTKPFALYVDEKEGVARGVLTQTLGPWRRPVAYLSKKLDPVASGWPTCLKAIAAVALLLKDADKLTLGQNVLVIAPHNLESIVRQPPDRWMTNARMTHYQSLLLNERVSFAPPAILNPATLLPVESDDTPIHICSEILAEETGTRPDLRDQPLPGVPAWYTDGSSFIMDGRRQAGAAIVDNKRTVWASNLPEGTSAQKAELIALTQALRLAEGKSINIYTDSRYAFATAHVHGAIYKQRGWLTSAGKDIKNKEEILALLEAIHLPKRVAIIHCPGHQRGTDPVATGNRKADEAAKQAAQSTRILTETTKNAGKRTADGSEFEKRTADGSEFESPKKKAKVE

SEQ ID NO: 1796 - protein, 2218 aa, synthetic construct
MPAAKRVKLDGGDKKYSIGLDIGTNSVGWAVITDEYKVPSKKFKVLGNTDRHSIKKNLIGALLFDSGETAEATRLKRTARRRYTRRKNRICYLQEIFSNEMAKVDDSFFHRLEESFLVEEDKKHERHPIFGNIVDEVAYHEKYPTIYHLRKKLVDSTDKADLRLIYLALAHMIKFRGHFLIEGDLNPDNSDVDKLFIQLVQTYNQLFEENPINASGVDAKAILSARLSKSRRLENLIAQLPGEKKNGLFGNLIALSLGLTPNFKSNFDLAEDAKLQLSKDTYDDDLDNLLAQIGDQYADLFLAAKNLSDAILLSDILRVNTEITKAPLSASMIKRYDEHHQDLTLLKALVRQQLPEKYKEIFFDQSKNGYAGYIDGGASQEEFYKFIKPILEKMDGTEELLVKLNREDLLRKQRTFDNGSIPHQIHLGELHAILRRQEDFYPFLKDNREKIEKILTFRIPYYVGPLARGNSRFAWMTRKSEETITPWNFEEVVDKGASAQSFIERMTNFDKNLPNEKVLPKHSLLYEYFTVYNELTKVKYVTEGMRKPAFLSGEQKKAIVDLLFKTNRKVTVKQLKEDYFKKIECFDSVEISGVEDRFNASLGTYHDLLKIIKDKDFLDNEENEDILEDIVLTLTLFEDREMIEERLKTYAHLFDDKVMKQLKRRRYTGWGRLSRKLINGIRDKQSGKTILDFLKSDGFANRNFMQLIHDDSLTFKEDIQKAQVSGQGDSLHEHIANLAGSPAIKKGILQTVKVVDELVKVMGRHKPENIVIEMARENQTTQKGQKNSRERMKRIEEGIKELGSQILKEHPVENTQLQNEKLYLYYLQNGRDMYVDQELDINRLSDYDVDHIVPQSFLKDDSIDNKVLTRSDKARGKSDNVPSEEVVKKMKNYWRQLLNAKLITQRKFDNLTKAERGGLSELDKAGFIKRQLVETRQITKHVAQILDSRMNTKYDENDKLIREVKVITLKSKLVSDFRKDFQFYKVREINNYHHAHDAYLNAVVGTALIKKYPKLESEFVYGDYKVYDVRKMIAKSEQEIGKATAKYFFYSNIMNFFKTEITLANGEIRKRPLIETNGETGEIVWDKGRDFATVRKVLSMPQVNIVKKTEVQTGGFSKESILPKRNSDKLIARKKDWDPKKYGGFDSPTVAYSVLVVAKVEKGKSKKLKSVKELLGITIMERSSFEKNPIDFLEAKGYKEVKKDLIIKLPKYSLFELENGRKRMLASAGELQKGNELALPSKYVNFLYLASHYEKLKGSPEDNEQKQLFVEQHKHYLDEIIEQISEFSKRVILADANLDKVLSAYNKHRDKPIREQAENIIHLFTLTNLGAPAAFKYFDTTIDRKRYTSTKEVLDATLIHQSITGLYETRIDLSQLGGDGGGGGEAAAKGSSGGTLGDQGSRGSDPLPEPRVTLTVEGIPTEFLVNTGAEHSVLTKPMGKMGSKRTVVAGATGSKVYPWTTKRLLKIGQKQVTHSFLVIPECPAPLLGRDLLTKLKAQIQFSTEGPQVTWEDRPAMCLVLNLEEEYRLHEKPVPPSIDPSWLQLFPMVWAEKAGMGLANQVPPVVVELKSDASPVAVRQYPMSKEAREGIRPHIQRFLDLGILVPCQSPWNTPLLPVKKPGTNDYRPVQDLREVNKRVQDIHPTVPNPYNLLSSLPPSHTWYSVLDLKDAFFCLKLHPNSQPLFAFEWRDPEKGNTGQLTWTRLPQGFKNSPTLFNEALHRDLASFRALNPQVVMLQYVDDLLVAAPTYRDCKEGTRRLLQELSKLGYRVSAKKAQLCREEVTYLGYLLKGGKRWLTPARKATVMKIPTPTTPRQVREFLGKAGFCRLFIPGFASLAAPLYPLTRPKVPFTWTEAHQEAFGRIKEALLSAPALALPDLTKPFALYVDEKEGVARGVLTQTLGPWRRPVAYLSKKLDPVASGWPTCLKAIAAVALLLKDADKLTLGQNVLVIAPHNLESIVRQPPDRWMTNARMTHYQSLLLNERVSFAPPAILNPATLLPVESDDTPIHICSEILAEETGTRPDLRDQPLPGVPAWYTDGSSFIMDGRRQAGAAIVDNKRTVWASNLPEGTSAQKAELIALTQALRLAEGKSINIYTDSRYAFATAHVHGAIYKQRGWLTSAGKDIKNKEEILALLEAIHLPKRVAIIHCPGHQRGTDPVATGNRKADEAAKQAAQSTRILTETTKNAGKRTADGSEFEKRTADGSEFESPKKKAKVE

SEQ ID NO: 1797 - protein, 2215 aa, synthetic construct
MPAAKRVKLDGGDKKYSIGLDIGTNSVGWAVITDEYKVPSKKFKVLGNTDRHSIKKNLIGALLFDSGETAEATRLKRTARRRYTRRKNRICYLQEIFSNEMAKVDDSFFHRLEESFLVEEDKKHERHPIFGNIVDEVAYHEKYPTIYHLRKKLVDSTDKADLRLIYLALAHMIKFRGHFLIEGDLNPDNSDVDKLFIQLVQTYNQLFEENPINASGVDAKAILSARLSKSRRLENLIAQLPGEKKNGLFGNLIALSLGLTPNFKSNFDLAEDAKLQLSKDTYDDDLDNLLAQIGDQYADLFLAAKNLSDAILLSDILRVNTEITKAPLSASMIKRYDEHHQDLTLLKALVRQQLPEKYKEIFFDQSKNGYAGYIDGGASQEEFYKFIKPILEKMDGTEELLVKLNREDLLRKQRTFDNGSIPHQIHLGELHAILRRQEDFYPFLKDNREKIEKILTFRIPYYVGPLARGNSRFAWMTRKSEETITPWNFEEVVDKGASAQSFIERMTNFDKNLPNEKVLPKHSLLYEYFTVYNELTKVKYVTEGMRKPAFLSGEQKKAIVDLLFKTNRKVTVKQLKEDYFKKIECFDSVEISGVEDRFNASLGTYHDLLKIIKDKDFLDNEENEDILEDIVLTLTLFEDREMIEERLKTYAHLFDDKVMKQLKRRRYTGWGRLSRKLINGIRDKQSGKTILDFLKSDGFANRNFMQLIHDDSLTFKEDIQKAQVSGQGDSLHEHIANLAGSPAIKKGILQTVKVVDELVKVMGRHKPENIVIEMARENQTTQKGQKNSRERMKRIEEGIKELGSQILKEHPVENTQLQNEKLYLYYLQNGRDMYVDQELDINRLSDYDVDHIVPQSFLKDDSIDNKVLTRSDKARGKSDNVPSEEVVKKMKNYWRQLLNAKLITQRKFDNLTKAERGGLSELDKAGFIKRQLVETRQITKHVAQILDSRMNTKYDENDKLIREVKVITLKSKLVSDFRKDFQFYKVREINNYHHAHDAYLNAVVGTALIKKYPKLESEFVYGDYKVYDVRKMIAKSEQEIGKATAKYFFYSNIMNFFKTEITLANGEIRKRPLIETNGETGEIVWDKGRDFATVRKVLSMPQVNIVKKTEVQTGGFSKESILPKRNSDKLIARKKDWDPKKYGGFDSPTVAYSVLVVAKVEKGKSKKLKSVKELLGITIMERSSFEKNPIDFLEAKGYKEVKKDLIIKLPKYSLFELENGRKRMLASAGELQKGNELALPSKYVNFLYLASHYEKLKGSPEDNEQKQLFVEQHKHYLDEIIEQISEFSKRVILADANLDKVLSAYNKHRDKPIREQAENIIHLFTLTNLGAPAAFKYFDTTIDRKRYTSTKEVLDATLIHQSITGLYETRIDLSQLGGDGGGSSEAAAKGGTLGDQGSRGSDPLPEPRVTLTVEGIPTEFLVNTGAEHSVLTKPMGKMGSKRTVVAGATGSKVYPWTTKRLLKIGQKQVTHSFLVIPECPAPLLGRDLLTKLKAQIQFSTEGPQVTWEDRPAMCLVLNLEEEYRLHEKPVPPSIDPSWLQLFPMVWAEKAGMGLANQVPPVVVELKSDASPVAVRQYPMSKEAREGIRPHIQRFLDLGILVPCQSPWNTPLLPVKKPGTNDYRPVQDLREVNKRVQDIHPTVPNPYNLLSSLPPSHTWYSVLDLKDAFFCLKLHPNSQPLFAFEWRDPEKGNTGQLTWTRLPQGFKNSPTLFNEALHRDLASFRALNPQVVMLQYVDDLLVAAPTYRDCKEGTRRLLQELSKLGYRVSAKKAQLCREEVTYLGYLLKGGKRWLTPARKATVMKIPTPTTPRQVREFLGKAGFCRLFIPGFASLAAPLYPLTRPKVPFTWTEAHQEAFGRIKEALLSAPALALPDLTKPFALYVDEKEGVARGVLTQTLGPWRRPVAYLSKKLDPVASGWPTCLKAIAAVALLLKDADKLTLGQNVLVIAPHNLESIVRQPPDRWMTNARMTHYQSLLLNERVSFAPPAILNPATLLPVESDDTPIHICSEILAEETGTRPDLRDQPLPGVPAWYTDGSSFIMDGRRQAGAAIVDNKRTVWASNLPEGTSAQKAELIALTQALRLAEGKSINIYTDSRYAFATAHVHGAIYKQRGWLTSAGKDIKNKEEILALLEAIHLPKRVAIIHCPGHQRGTDPVATGNRKADEAAKQAAQSTRILTETTKNAGKRTADGSEFEKRTADGSEFESPKKKAKVE

SEQ ID NO: 1798 - protein, 2211 aa, synthetic construct
MPAAKRVKLDGGDKKYSIGLDIGTNSVGWAVITDEYKVPSKKFKVLGNTDRHSIKKNLIGALLFDSGETAEATRLKRTARRRYTRRKNRICYLQEIFSNEMAKVDDSFFHRLEESFLVEEDKKHERHPIFGNIVDEVAYHEKYPTIYHLRKKLVDSTDKADLRLIYLALAHMIKFRGHFLIEGDLNPDNSDVDKLFIQLVQTYNQLFEENPINASGVDAKAILSARLSKSRRLENLIAQLPGEKKNGLFGNLIALSLGLTPNFKSNFDLAEDAKLQLSKDTYDDDLDNLLAQIGDQYADLFLAAKNLSDAILLSDILRVNTEITKAPLSASMIKRYDEHHQDLTLLKALVRQQLPEKYKEIFFDQSKNGYAGYIDGGASQEEFYKFIKPILEKMDGTEELLVKLNREDLLRKQRTFDNGSIPHQIHLGELHAILRRQEDFYPFLKDNREKIEKILTFRIPYYVGPLARGNSRFAWMTRKSEETITPWNFEEVVDKGASAQSFIERMTNFDKNLPNEKVLPKHSLLYEYFTVYNELTKVKYVTEGMRKPAFLSGEQKKAIVDLLFKTNRKVTVKQLKEDYFKKIECFDSVEISGVEDRFNASLGTYHDLLKIIKDKDFLDNEENEDILEDIVLTLTLFEDREMIEERLKTYAHLFDDKVMKQLKRRRYTGWGRLSRKLINGIRDKQSGKTILDFLKSDGFANRNFMQLIHDDSLTFKEDIQKAQVSGQGDSLHEHIANLAGSPAIKKGILQTVKVVDELVKVMGRHKPENIVIEMARENQTTQKGQKNSRERMKRIEEGIKELGSQILKEHPVENTQLQNEKLYLYYLQNGRDMYVDQELDINRLSDYDVDHIVPQSFLKDDSIDNKVLTRSDKARGKSDNVPSEEVVKKMKNYWRQLLNAKLITQRKFDNLTKAERGGLSELDKAGFIKRQLVETRQITKHVAQILDSRMNTKYDENDKLIREVKVITLKSKLVSDFRKDFQFYKVREINNYHHAHDAYLNAVVGTALIKKYPKLESEFVYGDYKVYDVRKMIAKSEQEIGKATAKYFFYSNIMNFFKTEITLANGEIRKRPLIETNGETGEIVWDKGRDFATVRKVLSMPQVNIVKKTEVQTGGFSKESILPKRNSDKLIARKKDWDPKKYGGFDSPTVAYSVLVVAKVEKGKSKKLKSVKELLGITIMERSSFEKNPIDFLEAKGYKEVKKDLIIKLPKYSLFELENGRKRMLASAGELQKGNELALPSKYVNFLYLASHYEKLKGSPEDNEQKQLFVEQHKHYLDEIIEQISEFSKRVILADANLDKVLSAYNKHRDKPIREQAENIIHLFTLTNLGAPAAFKYFDTTIDRKRYTSTKEVLDATLIHQSITGLYETRIDLSQLGGDGGGGGGGGTLGDQGSRGSDPLPEPRVTLTVEGIPTEFLVNTGAEHSVLTKPMGKMGSKRTVVAGATGSKVYPWTTKRLLKIGQKQVTHSFLVIPECPAPLLGRDLLTKLKAQIQFSTEGPQVTWEDRPAMCLVLNLEEEYRLHEKPVPPSIDPSWLQLFPMVWAEKAGMGLANQVPPVVVELKSDASPVAVRQYPMSKEAREGIRPHIQRFLDLGILVPCQSPWNTPLLPVKKPGTNDYRPVQDLREVNKRVQDIHPTVPNPYNLLSSLPPSHTWYSVLDLKDAFFCLKLHPNSQPLFAFEWRDPEKGNTGQLTWTRLPQGFKNSPTLFNEALHRDLASFRALNPQVVMLQYVDDLLVAAPTYRDCKEGTRRLLQELSKLGYRVSAKKAQLCREEVTYLGYLLKGGKRWLTPARKATVMKIPTPTTPRQVREFLGKAGFCRLFIPGFASLAAPLYPLTRPKVPFTWTEAHQEAFGRIKEALLSAPALALPDLTKPFALYVDEKEGVARGVLTQTLGPWRRPVAYLSKKLDPVASGWPTCLKAIAAVALLLKDADKLTLGQNVLVIAPHNLESIVRQPPDRWMTNARMTHYQSLLLNERVSFAPPAILNPATLLPVESDDTPIHICSEILAEETGTRPDLRDQPLPGVPAWYTDGSSFIMDGRRQAGAAIVDNKRTVWASNLPEGTSAQKAELIALTQALRLAEGKSINIYTDSRYAFATAHVHGAIYKQRGWLTSAGKDIKNKEEILALLEAIHLPKRVAIIHCPGHQRGTDPVATGNRKADEAAKQAAQSTRILTETTKNAGKRTADGSEFEKRTADGSEFESPKKKAKVE

SEQ ID NO: 1799 - protein, 2215 aa, synthetic construct
MPAAKRVKLDGGDKKYSIGLDIGTNSVGWAVITDEYKVPSKKFKVLGNTDRHSIKKNLIGALLFDSGETAEATRLKRTARRRYTRRKNRICYLQEIFSNEMAKVDDSFFHRLEESFLVEEDKKHERHPIFGNIVDEVAYHEKYPTIYHLRKKLVDSTDKADLRLIYLALAHMIKFRGHFLIEGDLNPDNSDVDKLFIQLVQTYNQLFEENPINASGVDAKAILSARLSKSRRLENLIAQLPGEKKNGLFGNLIALSLGLTPNFKSNFDLAEDAKLQLSKDTYDDDLDNLLAQIGDQYADLFLAAKNLSDAILLSDILRVNTEITKAPLSASMIKRYDEHHQDLTLLKALVRQQLPEKYKEIFFDQSKNGYAGYIDGGASQEEFYKFIKPILEKMDGTEELLVKLNREDLLRKQRTFDNGSIPHQIHLGELHAILRRQEDFYPFLKDNREKIEKILTFRIPYYVGPLARGNSRFAWMTRKSEETITPWNFEEVVDKGASAQSFIERMTNFDKNLPNEKVLPKHSLLYEYFTVYNELTKVKYVTEGMRKPAFLSGEQKKAIVDLLFKTNRKVTVKQLKEDYFKKIECFDSVEISGVEDRFNASLGTYHDLLKIIKDKDFLDNEENEDILEDIVLTLTLFEDREMIEERLKTYAHLFDDKVMKQLKRRRYTGWGRLSRKLINGIRDKQSGKTILDFLKSDGFANRNFMQLIHDDSLTFKEDIQKAQVSGQGDSLHEHIANLAGSPAIKKGILQTVKVVDELVKVMGRHKPENIVIEMARENQTTQKGQKNSRERMKRIEEGIKELGSQILKEHPVENTQLQNEKLYLYYLQNGRDMYVDQELDINRLSDYDVDHIVPQSFLKDDSIDNKVLTRSDKARGKSDNVPSEEVVKKMKNYWRQLLNAKLITQRKFDNLTKAERGGLSELDKAGFIKRQLVETRQITKHVAQILDSRMNTKYDENDKLIREVKVITLKSKLVSDFRKDFQFYKVREINNYHHAHDAYLNAVVGTALIKKYPKLESEFVYGDYKVYDVRKMIAKSEQEIGKATAKYFFYSNIMNFFKTEITLANGEIRKRPLIETNGETGEIVWDKGRDFATVRKVLSMPQVNIVKKTEVQTGGFSKESILPKRNSDKLIARKKDWDPKKYGGFDSPTVAYSVLVVAKVEKGKSKKLKSVKELLGITIMERSSFEKNPIDFLEAKGYKEVKKDLIIKLPKYSLFELENGRKRMLASAGELQKGNELALPSKYVNFLYLASHYEKLKGSPEDNEQKQLFVEQHKHYLDEIIEQISEFSKRVILADANLDKVLSAYNKHRDKPIREQAENIIHLFTLTNLGAPAAFKYFDTTIDRKRYTSTKEVLDATLIHQSITGLYETRIDLSQLGGDGGGGGGGGGGGGTLGDQGSRGSDPLPEPRVTLTVEGIPTEFLVNTGAEHSVLTKPMGKMGSKRTVVAGATGSKVYPWTTKRLLKIGQKQVTHSFLVIPECPAPLLGRDLLTKLKAQIQFSTEGPQVTWEDRPAMCLVLNLEEEYRLHEKPVPPSIDPSWLQLFPMVWAEKAGMGLANQVPPVVVELKSDASPVAVRQYPMSKEAREGIRPHIQRFLDLGILVPCQSPWNTPLLPVKKPGTNDYRPVQDLREVNKRVQDIHPTVPNPYNLLSSLPPSHTWYSVLDLKDAFFCLKLHPNSQPLFAFEWRDPEKGNTGQLTWTRLPQGFKNSPTLFNEALHRDLASFRALNPQVVMLQYVDDLLVAAPTYRDCKEGTRRLLQELSKLGYRVSAKKAQLCREEVTYLGYLLKGGKRWLTPARKATVMKIPTPTTPRQVREFLGKAGFCRLFIPGFASLAAPLYPLTRPKVPFTWTEAHQEAFGRIKEALLSAPALALPDLTKPFALYVDEKEGVARGVLTQTLGPWRRPVAYLSKKLDPVASGWPTCLKAIAAVALLLKDADKLTLGQNVLVIAPHNLESIVRQPPDRWMTNARMTHYQSLLLNERVSFAPPAILNPATLLPVESDDTPIHICSEILAEETGTRPDLRDQPLPGVPAWYTDGSSFIMDGRRQAGAAIVDNKRTVWASNLPEGTSAQKAELIALTQALRLAEGKSINIYTDSRYAFATAHVHGAIYKQRGWLTSAGKDIKNKEEILALLEAIHLPKRVAIIHCPGHQRGTDPVATGNRKADEAAKQAAQSTRILTETTKNAGKRTADGSEFEKRTADGSEFESPKKKAKVE

SEQ ID NO: 1800 - protein, 2223 aa, synthetic construct
MPAAKRVKLDGGDKKYSIGLDIGTNSVGWAVITDEYKVPSKKFKVLGNTDRHSIKKNLIGALLFDSGETAEATRLKRTARRRYTRRKNRICYLQEIFSNEMAKVDDSFFHRLEESFLVEEDKKHERHPIFGNIVDEVAYHEKYPTIYHLRKKLVDSTDKADLRLIYLALAHMIKFRGHFLIEGDLNPDNSDVDKLFIQLVQTYNQLFEENPINASGVDAKAILSARLSKSRRLENLIAQLPGEKKNGLFGNLIALSLGLTPNFKSNFDLAEDAKLQLSKDTYDDDLDNLLAQIGDQYADLFLAAKNLSDAILLSDILRVNTEITKAPLSASMIKRYDEHHQDLTLLKALVRQQLPEKYKEIFFDQSKNGYAGYIDGGASQEEFYKFIKPILEKMDGTEELLVKLNREDLLRKQRTFDNGSIPHQIHLGELHAILRRQEDFYPFLKDNREKIEKILTFRIPYYVGPLARGNSRFAWMTRKSEETITPWNFEEVVDKGASAQSFIERMTNFDKNLPNEKVLPKHSLLYEYFTVYNELTKVKYVTEGMRKPAFLSGEQKKAIVDLLFKTNRKVTVKQLKEDYFKKIECFDSVEISGVEDRFNASLGTYHDLLKIIKDKDFLDNEENEDILEDIVLTLTLFEDREMIEERLKTYAHLFDDKVMKQLKRRRYTGWGRLSRKLINGIRDKQSGKTILDFLKSDGFANRNFMQLIHDDSLTFKEDIQKAQVSGQGDSLHEHIANLAGSPAIKKGILQTVKVVDELVKVMGRHKPENIVIEMARENQTTQKGQKNSRERMKRIEEGIKELGSQILKEHPVENTQLQNEKLYLYYLQNGRDMYVDQELDINRLSDYDVDHIVPQSFLKDDSIDNKVLTRSDKARGKSDNVPSEEVVKKMKNYWRQLLNAKLITQRKFDNLTKAERGGLSELDKAGFIKRQLVETRQITKHVAQILDSRMNTKYDENDKLIREVKVITLKSKLVSDFRKDFQFYKVREINNYHHAHDAYLNAVVGTALIKKYPKLESEFVYGDYKVYDVRKMIAKSEQEIGKATAKYFFYSNIMNFFKTEITLANGEIRKRPLIETNGETGEIVWDKGRDFATVRKVLSMPQVNIVKKTEVQTGGFSKESILPKRNSDKLIARKKDWDPKKYGGFDSPTVAYSVLVVAKVEKGKSKKLKSVKELLGITIMERSSFEKNPIDFLEAKGYKEVKKDLIIKLPKYSLFELENGRKRMLASAGELQKGNELALPSKYVNFLYLASHYEKLKGSPEDNEQKQLFVEQHKHYLDEIIEQISEFSKRVILADANLDKVLSAYNKHRDKPIREQAENIIHLFTLTNLGAPAAFKYFDTTIDRKRYTSTKEVLDATLIHQSITGLYETRIDLSQLGGDGGSGSETPGTSESATPESGGTLGDQGSRGSDPLPEPRVTLTVEGIPTEFLVNTGAEHSVLTKPMGKMGSKRTVVAGATGSKVYPWTTKRLLKIGQKQVTHSFLVIPECPAPLLGRDLLTKLKAQIQFSTEGPQVTWEDRPAMCLVLNLEEEYRLHEKPVPPSIDPSWLQLFPMVWAEKAGMGLANQVPPVVVELKSDASPVAVRQYPMSKEAREGIRPHIQRFLDLGILVPCQSPWNTPLLPVKKPGTNDYRPVQDLREVNKRVQDIHPTVPNPYNLLSSLPPSHTWYSVLDLKDAFFCLKLHPNSQPLFAFEWRDPEKGNTGQLTWTRLPQGFKNSPTLFNEALHRDLASFRALNPQVVMLQYVDDLLVAAPTYRDCKEGTRRLLQELSKLGYRVSAKKAQLCREEVTYLGYLLKGGKRWLTPARKATVMKIPTPTTPRQVREFLGKAGFCRLFIPGFASLAAPLYPLTRPKVPFTWTEAHQEAFGRIKEALLSAPALALPDLTKPFALYVDEKEGVARGVLTQTLGPWRRPVAYLSKKLDPVASGWPTCLKAIAAVALLLKDADKLTLGQNVLVIAPHNLESIVRQPPDRWMTNARMTHYQSLLLNERVSFAPPAILNPATLLPVESDDTPIHICSEILAEETGTRPDLRDQPLPGVPAWYTDGSSFIMDGRRQAGAAIVDNKRTVWASNLPEGTSAQKAELIALTQALRLAEGKSINIYTDSRYAFATAHVHGAIYKQRGWLTSAGKDIKNKEEILALLEAIHLPKRVAIIHCPGHQRGTDPVATGNRKADEAAKQAAQSTRILTETTKNAGKRTADGSEFEKRTADGSEFESPKKKAKVE

SEQ ID NO: 1801 - protein, 2218 aa, synthetic construct
MPAAKRVKLDGGDKKYSIGLDIGTNSVGWAVITDEYKVPSKKFKVLGNTDRHSIKKNLIGALLFDSGETAEATRLKRTARRRYTRRKNRICYLQEIFSNEMAKVDDSFFHRLEESFLVEEDKKHERHPIFGNIVDEVAYHEKYPTIYHLRKKLVDSTDKADLRLIYLALAHMIKFRGHFLIEGDLNPDNSDVDKLFIQLVQTYNQLFEENPINASGVDAKAILSARLSKSRRLENLIAQLPGEKKNGLFGNLIALSLGLTPNFKSNFDLAEDAKLQLSKDTYDDDLDNLLAQIGDQYADLFLAAKNLSDAILLSDILRVNTEITKAPLSASMIKRYDEHHQDLTLLKALVRQQLPEKYKEIFFDQSKNGYAGYIDGGASQEEFYKFIKPILEKMDGTEELLVKLNREDLLRKQRTFDNGSIPHQIHLGELHAILRRQEDFYPFLKDNREKIEKILTFRIPYYVGPLARGNSRFAWMTRKSEETITPWNFEEVVDKGASAQSFIERMTNFDKNLPNEKVLPKHSLLYEYFTVYNELTKVKYVTEGMRKPAFLSGEQKKAIVDLLFKTNRKVTVKQLKEDYFKKIECFDSVEISGVEDRFNASLGTYHDLLKIIKDKDFLDNEENEDILEDIVLTLTLFEDREMIEERLKTYAHLFDDKVMKQLKRRRYTGWGRLSRKLINGIRDKQSGKTILDFLKSDGFANRNFMQLIHDDSLTFKEDIQKAQVSGQGDSLHEHIANLAGSPAIKKGILQTVKVVDELVKVMGRHKPENIVIEMARENQTTQKGQKNSRERMKRIEEGIKELGSQILKEHPVENTQLQNEKLYLYYLQNGRDMYVDQELDINRLSDYDVDHIVPQSFLKDDSIDNKVLTRSDKARGKSDNVPSEEVVKKMKNYWRQLLNAKLITQRKFDNLTKAERGGLSELDKAGFIKRQLVETRQITKHVAQILDSRMNTKYDENDKLIREVKVITLKSKLVSDFRKDFQFYKVREINNYHHAHDAYLNAVVGTALIKKYPKLESEFVYGDYKVYDVRKMIAKSEQEIGKATAKYFFYSNIMNFFKTEITLANGEIRKRPLIETNGETGEIVWDKGRDFATVRKVLSMPQVNIVKKTEVQTGGFSKESILPKRNSDKLIARKKDWDPKKYGGFDSPTVAYSVLVVAKVEKGKSKKLKSVKELLGITIMERSSFEKNPIDFLEAKGYKEVKKDLIIKLPKYSLFELENGRKRMLASAGELQKGNELALPSKYVNFLYLASHYEKLKGSPEDNEQKQLFVEQHKHYLDEIIEQISEFSKRVILADANLDKVLSAYNKHRDKPIREQAENIIHLFTLTNLGAPAAFKYFDTTIDRKRYTSTKEVLDATLIHQSITGLYETRIDLSQLGGDGGGSSGGSEAAAKGGTLGDQGSRGSDPLPEPRVTLTVEGIPTEFLVNTGAEHSVLTKPMGKMGSKRTVVAGATGSKVYPWTTKRLLKIGQKQVTHSFLVIPECPAPLLGRDLLTKLKAQIQFSTEGPQVTWEDRPAMCLVLNLEEEYRLHEKPVPPSIDPSWLQLFPMVWAEKAGMGLANQVPPVVVELKSDASPVAVRQYPMSKEAREGIRPHIQRFLDLGILVPCQSPWNTPLLPVKKPGTNDYRPVQDLREVNKRVQDIHPTVPNPYNLLSSLPPSHTWYSVLDLKDAFFCLKLHPNSQPLFAFEWRDPEKGNTGQLTWTRLPQGFKNSPTLFNEALHRDLASFRALNPQVVMLQYVDDLLVAAPTYRDCKEGTRRLLQELSKLGYRVSAKKAQLCREEVTYLGYLLKGGKRWLTPARKATVMKIPTPTTPRQVREFLGKAGFCRLFIPGFASLAAPLYPLTRPKVPFTWTEAHQEAFGRIKEALLSAPALALPDLTKPFALYVDEKEGVARGVLTQTLGPWRRPVAYLSKKLDPVASGWPTCLKAIAAVALLLKDADKLTLGQNVLVIAPHNLESIVRQPPDRWMTNARMTHYQSLLLNERVSFAPPAILNPATLLPVESDDTPIHICSEILAEETGTRPDLRDQPLPGVPAWYTDGSSFIMDGRRQAGAAIVDNKRTVWASNLPEGTSAQKAELIALTQALRLAEGKSINIYTDSRYAFATAHVHGAIYKQRGWLTSAGKDIKNKEEILALLEAIHLPKRVAIIHCPGHQRGTDPVATGNRKADEAAKQAAQSTRILTETTKNAGKRTADGSEFEKRTADGSEFESPKKKAKVE

SEQ ID NO: 1802 - protein, 2216 aa, synthetic construct
MPAAKRVKLDGGDKKYSIGLDIGTNSVGWAVITDEYKVPSKKFKVLGNTDRHSIKKNLIGALLFDSGETAEATRLKRTARRRYTRRKNRICYLQEIFSNEMAKVDDSFFHRLEESFLVEEDKKHERHPIFGNIVDEVAYHEKYPTIYHLRKKLVDSTDKADLRLIYLALAHMIKFRGHFLIEGDLNPDNSDVDKLFIQLVQTYNQLFEENPINASGVDAKAILSARLSKSRRLENLIAQLPGEKKNGLFGNLIALSLGLTPNFKSNFDLAEDAKLQLSKDTYDDDLDNLLAQIGDQYADLFLAAKNLSDAILLSDILRVNTEITKAPLSASMIKRYDEHHQDLTLLKALVRQQLPEKYKEIFFDQSKNGYAGYIDGGASQEEFYKFIKPILEKMDGTEELLVKLNREDLLRKQRTFDNGSIPHQIHLGELHAILRRQEDFYPFLKDNREKIEKILTFRIPYYVGPLARGNSRFAWMTRKSEETITPWNFEEVVDKGASAQSFIERMTNFDKNLPNEKVLPKHSLLYEYFTVYNELTKVKYVTEGMRKPAFLSGEQKKAIVDLLFKTNRKVTVKQLKEDYFKKIECFDSVEISGVEDRFNASLGTYHDLLKIIKDKDFLDNEENEDILEDIVLTLTLFEDREMIEERLKTYAHLFDDKVMKQLKRRRYTGWGRLSRKLINGIRDKQSGKTILDFLKSDGFANRNFMQLIHDDSLTFKEDIQKAQVSGQGDSLHEHIANLAGSPAIKKGILQTVKVVDELVKVMGRHKPENIVIEMARENQTTQKGQKNSRERMKRIEEGIKELGSQILKEHPVENTQLQNEKLYLYYLQNGRDMYVDQELDINRLSDYDVDHIVPQSFLKDDSIDNKVLTRSDKARGKSDNVPSEEVVKKMKNYWRQLLNAKLITQRKFDNLTKAERGGLSELDKAGFIKRQLVETRQITKHVAQILDSRMNTKYDENDKLIREVKVITLKSKLVSDFRKDFQFYKVREINNYHHAHDAYLNAVVGTALIKKYPKLESEFVYGDYKVYDVRKMIAKSEQEIGKATAKYFFYSNIMNFFKTEITLANGEIRKRPLIETNGETGEIVWDKGRDFATVRKVLSMPQVNIVKKTEVQTGGFSKESILPKRNSDKLIARKKDWDPKKYGGFDSPTVAYSVLVVAKVEKGKSKKLKSVKELLGITIMERSSFEKNPIDFLEAKGYKEVKKDLIIKLPKYSLFELENGRKRMLASAGELQKGNELALPSKYVNFLYLASHYEKLKGSPEDNEQKQLFVEQHKHYLDEIIEQISEFSKRVILADANLDKVLSAYNKHRDKPIREQAENIIHLFTLTNLGAPAAFKYFDTTIDRKRYTSTKEVLDATLIHQSITGLYETRIDLSQLGGDGGGGSPAPGSSGGTLGDQGSRGSDPLPEPRVTLTVEGIPTEFLVNTGAEHSVLTKPMGKMGSKRTVVAGATGSKVYPWTTKRLLKIGQKQVTHSFLVIPECPAPLLGRDLLTKLKAQIQFSTEGPQVTWEDRPAMCLVLNLEEEYRLHEKPVPPSIDPSWLQLFPMVWAEKAGMGLANQVPPVVVELKSDASPVAVRQYPMSKEAREGIRPHIQRFLDLGILVPCQSPWNTPLLPVKKPGTNDYRPVQDLREVNKRVQDIHPTVPNPYNLLSSLPPSHTWYSVLDLKDAFFCLKLHPNSQPLFAFEWRDPEKGNTGQLTWTRLPQGFKNSPTLFNEALHRDLASFRALNPQVVMLQYVDDLLVAAPTYRDCKEGTRRLLQELSKLGYRVSAKKAQLCREEVTYLGYLLKGGKRWLTPARKATVMKIPTPTTPRQVREFLGKAGFCRLFIPGFASLAAPLYPLTRPKVPFTWTEAHQEAFGRIKEALLSAPALALPDLTKPFALYVDEKEGVARGVLTQTLGPWRRPVAYLSKKLDPVASGWPTCLKAIAAVALLLKDADKLTLGQNVLVIAPHNLESIVRQPPDRWMTNARMTHYQSLLLNERVSFAPPAILNPATLLPVESDDTPIHICSEILAEETGTRPDLRDQPLPGVPAWYTDGSSFIMDGRRQAGAAIVDNKRTVWASNLPEGTSAQKAELIALTQALRLAEGKSINIYTDSRYAFATAHVHGAIYKQRGWLTSAGKDIKNKEEILALLEAIHLPKRVAIIHCPGHQRGTDPVATGNRKADEAAKQAAQSTRILTETTKNAGKRTADGSEFEKRTADGSEFESPKKKAKVE

SEQ ID NO: 1803 - protein, 2237 aa, synthetic construct
MPAAKRVKLDGGDKKYSIGLDIGTNSVGWAVITDEYKVPSKKFKVLGNTDRHSIKKNLIGALLFDSGETAEATRLKRTARRRYTRRKNRICYLQEIFSNEMAKVDDSFFHRLEESFLVEEDKKHERHPIFGNIVDEVAYHEKYPTIYHLRKKLVDSTDKADLRLIYLALAHMIKFRGHFLIEGDLNPDNSDVDKLFIQLVQTYNQLFEENPINASGVDAKAILSARLSKSRRLENLIAQLPGEKKNGLFGNLIALSLGLTPNFKSNFDLAEDAKLQLSKDTYDDDLDNLLAQIGDQYADLFLAAKNLSDAILLSDILRVNTEITKAPLSASMIKRYDEHHQDLTLLKALVRQQLPEKYKEIFFDQSKNGYAGYIDGGASQEEFYKFIKPILEKMDGTEELLVKLNREDLLRKQRTFDNGSIPHQIHLGELHAILRRQEDFYPFLKDNREKIEKILTFRIPYYVGPLARGNSRFAWMTRKSEETITPWNFEEVVDKGASAQSFIERMTNFDKNLPNEKVLPKHSLLYEYFTVYNELTKVKYVTEGMRKPAFLSGEQKKAIVDLLFKTNRKVTVKQLKEDYFKKIECFDSVEISGVEDRFNASLGTYHDLLKIIKDKDFLDNEENEDILEDIVLTLTLFEDREMIEERLKTYAHLFDDKVMKQLKRRRYTGWGRLSRKLINGIRDKQSGKTILDFLKSDGFANRNFMQLIHDDSLTFKEDIQKAQVSGQGDSLHEHIANLAGSPAIKKGILQTVKVVDELVKVMGRHKPENIVIEMARENQTTQKGQKNSRERMKRIEEGIKELGSQILKEHPVENTQLQNEKLYLYYLQNGRDMYVDQELDINRLSDYDVDHIVPQSFLKDDSIDNKVLTRSDKARGKSDNVPSEEVVKKMKNYWRQLLNAKLITQRKFDNLTKAERGGLSELDKAGFIKRQLVETRQITKHVAQILDSRMNTKYDENDKLIREVKVITLKSKLVSDFRKDFQFYKVREINNYHHAHDAYLNAVVGTALIKKYPKLESEFVYGDYKVYDVRKMIAKSEQEIGKATAKYFFYSNIMNFFKTEITLANGEIRKRPLIETNGETGEIVWDKGRDFATVRKVLSMPQVNIVKKTEVQTGGFSKESILPKRNSDKLIARKKDWDPKKYGGFDSPTVAYSVLVVAKVEKGKSKKLKSVKELLGITIMERSSFEKNPIDFLEAKGYKEVKKDLIIKLPKYSLFELENGRKRMLASAGELQKGNELALPSKYVNFLYLASHYEKLKGSPEDNEQKQLFVEQHKHYLDEIIEQISEFSKRVILADANLDKVLSAYNKHRDKPIREQAENIIHLFTLTNLGAPAAFKYFDTTIDRKRYTSTKEVLDATLIHQSITGLYETRIDLSQLGGDGGGGGGSGGGGSGGGGSGGGGSGGGGSGGGGSGGTLGDQGSRGSDPLPEPRVTLTVEGIPTEFLVNTGAEHSVLTKPMGKMGSKRTVVAGATGSKVYPWTTKRLLKIGQKQVTHSFLVIPECPAPLLGRDLLTKLKAQIQFSTEGPQVTWEDRPAMCLVLNLEEEYRLHEKPVPPSIDPSWLQLFPMVWAEKAGMGLANQVPPVVVELKSDASPVAVRQYPMSKEAREGIRPHIQRFLDLGILVPCQSPWNTPLLPVKKPGTNDYRPVQDLREVNKRVQDIHPTVPNPYNLLSSLPPSHTWYSVLDLKDAFFCLKLHPNSQPLFAFEWRDPEKGNTGQLTWTRLPQGFKNSPTLFNEALHRDLASFRALNPQVVMLQYVDDLLVAAPTYRDCKEGTRRLLQELSKLGYRVSAKKAQLCREEVTYLGYLLKGGKRWLTPARKATVMKIPTPTTPRQVREFLGKAGFCRLFIPGFASLAAPLYPLTRPKVPFTWTEAHQEAFGRIKEALLSAPALALPDLTKPFALYVDEKEGVARGVLTQTLGPWRRPVAYLSKKLDPVASGWPTCLKAIAAVALLLKDADKLTLGQNVLVIAPHNLESIVRQPPDRWMTNARMTHYQSLLLNERVSFAPPAILNPATLLPVESDDTPIHICSEILAEETGTRPDLRDQPLPGVPAWYTDGSSFIMDGRRQAGAAIVDNKRTVWASNLPEGTSAQKAELIALTQALRLAEGKSINIYTDSRYAFATAHVHGAIYKQRGWLTSAGKDIKNKEEILALLEAIHLPKRVAIIHCPGHQRGTDPVATGNRKADEAAKQAAQSTRILTETTKNAGKRTADGSEFEKRTADGSEFESPKKKAKVE

SEQ ID NO: 1804 - protein, 2218 aa, synthetic construct
MPAAKRVKLDGGDKKYSIGLDIGTNSVGWAVITDEYKVPSKKFKVLGNTDRHSIKKNLIGALLFDSGETAEATRLKRTARRRYTRRKNRICYLQEIFSNEMAKVDDSFFHRLEESFLVEEDKKHERHPIFGNIVDEVAYHEKYPTIYHLRKKLVDSTDKADLRLIYLALAHMIKFRGHFLIEGDLNPDNSDVDKLFIQLVQTYNQLFEENPINASGVDAKAILSARLSKSRRLENLIAQLPGEKKNGLFGNLIALSLGLTPNFKSNFDLAEDAKLQLSKDTYDDDLDNLLAQIGDQYADLFLAAKNLSDAILLSDILRVNTEITKAPLSASMIKRYDEHHQDLTLLKALVRQQLPEKYKEIFFDQSKNGYAGYIDGGASQEEFYKFIKPILEKMDGTEELLVKLNREDLLRKQRTFDNGSIPHQIHLGELHAILRRQEDFYPFLKDNREKIEKILTFRIPYYVGPLARGNSRFAWMTRKSEETITPWNFEEVVDKGASAQSFIERMTNFDKNLPNEKVLPKHSLLYEYFTVYNELTKVKYVTEGMRKPAFLSGEQKKAIVDLLFKTNRKVTVKQLKEDYFKKIECFDSVEISGVEDRFNASLGTYHDLLKIIKDKDFLDNEENEDILEDIVLTLTLFEDREMIEERLKTYAHLFDDKVMKQLKRRRYTGWGRLSRKLINGIRDKQSGKTILDFLKSDGFANRNFMQLIHDDSLTFKEDIQKAQVSGQGDSLHEHIANLAGSPAIKKGILQTVKVVDELVKVMGRHKPENIVIEMARENQTTQKGQKNSRERMKRIEEGIKELGSQILKEHPVENTQLQNEKLYLYYLQNGRDMYVDQELDINRLSDYDVDHIVPQSFLKDDSIDNKVLTRSDKARGKSDNVPSEEVVKKMKNYWRQLLNAKLITQRKFDNLTKAERGGLSELDKAGFIKRQLVETRQITKHVAQILDSRMNTKYDENDKLIREVKVITLKSKLVSDFRKDFQFYKVREINNYHHAHDAYLNAVVGTALIKKYPKLESEFVYGDYKVYDVRKMIAKSEQEIGKATAKYFFYSNIMNFFKTEITLANGEIRKRPLIETNGETGEIVWDKGRDFATVRKVLSMPQVNIVKKTEVQTGGFSKESILPKRNSDKLIARKKDWDPKKYGGFDSPTVAYSVLVVAKVEKGKSKKLKSVKELLGITIMERSSFEKNPIDFLEAKGYKEVKKDLIIKLPKYSLFELENGRKRMLASAGELQKGNELALPSKYVNFLYLASHYEKLKGSPEDNEQKQLFVEQHKHYLDEIIEQISEFSKRVILADANLDKVLSAYNKHRDKPIREQAENIIHLFTLTNLGAPAAFKYFDTTIDRKRYTSTKEVLDATLIHQSITGLYETRIDLSQLGGDGGEAAAKGSSPAPGGTLGDQGSRGSDPLPEPRVTLTVEGIPTEFLVNTGAEHSVLTKPMGKMGSKRTVVAGATGSKVYPWTTKRLLKIGQKQVTHSFLVIPECPAPLLGRDLLTKLKAQIQFSTEGPQVTWEDRPAMCLVLNLEEEYRLHEKPVPPSIDPSWLQLFPMVWAEKAGMGLANQVPPVVVELKSDASPVAVRQYPMSKEAREGIRPHIQRFLDLGILVPCQSPWNTPLLPVKKPGTNDYRPVQDLREVNKRVQDIHPTVPNPYNLLSSLPPSHTWYSVLDLKDAFFCLKLHPNSQPLFAFEWRDPEKGNTGQLTWTRLPQGFKNSPTLFNEALHRDLASFRALNPQVVMLQYVDDLLVAAPTYRDCKEGTRRLLQELSKLGYRVSAKKAQLCREEVTYLGYLLKGGKRWLTPARKATVMKIPTPTTPRQVREFLGKAGFCRLFIPGFASLAAPLYPLTRPKVPFTWTEAHQEAFGRIKEALLSAPALALPDLTKPFALYVDEKEGVARGVLTQTLGPWRRPVAYLSKKLDPVASGWPTCLKAIAAVALLLKDADKLTLGQNVLVIAPHNLESIVRQPPDRWMTNARMTHYQSLLLNERVSFAPPAILNPATLLPVESDDTPIHICSEILAEETGTRPDLRDQPLPGVPAWYTDGSSFIMDGRRQAGAAIVDNKRTVWASNLPEGTSAQKAELIALTQALRLAEGKSINIYTDSRYAFATAHVHGAIYKQRGWLTSAGKDIKNKEEILALLEAIHLPKRVAIIHCPGHQRGTDPVATGNRKADEAAKQAAQSTRILTETTKNAGKRTADGSEFEKRTADGSEFESPKKKAKVE

SEQ ID NO: 1805 - protein, 2218 aa, synthetic construct
MPAAKRVKLDGGDKKYSIGLDIGTNSVGWAVITDEYKVPSKKFKVLGNTDRHSIKKNLIGALLFDSGETAEATRLKRTARRRYTRRKNRICYLQEIFSNEMAKVDDSFFHRLEESFLVEEDKKHERHPIFGNIVDEVAYHEKYPTIYHLRKKLVDSTDKADLRLIYLALAHMIKFRGHFLIEGDLNPDNSDVDKLFIQLVQTYNQLFEENPINASGVDAKAILSARLSKSRRLENLIAQLPGEKKNGLFGNLIALSLGLTPNFKSNFDLAEDAKLQLSKDTYDDDLDNLLAQIGDQYADLFLAAKNLSDAILLSDILRVNTEITKAPLSASMIKRYDEHHQDLTLLKALVRQQLPEKYKEIFFDQSKNGYAGYIDGGASQEEFYKFIKPILEKMDGTEELLVKLNREDLLRKQRTFDNGSIPHQIHLGELHAILRRQEDFYPFLKDNREKIEKILTFRIPYYVGPLARGNSRFAWMTRKSEETITPWNFEEVVDKGASAQSFIERMTNFDKNLPNEKVLPKHSLLYEYFTVYNELTKVKYVTEGMRKPAFLSGEQKKAIVDLLFKTNRKVTVKQLKEDYFKKIECFDSVEISGVEDRFNASLGTYHDLLKIIKDKDFLDNEENEDILEDIVLTLTLFEDREMIEERLKTYAHLFDDKVMKQLKRRRYTGWGRLSRKLINGIRDKQSGKTILDFLKSDGFANRNFMQLIHDDSLTFKEDIQKAQVSGQGDSLHEHIANLAGSPAIKKGILQTVKVVDELVKVMGRHKPENIVIEMARENQTTQKGQKNSRERMKRIEEGIKELGSQILKEHPVENTQLQNEKLYLYYLQNGRDMYVDQELDINRLSDYDVDHIVPQSFLKDDSIDNKVLTRSDKARGKSDNVPSEEVVKKMKNYWRQLLNAKLITQRKFDNLTKAERGGLSELDKAGFIKRQLVETRQITKHVAQILDSRMNTKYDENDKLIREVKVITLKSKLVSDFRKDFQFYKVREINNYHHAHDAYLNAVVGTALIKKYPKLESEFVYGDYKVYDVRKMIAKSEQEIGKATAKYFFYSNIMNFFKTEITLANGEIRKRPLIETNGETGEIVWDKGRDFATVRKVLSMPQVNIVKKTEVQTGGFSKESILPKRNSDKLIARKKDWDPKKYGGFDSPTVAYSVLVVAKVEKGKSKKLKSVKELLGITIMERSSFEKNPIDFLEAKGYKEVKKDLIIKLPKYSLFELENGRKRMLASAGELQKGNELALPSKYVNFLYLASHYEKLKGSPEDNEQKQLFVEQHKHYLDEIIEQISEFSKRVILADANLDKVLSAYNKHRDKPIREQAENIIHLFTLTNLGAPAAFKYFDTTIDRKRYTSTKEVLDATLIHQSITGLYETRIDLSQLGGDGGGGSGSSEAAAKGGTLGDQGSRGSDPLPEPRVTLTVEGIPTEFLVNTGAEHSVLTKPMGKMGSKRTVVAGATGSKVYPWTTKRLLKIGQKQVTHSFLVIPECPAPLLGRDLLTKLKAQIQFSTEGPQVTWEDRPAMCLVLNLEEEYRLHEKPVPPSIDPSWLQLFPMVWAEKAGMGLANQVPPVVVELKSDASPVAVRQYPMSKEAREGIRPHIQRFLDLGILVPCQSPWNTPLLPVKKPGTNDYRPVQDLREVNKRVQDIHPTVPNPYNLLSSLPPSHTWYSVLDLKDAFFCLKLHPNSQPLFAFEWRDPEKGNTGQLTWTRLPQGFKNSPTLFNEALHRDLASFRALNPQVVMLQYVDDLLVAAPTYRDCKEGTRRLLQELSKLGYRVSAKKAQLCREEVTYLGYLLKGGKRWLTPARKATVMKIPTPTTPRQVREFLGKAGFCRLFIPGFASLAAPLYPLTRPKVPFTWTEAHQEAFGRIKEALLSAPALALPDLTKPFALYVDEKEGVARGVLTQTLGPWRRPVAYLSKKLDPVASGWPTCLKAIAAVALLLKDADKLTLGQNVLVIAPHNLESIVRQPPDRWMTNARMTHYQSLLLNERVSFAPPAILNPATLLPVESDDTPIHICSEILAEETGTRPDLRDQPLPGVPAWYTDGSSFIMDGRRQAGAAIVDNKRTVWASNLPEGTSAQKAELIALTQALRLAEGKSINIYTDSRYAFATAHVHGAIYKQRGWLTSAGKDIKNKEEILALLEAIHLPKRVAIIHCPGHQRGTDPVATGNRKADEAAKQAAQSTRILTETTKNAGKRTADGSEFEKRTADGSEFESPKKKAKVE

SEQ ID NO: 1806 - protein, 2216 aa, synthetic construct
MPAAKRVKLDGGDKKYSIGLDIGTNSVGWAVITDEYKVPSKKFKVLGNTDRHSIKKNLIGALLFDSGETAEATRLKRTARRRYTRRKNRICYLQEIFSNEMAKVDDSFFHRLEESFLVEEDKKHERHPIFGNIVDEVAYHEKYPTIYHLRKKLVDSTDKADLRLIYLALAHMIKFRGHFLIEGDLNPDNSDVDKLFIQLVQTYNQLFEENPINASGVDAKAILSARLSKSRRLENLIAQLPGEKKNGLFGNLIALSLGLTPNFKSNFDLAEDAKLQLSKDTYDDDLDNLLAQIGDQYADLFLAAKNLSDAILLSDILRVNTEITKAPLSASMIKRYDEHHQDLTLLKALVRQQLPEKYKEIFFDQSKNGYAGYIDGGASQEEFYKFIKPILEKMDGTEELLVKLNREDLLRKQRTFDNGSIPHQIHLGELHAILRRQEDFYPFLKDNREKIEKILTFRIPYYVGPLARGNSRFAWMTRKSEETITPWNFEEVVDKGASAQSFIERMTNFDKNLPNEKVLPKHSLLYEYFTVYNELTKVKYVTEGMRKPAFLSGEQKKAIVDLLFKTNRKVTVKQLKEDYFKKIECFDSVEISGVEDRFNASLGTYHDLLKIIKDKDFLDNEENEDILEDIVLTLTLFEDREMIEERLKTYAHLFDDKVMKQLKRRRYTGWGRLSRKLINGIRDKQSGKTILDFLKSDGFANRNFMQLIHDDSLTFKEDIQKAQVSGQGDSLHEHIANLAGSPAIKKGILQTVKVVDELVKVMGRHKPENIVIEMARENQTTQKGQKNSRERMKRIEEGIKELGSQILKEHPVENTQLQNEKLYLYYLQNGRDMYVDQELDINRLSDYDVDHIVPQSFLKDDSIDNKVLTRSDKARGKSDNVPSEEVVKKMKNYWRQLLNAKLITQRKFDNLTKAERGGLSELDKAGFIKRQLVETRQITKHVAQILDSRMNTKYDENDKLIREVKVITLKSKLVSDFRKDFQFYKVREINNYHHAHDAYLNAVVGTALIKKYPKLESEFVYGDYKVYDVRKMIAKSEQEIGKATAKYFFYSNIMNFFKTEITLANGEIRKRPLIETNGETGEIVWDKGRDFATVRKVLSMPQVNIVKKTEVQTGGFSKESILPKRNSDKLIARKKDWDPKKYGGFDSPTVAYSVLVVAKVEKGKSKKLKSVKELLGITIMERSSFEKNPIDFLEAKGYKEVKKDLIIKLPKYSLFELENGRKRMLASAGELQKGNELALPSKYVNFLYLASHYEKLKGSPEDNEQKQLFVEQHKHYLDEIIEQISEFSKRVILADANLDKVLSAYNKHRDKPIREQAENIIHLFTLTNLGAPAAFKYFDTTIDRKRYTSTKEVLDATLIHQSITGLYETRIDLSQLGGDGGPAPGSSGGGGGTLGDQGSRGSDPLPEPRVTLTVEGIPTEFLVNTGAEHSVLTKPMGKMGSKRTVVAGATGSKVYPWTTKRLLKIGQKQVTHSFLVIPECPAPLLGRDLLTKLKAQIQFSTEGPQVTWEDRPAMCLVLNLEEEYRLHEKPVPPSIDPSWLQLFPMVWAEKAGMGLANQVPPVVVELKSDASPVAVRQYPMSKEAREGIRPHIQRFLDLGILVPCQSPWNTPLLPVKKPGTNDYRPVQDLREVNKRVQDIHPTVPNPYNLLSSLPPSHTWYSVLDLKDAFFCLKLHPNSQPLFAFEWRDPEKGNTGQLTWTRLPQGFKNSPTLFNEALHRDLASFRALNPQVVMLQYVDDLLVAAPTYRDCKEGTRRLLQELSKLGYRVSAKKAQLCREEVTYLGYLLKGGKRWLTPARKATVMKIPTPTTPRQVREFLGKAGFCRLFIPGFASLAAPLYPLTRPKVPFTWTEAHQEAFGRIKEALLSAPALALPDLTKPFALYVDEKEGVARGVLTQTLGPWRRPVAYLSKKLDPVASGWPTCLKAIAAVALLLKDADKLTLGQNVLVIAPHNLESIVRQPPDRWMTNARMTHYQSLLLNERVSFAPPAILNPATLLPVESDDTPIHICSEILAEETGTRPDLRDQPLPGVPAWYTDGSSFIMDGRRQAGAAIVDNKRTVWASNLPEGTSAQKAELIALTQALRLAEGKSINIYTDSRYAFATAHVHGAIYKQRGWLTSAGKDIKNKEEILALLEAIHLPKRVAIIHCPGHQRGTDPVATGNRKADEAAKQAAQSTRILTETTKNAGKRTADGSEFEKRTADGSEFESPKKKAKVE

SEQ ID NO: 1807 - protein, 2213 aa, synthetic construct
MPAAKRVKLDGGDKKYSIGLDIGTNSVGWAVITDEYKVPSKKFKVLGNTDRHSIKKNLIGALLFDSGETAEATRLKRTARRRYTRRKNRICYLQEIFSNEMAKVDDSFFHRLEESFLVEEDKKHERHPIFGNIVDEVAYHEKYPTIYHLRKKLVDSTDKADLRLIYLALAHMIKFRGHFLIEGDLNPDNSDVDKLFIQLVQTYNQLFEENPINASGVDAKAILSARLSKSRRLENLIAQLPGEKKNGLFGNLIALSLGLTPNFKSNFDLAEDAKLQLSKDTYDDDLDNLLAQIGDQYADLFLAAKNLSDAILLSDILRVNTEITKAPLSASMIKRYDEHHQDLTLLKALVRQQLPEKYKEIFFDQSKNGYAGYIDGGASQEEFYKFIKPILEKMDGTEELLVKLNREDLLRKQRTFDNGSIPHQIHLGELHAILRRQEDFYPFLKDNREKIEKILTFRIPYYVGPLARGNSRFAWMTRKSEETITPWNFEEVVDKGASAQSFIERMTNFDKNLPNEKVLPKHSLLYEYFTVYNELTKVKYVTEGMRKPAFLSGEQKKAIVDLLFKTNRKVTVKQLKEDYFKKIECFDSVEISGVEDRFNASLGTYHDLLKIIKDKDFLDNEENEDILEDIVLTLTLFEDREMIEERLKTYAHLFDDKVMKQLKRRRYTGWGRLSRKLINGIRDKQSGKTILDFLKSDGFANRNFMQLIHDDSLTFKEDIQKAQVSGQGDSLHEHIANLAGSPAIKKGILQTVKVVDELVKVMGRHKPENIVIEMARENQTTQKGQKNSRERMKRIEEGIKELGSQILKEHPVENTQLQNEKLYLYYLQNGRDMYVDQELDINRLSDYDVDHIVPQSFLKDDSIDNKVLTRSDKARGKSDNVPSEEVVKKMKNYWRQLLNAKLITQRKFDNLTKAERGGLSELDKAGFIKRQLVETRQITKHVAQILDSRMNTKYDENDKLIREVKVITLKSKLVSDFRKDFQFYKVREINNYHHAHDAYLNAVVGTALIKKYPKLESEFVYGDYKVYDVRKMIAKSEQEIGKATAKYFFYSNIMNFFKTEITLANGEIRKRPLIETNGETGEIVWDKGRDFATVRKVLSMPQVNIVKKTEVQTGGFSKESILPKRNSDKLIARKKDWDPKKYGGFDSPTVAYSVLVVAKVEKGKSKKLKSVKELLGITIMERSSFEKNPIDFLEAKGYKEVKKDLIIKLPKYSLFELENGRKRMLASAGELQKGNELALPSKYVNFLYLASHYEKLKGSPEDNEQKQLFVEQHKHYLDEIIEQISEFSKRVILADANLDKVLSAYNKHRDKPIREQAENIIHLFTLTNLGAPAAFKYFDTTIDRKRYTSTKEVLDATLIHQSITGLYETRIDLSQLGGDGGGGGPAPGGTLGDQGSRGSDPLPEPRVTLTVEGIPTEFLVNTGAEHSVLTKPMGKMGSKRTVVAGATGSKVYPWTTKRLLKIGQKQVTHSFLVIPECPAPLLGRDLLTKLKAQIQFSTEGPQVTWEDRPAMCLVLNLEEEYRLHEKPVPPSIDPSWLQLFPMVWAEKAGMGLANQVPPVVVELKSDASPVAVRQYPMSKEAREGIRPHIQRFLDLGILVPCQSPWNTPLLPVKKPGTNDYRPVQDLREVNKRVQDIHPTVPNPYNLLSSLPPSHTWYSVLDLKDAFFCLKLHPNSQPLFAFEWRDPEKGNTGQLTWTRLPQGFKNSPTLFNEALHRDLASFRALNPQVVMLQYVDDLLVAAPTYRDCKEGTRRLLQELSKLGYRVSAKKAQLCREEVTYLGYLLKGGKRWLTPARKATVMKIPTPTTPRQVREFLGKAGFCRLFIPGFASLAAPLYPLTRPKVPFTWTEAHQEAFGRIKEALLSAPALALPDLTKPFALYVDEKEGVARGVLTQTLGPWRRPVAYLSKKLDPVASGWPTCLKAIAAVALLLKDADKLTLGQNVLVIAPHNLESIVRQPPDRWMTNARMTHYQSLLLNERVSFAPPAILNPATLLPVESDDTPIHICSEILAEETGTRPDLRDQPLPGVPAWYTDGSSFIMDGRRQAGAAIVDNKRTVWASNLPEGTSAQKAELIALTQALRLAEGKSINIYTDSRYAFATAHVHGAIYKQRGWLTSAGKDIKNKEEILALLEAIHLPKRVAIIHCPGHQRGTDPVATGNRKADEAAKQAAQSTRILTETTKNAGKRTADGSEFEKRTADGSEFESPKKKAKVE

SEQ ID NO: 1808 - protein, 2213 aa, synthetic construct
MPAAKRVKLDGGDKKYSIGLDIGTNSVGWAVITDEYKVPSKKFKVLGNTDRHSIKKNLIGALLFDSGETAEATRLKRTARRRYTRRKNRICYLQEIFSNEMAKVDDSFFHRLEESFLVEEDKKHERHPIFGNIVDEVAYHEKYPTIYHLRKKLVDSTDKADLRLIYLALAHMIKFRGHFLIEGDLNPDNSDVDKLFIQLVQTYNQLFEENPINASGVDAKAILSARLSKSRRLENLIAQLPGEKKNGLFGNLIALSLGLTPNFKSNFDLAEDAKLQLSKDTYDDDLDNLLAQIGDQYADLFLAAKNLSDAILLSDILRVNTEITKAPLSASMIKRYDEHHQDLTLLKALVRQQLPEKYKEIFFDQSKNGYAGYIDGGASQEEFYKFIKPILEKMDGTEELLVKLNREDLLRKQRTFDNGSIPHQIHLGELHAILRRQEDFYPFLKDNREKIEKILTFRIPYYVGPLARGNSRFAWMTRKSEETITPWNFEEVVDKGASAQSFIERMTNFDKNLPNEKVLPKHSLLYEYFTVYNELTKVKYVTEGMRKPAFLSGEQKKAIVDLLFKTNRKVTVKQLKEDYFKKIECFDSVEISGVEDRFNASLGTYHDLLKIIKDKDFLDNEENEDILEDIVLTLTLFEDREMIEERLKTYAHLFDDKVMKQLKRRRYTGWGRLSRKLINGIRDKQSGKTILDFLKSDGFANRNFMQLIHDDSLTFKEDIQKAQVSGQGDSLHEHIANLAGSPAIKKGILQTVKVVDELVKVMGRHKPENIVIEMARENQTTQKGQKNSRERMKRIEEGIKELGSQILKEHPVENTQLQNEKLYLYYLQNGRDMYVDQELDINRLSDYDVDHIVPQSFLKDDSIDNKVLTRSDKARGKSDNVPSEEVVKKMKNYWRQLLNAKLITQRKFDNLTKAERGGLSELDKAGFIKRQLVETRQITKHVAQILDSRMNTKYDENDKLIREVKVITLKSKLVSDFRKDFQFYKVREINNYHHAHDAYLNAVVGTALIKKYPKLESEFVYGDYKVYDVRKMIAKSEQEIGKATAKYFFYSNIMNFFKTEITLANGEIRKRPLIETNGETGEIVWDKGRDFATVRKVLSMPQVNIVKKTEVQTGGFSKESILPKRNSDKLIARKKDWDPKKYGGFDSPTVAYSVLVVAKVEKGKSKKLKSVKELLGITIMERSSFEKNPIDFLEAKGYKEVKKDLIIKLPKYSLFELENGRKRMLASAGELQKGNELALPSKYVNFLYLASHYEKLKGSPEDNEQKQLFVEQHKHYLDEIIEQISEFSKRVILADANLDKVLSAYNKHRDKPIREQAENIIHLFTLTNLGAPAAFKYFDTTIDRKRYTSTKEVLDATLIHQSITGLYETRIDLSQLGGDGGGGSGSSGGTLGDQGSRGSDPLPEPRVTLTVEGIPTEFLVNTGAEHSVLTKPMGKMGSKRTVVAGATGSKVYPWTTKRLLKIGQKQVTHSFLVIPECPAPLLGRDLLTKLKAQIQFSTEGPQVTWEDRPAMCLVLNLEEEYRLHEKPVPPSIDPSWLQLFPMVWAEKAGMGLANQVPPVVVELKSDASPVAVRQYPMSKEAREGIRPHIQRFLDLGILVPCQSPWNTPLLPVKKPGTNDYRPVQDLREVNKRVQDIHPTVPNPYNLLSSLPPSHTWYSVLDLKDAFFCLKLHPNSQPLFAFEWRDPEKGNTGQLTWTRLPQGFKNSPTLFNEALHRDLASFRALNPQVVMLQYVDDLLVAAPTYRDCKEGTRRLLQELSKLGYRVSAKKAQLCREEVTYLGYLLKGGKRWLTPARKATVMKIPTPTTPRQVREFLGKAGFCRLFIPGFASLAAPLYPLTRPKVPFTWTEAHQEAFGRIKEALLSAPALALPDLTKPFALYVDEKEGVARGVLTQTLGPWRRPVAYLSKKLDPVASGWPTCLKAIAAVALLLKDADKLTLGQNVLVIAPHNLESIVRQPPDRWMTNARMTHYQSLLLNERVSFAPPAILNPATLLPVESDDTPIHICSEILAEETGTRPDLRDQPLPGVPAWYTDGSSFIMDGRRQAGAAIVDNKRTVWASNLPEGTSAQKAELIALTQALRLAEGKSINIYTDSRYAFATAHVHGAIYKQRGWLTSAGKDIKNKEEILALLEAIHLPKRVAIIHCPGHQRGTDPVATGNRKADEAAKQAAQSTRILTETTKNAGKRTADGSEFEKRTADGSEFESPKKKAKVE

SEQ ID NO: 1809 - protein, 2227 aa, synthetic construct
MPAAKRVKLDGGDKKYSIGLDIGTNSVGWAVITDEYKVPSKKFKVLGNTDRHSIKKNLIGALLFDSGETAEATRLKRTARRRYTRRKNRICYLQEIFSNEMAKVDDSFFHRLEESFLVEEDKKHERHPIFGNIVDEVAYHEKYPTIYHLRKKLVDSTDKADLRLIYLALAHMIKFRGHFLIEGDLNPDNSDVDKLFIQLVQTYNQLFEENPINASGVDAKAILSARLSKSRRLENLIAQLPGEKKNGLFGNLIALSLGLTPNFKSNFDLAEDAKLQLSKDTYDDDLDNLLAQIGDQYADLFLAAKNLSDAILLSDILRVNTEITKAPLSASMIKRYDEHHQDLTLLKALVRQQLPEKYKEIFFDQSKNGYAGYIDGGASQEEFYKFIKPILEKMDGTEELLVKLNREDLLRKQRTFDNGSIPHQIHLGELHAILRRQEDFYPFLKDNREKIEKILTFRIPYYVGPLARGNSRFAWMTRKSEETITPWNFEEVVDKGASAQSFIERMTNFDKNLPNEKVLPKHSLLYEYFTVYNELTKVKYVTEGMRKPAFLSGEQKKAIVDLLFKTNRKVTVKQLKEDYFKKIECFDSVEISGVEDRFNASLGTYHDLLKIIKDKDFLDNEENEDILEDIVLTLTLFEDREMIEERLKTYAHLFDDKVMKQLKRRRYTGWGRLSRKLINGIRDKQSGKTILDFLKSDGFANRNFMQLIHDDSLTFKEDIQKAQVSGQGDSLHEHIANLAGSPAIKKGILQTVKVVDELVKVMGRHKPENIVIEMARENQTTQKGQKNSRERMKRIEEGIKELGSQILKEHPVENTQLQNEKLYLYYLQNGRDMYVDQELDINRLSDYDVDHIVPQSFLKDDSIDNKVLTRSDKARGKSDNVPSEEVVKKMKNYWRQLLNAKLITQRKFDNLTKAERGGLSELDKAGFIKRQLVETRQITKHVAQILDSRMNTKYDENDKLIREVKVITLKSKLVSDFRKDFQFYKVREINNYHHAHDAYLNAVVGTALIKKYPKLESEFVYGDYKVYDVRKMIAKSEQEIGKATAKYFFYSNIMNFFKTEITLANGEIRKRPLIETNGETGEIVWDKGRDFATVRKVLSMPQVNIVKKTEVQTGGFSKESILPKRNSDKLIARKKDWDPKKYGGFDSPTVAYSVLVVAKVEKGKSKKLKSVKELLGITIMERSSFEKNPIDFLEAKGYKEVKKDLIIKLPKYSLFELENGRKRMLASAGELQKGNELALPSKYVNFLYLASHYEKLKGSPEDNEQKQLFVEQHKHYLDEIIEQISEFSKRVILADANLDKVLSAYNKHRDKPIREQAENIIHLFTLTNLGAPAAFKYFDTTIDRKRYTSTKEVLDATLIHQSITGLYETRIDLSQLGGDGGEAAAKEAAAKEAAAKEAAAKGGTLGDQGSRGSDPLPEPRVTLTVEGIPTEFLVNTGAEHSVLTKPMGKMGSKRTVVAGATGSKVYPWTTKRLLKIGQKQVTHSFLVIPECPAPLLGRDLLTKLKAQIQFSTEGPQVTWEDRPAMCLVLNLEEEYRLHEKPVPPSIDPSWLQLFPMVWAEKAGMGLANQVPPVVVELKSDASPVAVRQYPMSKEAREGIRPHIQRFLDLGILVPCQSPWNTPLLPVKKPGTNDYRPVQDLREVNKRVQDIHPTVPNPYNLLSSLPPSHTWYSVLDLKDAFFCLKLHPNSQPLFAFEWRDPEKGNTGQLTWTRLPQGFKNSPTLFNEALHRDLASFRALNPQVVMLQYVDDLLVAAPTYRDCKEGTRRLLQELSKLGYRVSAKKAQLCREEVTYLGYLLKGGKRWLTPARKATVMKIPTPTTPRQVREFLGKAGFCRLFIPGFASLAAPLYPLTRPKVPFTWTEAHQEAFGRIKEALLSAPALALPDLTKPFALYVDEKEGVARGVLTQTLGPWRRPVAYLSKKLDPVASGWPTCLKAIAAVALLLKDADKLTLGQNVLVIAPHNLESIVRQPPDRWMTNARMTHYQSLLLNERVSFAPPAILNPATLLPVESDDTPIHICSEILAEETGTRPDLRDQPLPGVPAWYTDGSSFIMDGRRQAGAAIVDNKRTVWASNLPEGTSAQKAELIALTQALRLAEGKSINIYTDSRYAFATAHVHGAIYKQRGWLTSAGKDIKNKEEILALLEAIHLPKRVAIIHCPGHQRGTDPVATGNRKADEAAKQAAQSTRILTETTKNAGKRTADGSEFEKRTADGSEFESPKKKAKVE

SEQ ID NO: 1810 - protein, 2218 aa, synthetic construct
MPAAKRVKLDGGDKKYSIGLDIGTNSVGWAVITDEYKVPSKKFKVLGNTDRHSIKKNLIGALLFDSGETAEATRLKRTARRRYTRRKNRICYLQEIFSNEMAKVDDSFFHRLEESFLVEEDKKHERHPIFGNIVDEVAYHEKYPTIYHLRKKLVDSTDKADLRLIYLALAHMIKFRGHFLIEGDLNPDNSDVDKLFIQLVQTYNQLFEENPINASGVDAKAILSARLSKSRRLENLIAQLPGEKKNGLFGNLIALSLGLTPNFKSNFDLAEDAKLQLSKDTYDDDLDNLLAQIGDQYADLFLAAKNLSDAILLSDILRVNTEITKAPLSASMIKRYDEHHQDLTLLKALVRQQLPEKYKEIFFDQSKNGYAGYIDGGASQEEFYKFIKPILEKMDGTEELLVKLNREDLLRKQRTFDNGSIPHQIHLGELHAILRRQEDFYPFLKDNREKIEKILTFRIPYYVGPLARGNSRFAWMTRKSEETITPWNFEEVVDKGASAQSFIERMTNFDKNLPNEKVLPKHSLLYEYFTVYNELTKVKYVTEGMRKPAFLSGEQKKAIVDLLFKTNRKVTVKQLKEDYFKKIECFDSVEISGVEDRFNASLGTYHDLLKIIKDKDFLDNEENEDILEDIVLTLTLFEDREMIEERLKTYAHLFDDKVMKQLKRRRYTGWGRLSRKLINGIRDKQSGKTILDFLKSDGFANRNFMQLIHDDSLTFKEDIQKAQVSGQGDSLHEHIANLAGSPAIKKGILQTVKVVDELVKVMGRHKPENIVIEMARENQTTQKGQKNSRERMKRIEEGIKELGSQILKEHPVENTQLQNEKLYLYYLQNGRDMYVDQELDINRLSDYDVDHIVPQSFLKDDSIDNKVLTRSDKARGKSDNVPSEEVVKKMKNYWRQLLNAKLITQRKFDNLTKAERGGLSELDKAGFIKRQLVETRQITKHVAQILDSRMNTKYDENDKLIREVKVITLKSKLVSDFRKDFQFYKVREINNYHHAHDAYLNAVVGTALIKKYPKLESEFVYGDYKVYDVRKMIAKSEQEIGKATAKYFFYSNIMNFFKTEITLANGEIRKRPLIETNGETGEIVWDKGRDFATVRKVLSMPQVNIVKKTEVQTGGFSKESILPKRNSDKLIARKKDWDPKKYGGFDSPTVAYSVLVVAKVEKGKSKKLKSVKELLGITIMERSSFEKNPIDFLEAKGYKEVKKDLIIKLPKYSLFELENGRKRMLASAGELQKGNELALPSKYVNFLYLASHYEKLKGSPEDNEQKQLFVEQHKHYLDEIIEQISEFSKRVILADANLDKVLSAYNKHRDKPIREQAENIIHLFTLTNLGAPAAFKYFDTTIDRKRYTSTKEVLDATLIHQSITGLYETRIDLSQLGGDGGPAPGGSEAAAKGGTLGDQGSRGSDPLPEPRVTLTVEGIPTEFLVNTGAEHSVLTKPMGKMGSKRTVVAGATGSKVYPWTTKRLLKIGQKQVTHSFLVIPECPAPLLGRDLLTKLKAQIQFSTEGPQVTWEDRPAMCLVLNLEEEYRLHEKPVPPSIDPSWLQLFPMVWAEKAGMGLANQVPPVVVELKSDASPVAVRQYPMSKEAREGIRPHIQRFLDLGILVPCQSPWNTPLLPVKKPGTNDYRPVQDLREVNKRVQDIHPTVPNPYNLLSSLPPSHTWYSVLDLKDAFFCLKLHPNSQPLFAFEWRDPEKGNTGQLTWTRLPQGFKNSPTLFNEALHRDLASFRALNPQVVMLQYVDDLLVAAPTYRDCKEGTRRLLQELSKLGYRVSAKKAQLCREEVTYLGYLLKGGKRWLTPARKATVMKIPTPTTPRQVREFLGKAGFCRLFIPGFASLAAPLYPLTRPKVPFTWTEAHQEAFGRIKEALLSAPALALPDLTKPFALYVDEKEGVARGVLTQTLGPWRRPVAYLSKKLDPVASGWPTCLKAIAAVALLLKDADKLTLGQNVLVIAPHNLESIVRQPPDRWMTNARMTHYQSLLLNERVSFAPPAILNPATLLPVESDDTPIHICSEILAEETGTRPDLRDQPLPGVPAWYTDGSSFIMDGRRQAGAAIVDNKRTVWASNLPEGTSAQKAELIALTQALRLAEGKSINIYTDSRYAFATAHVHGAIYKQRGWLTSAGKDIKNKEEILALLEAIHLPKRVAIIHCPGHQRGTDPVATGNRKADEAAKQAAQSTRILTETTKNAGKRTADGSEFEKRTADGSEFESPKKKAKVE

SEQ ID NO: 1811 - protein, 2213 aa, synthetic construct
MPAAKRVKLDGGDKKYSIGLDIGTNSVGWAVITDEYKVPSKKFKVLGNTDRHSIKKNLIGALLFDSGETAEATRLKRTARRRYTRRKNRICYLQEIFSNEMAKVDDSFFHRLEESFLVEEDKKHERHPIFGNIVDEVAYHEKYPTIYHLRKKLVDSTDKADLRLIYLALAHMIKFRGHFLIEGDLNPDNSDVDKLFIQLVQTYNQLFEENPINASGVDAKAILSARLSKSRRLENLIAQLPGEKKNGLFGNLIALSLGLTPNFKSNFDLAEDAKLQLSKDTYDDDLDNLLAQIGDQYADLFLAAKNLSDAILLSDILRVNTEITKAPLSASMIKRYDEHHQDLTLLKALVRQQLPEKYKEIFFDQSKNGYAGYIDGGASQEEFYKFIKPILEKMDGTEELLVKLNREDLLRKQRTFDNGSIPHQIHLGELHAILRRQEDFYPFLKDNREKIEKILTFRIPYYVGPLARGNSRFAWMTRKSEETITPWNFEEVVDKGASAQSFIERMTNFDKNLPNEKVLPKHSLLYEYFTVYNELTKVKYVTEGMRKPAFLSGEQKKAIVDLLFKTNRKVTVKQLKEDYFKKIECFDSVEISGVEDRFNASLGTYHDLLKIIKDKDFLDNEENEDILEDIVLTLTLFEDREMIEERLKTYAHLFDDKVMKQLKRRRYTGWGRLSRKLINGIRDKQSGKTILDFLKSDGFANRNFMQLIHDDSLTFKEDIQKAQVSGQGDSLHEHIANLAGSPAIKKGILQTVKVVDELVKVMGRHKPENIVIEMARENQTTQKGQKNSRERMKRIEEGIKELGSQILKEHPVENTQLQNEKLYLYYLQNGRDMYVDQELDINRLSDYDVDHIVPQSFLKDDSIDNKVLTRSDKARGKSDNVPSEEVVKKMKNYWRQLLNAKLITQRKFDNLTKAERGGLSELDKAGFIKRQLVETRQITKHVAQILDSRMNTKYDENDKLIREVKVITLKSKLVSDFRKDFQFYKVREINNYHHAHDAYLNAVVGTALIKKYPKLESEFVYGDYKVYDVRKMIAKSEQEIGKATAKYFFYSNIMNFFKTEITLANGEIRKRPLIETNGETGEIVWDKGRDFATVRKVLSMPQVNIVKKTEVQTGGFSKESILPKRNSDKLIARKKDWDPKKYGGFDSPTVAYSVLVVAKVEKGKSKKLKSVKELLGITIMERSSFEKNPIDFLEAKGYKEVKKDLIIKLPKYSLFELENGRKRMLASAGELQKGNELALPSKYVNFLYLASHYEKLKGSPEDNEQKQLFVEQHKHYLDEIIEQISEFSKRVILADANLDKVLSAYNKHRDKPIREQAENIIHLFTLTNLGAPAAFKYFDTTIDRKRYTSTKEVLDATLIHQSITGLYETRIDLSQLGGDGGPAPGGSGGTLGDQGSRGSDPLPEPRVTLTVEGIPTEFLVNTGAEHSVLTKPMGKMGSKRTVVAGATGSKVYPWTTKRLLKIGQKQVTHSFLVIPECPAPLLGRDLLTKLKAQIQFSTEGPQVTWEDRPAMCLVLNLEEEYRLHEKPVPPSIDPSWLQLFPMVWAEKAGMGLANQVPPVVVELKSDASPVAVRQYPMSKEAREGIRPHIQRFLDLGILVPCQSPWNTPLLPVKKPGTNDYRPVQDLREVNKRVQDIHPTVPNPYNLLSSLPPSHTWYSVLDLKDAFFCLKLHPNSQPLFAFEWRDPEKGNTGQLTWTRLPQGFKNSPTLFNEALHRDLASFRALNPQVVMLQYVDDLLVAAPTYRDCKEGTRRLLQELSKLGYRVSAKKAQLCREEVTYLGYLLKGGKRWLTPARKATVMKIPTPTTPRQVREFLGKAGFCRLFIPGFASLAAPLYPLTRPKVPFTWTEAHQEAFGRIKEALLSAPALALPDLTKPFALYVDEKEGVARGVLTQTLGPWRRPVAYLSKKLDPVASGWPTCLKAIAAVALLLKDADKLTLGQNVLVIAPHNLESIVRQPPDRWMTNARMTHYQSLLLNERVSFAPPAILNPATLLPVESDDTPIHICSEILAEETGTRPDLRDQPLPGVPAWYTDGSSFIMDGRRQAGAAIVDNKRTVWASNLPEGTSAQKAELIALTQALRLAEGKSINIYTDSRYAFATAHVHGAIYKQRGWLTSAGKDIKNKEEILALLEAIHLPKRVAIIHCPGHQRGTDPVATGNRKADEAAKQAAQSTRILTETTKNAGKRTADGSEFEKRTADGSEFESPKKKAKVE

SEQ ID NO: 1812 - protein, 2218 aa, synthetic construct
MPAAKRVKLDGGDKKYSIGLDIGTNSVGWAVITDEYKVPSKKFKVLGNTDRHSIKKNLIGALLFDSGETAEATRLKRTARRRYTRRKNRICYLQEIFSNEMAKVDDSFFHRLEESFLVEEDKKHERHPIFGNIVDEVAYHEKYPTIYHLRKKLVDSTDKADLRLIYLALAHMIKFRGHFLIEGDLNPDNSDVDKLFIQLVQTYNQLFEENPINASGVDAKAILSARLSKSRRLENLIAQLPGEKKNGLFGNLIALSLGLTPNFKSNFDLAEDAKLQLSKDTYDDDLDNLLAQIGDQYADLFLAAKNLSDAILLSDILRVNTEITKAPLSASMIKRYDEHHQDLTLLKALVRQQLPEKYKEIFFDQSKNGYAGYIDGGASQEEFYKFIKPILEKMDGTEELLVKLNREDLLRKQRTFDNGSIPHQIHLGELHAILRRQEDFYPFLKDNREKIEKILTFRIPYYVGPLARGNSRFAWMTRKSEETITPWNFEEVVDKGASAQSFIERMTNFDKNLPNEKVLPKHSLLYEYFTVYNELTKVKYVTEGMRKPAFLSGEQKKAIVDLLFKTNRKVTVKQLKEDYFKKIECFDSVEISGVEDRFNASLGTYHDLLKIIKDKDFLDNEENEDILEDIVLTLTLFEDREMIEERLKTYAHLFDDKVMKQLKRRRYTGWGRLSRKLINGIRDKQSGKTILDFLKSDGFANRNFMQLIHDDSLTFKEDIQKAQVSGQGDSLHEHIANLAGSPAIKKGILQTVKVVDELVKVMGRHKPENIVIEMARENQTTQKGQKNSRERMKRIEEGIKELGSQILKEHPVENTQLQNEKLYLYYLQNGRDMYVDQELDINRLSDYDVDHIVPQSFLKDDSIDNKVLTRSDKARGKSDNVPSEEVVKKMKNYWRQLLNAKLITQRKFDNLTKAERGGLSELDKAGFIKRQLVETRQITKHVAQILDSRMNTKYDENDKLIREVKVITLKSKLVSDFRKDFQFYKVREINNYHHAHDAYLNAVVGTALIKKYPKLESEFVYGDYKVYDVRKMIAKSEQEIGKATAKYFFYSNIMNFFKTEITLANGEIRKRPLIETNGETGEIVWDKGRDFATVRKVLSMPQVNIVKKTEVQTGGFSKESILPKRNSDKLIARKKDWDPKKYGGFDSPTVAYSVLVVAKVEKGKSKKLKSVKELLGITIMERSSFEKNPIDFLEAKGYKEVKKDLIIKLPKYSLFELENGRKRMLASAGELQKGNELALPSKYVNFLYLASHYEKLKGSPEDNEQKQLFVEQHKHYLDEIIEQISEFSKRVILADANLDKVLSAYNKHRDKPIREQAENIIHLFTLTNLGAPAAFKYFDTTIDRKRYTSTKEVLDATLIHQSITGLYETRIDLSQLGGDGGGGGPAPEAAAKGGTLGDQGSRGSDPLPEPRVTLTVEGIPTEFLVNTGAEHSVLTKPMGKMGSKRTVVAGATGSKVYPWTTKRLLKIGQKQVTHSFLVIPECPAPLLGRDLLTKLKAQIQFSTEGPQVTWEDRPAMCLVLNLEEEYRLHEKPVPPSIDPSWLQLFPMVWAEKAGMGLANQVPPVVVELKSDASPVAVRQYPMSKEAREGIRPHIQRFLDLGILVPCQSPWNTPLLPVKKPGTNDYRPVQDLREVNKRVQDIHPTVPNPYNLLSSLPPSHTWYSVLDLKDAFFCLKLHPNSQPLFAFEWRDPEKGNTGQLTWTRLPQGFKNSPTLFNEALHRDLASFRALNPQVVMLQYVDDLLVAAPTYRDCKEGTRRLLQELSKLGYRVSAKKAQLCREEVTYLGYLLKGGKRWLTPARKATVMKIPTPTTPRQVREFLGKAGFCRLFIPGFASLAAPLYPLTRPKVPFTWTEAHQEAFGRIKEALLSAPALALPDLTKPFALYVDEKEGVARGVLTQTLGPWRRPVAYLSKKLDPVASGWPTCLKAIAAVALLLKDADKLTLGQNVLVIAPHNLESIVRQPPDRWMTNARMTHYQSLLLNERVSFAPPAILNPATLLPVESDDTPIHICSEILAEETGTRPDLRDQPLPGVPAWYTDGSSFIMDGRRQAGAAIVDNKRTVWASNLPEGTSAQKAELIALTQALRLAEGKSINIYTDSRYAFATAHVHGAIYKQRGWLTSAGKDIKNKEEILALLEAIHLPKRVAIIHCPGHQRGTDPVATGNRKADEAAKQAAQSTRILTETTKNAGKRTADGSEFEKRTADGSEFESPKKKAKVE

SEQ ID NO: 1813 - protein, 2222 aa, synthetic construct
MPAAKRVKLDGGDKKYSIGLDIGTNSVGWAVITDEYKVPSKKFKVLGNTDRHSIKKNLIGALLFDSGETAEATRLKRTARRRYTRRKNRICYLQEIFSNEMAKVDDSFFHRLEESFLVEEDKKHERHPIFGNIVDEVAYHEKYPTIYHLRKKLVDSTDKADLRLIYLALAHMIKFRGHFLIEGDLNPDNSDVDKLFIQLVQTYNQLFEENPINASGVDAKAILSARLSKSRRLENLIAQLPGEKKNGLFGNLIALSLGLTPNFKSNFDLAEDAKLQLSKDTYDDDLDNLLAQIGDQYADLFLAAKNLSDAILLSDILRVNTEITKAPLSASMIKRYDEHHQDLTLLKALVRQQLPEKYKEIFFDQSKNGYAGYIDGGASQEEFYKFIKPILEKMDGTEELLVKLNREDLLRKQRTFDNGSIPHQIHLGELHAILRRQEDFYPFLKDNREKIEKILTFRIPYYVGPLARGNSRFAWMTRKSEETITPWNFEEVVDKGASAQSFIERMTNFDKNLPNEKVLPKHSLLYEYFTVYNELTKVKYVTEGMRKPAFLSGEQKKAIVDLLFKTNRKVTVKQLKEDYFKKIECFDSVEISGVEDRFNASLGTYHDLLKIIKDKDFLDNEENEDILEDIVLTLTLFEDREMIEERLKTYAHLFDDKVMKQLKRRRYTGWGRLSRKLINGIRDKQSGKTILDFLKSDGFANRNFMQLIHDDSLTFKEDIQKAQVSGQGDSLHEHIANLAGSPAIKKGILQTVKVVDELVKVMGRHKPENIVIEMARENQTTQKGQKNSRERMKRIEEGIKELGSQILKEHPVENTQLQNEKLYLYYLQNGRDMYVDQELDINRLSDYDVDHIVPQSFLKDDSIDNKVLTRSDKARGKSDNVPSEEVVKKMKNYWRQLLNAKLITQRKFDNLTKAERGGLSELDKAGFIKRQLVETRQITKHVAQILDSRMNTKYDENDKLIREVKVITLKSKLVSDFRKDFQFYKVREINNYHHAHDAYLNAVVGTALIKKYPKLESEFVYGDYKVYDVRKMIAKSEQEIGKATAKYFFYSNIMNFFKTEITLANGEIRKRPLIETNGETGEIVWDKGRDFATVRKVLSMPQVNIVKKTEVQTGGFSKESILPKRNSDKLIARKKDWDPKKYGGFDSPTVAYSVLVVAKVEKGKSKKLKSVKELLGITIMERSSFEKNPIDFLEAKGYKEVKKDLIIKLPKYSLFELENGRKRMLASAGELQKGNELALPSKYVNFLYLASHYEKLKGSPEDNEQKQLFVEQHKHYLDEIIEQISEFSKRVILADANLDKVLSAYNKHRDKPIREQAENIIHLFTLTNLGAPAAFKYFDTTIDRKRYTSTKEVLDATLIHQSITGLYETRIDLSQLGGDGGGSSGSSGSSGSSGSSGGTLGDQGSRGSDPLPEPRVTLTVEGIPTEFLVNTGAEHSVLTKPMGKMGSKRTVVAGATGSKVYPWTTKRLLKIGQKQVTHSFLVIPECPAPLLGRDLLTKLKAQIQFSTEGPQVTWEDRPAMCLVLNLEEEYRLHEKPVPPSIDPSWLQLFPMVWAEKAGMGLANQVPPVVVELKSDASPVAVRQYPMSKEAREGIRPHIQRFLDLGILVPCQSPWNTPLLPVKKPGTNDYRPVQDLREVNKRVQDIHPTVPNPYNLLSSLPPSHTWYSVLDLKDAFFCLKLHPNSQPLFAFEWRDPEKGNTGQLTWTRLPQGFKNSPTLFNEALHRDLASFRALNPQVVMLQYVDDLLVAAPTYRDCKEGTRRLLQELSKLGYRVSAKKAQLCREEVTYLGYLLKGGKRWLTPARKATVMKIPTPTTPRQVREFLGKAGFCRLFIPGFASLAAPLYPLTRPKVPFTWTEAHQEAFGRIKEALLSAPALALPDLTKPFALYVDEKEGVARGVLTQTLGPWRRPVAYLSKKLDPVASGWPTCLKAIAAVALLLKDADKLTLGQNVLVIAPHNLESIVRQPPDRWMTNARMTHYQSLLLNERVSFAPPAILNPATLLPVESDDTPIHICSEILAEETGTRPDLRDQPLPGVPAWYTDGSSFIMDGRRQAGAAIVDNKRTVWASNLPEGTSAQKAELIALTQALRLAEGKSINIYTDSRYAFATAHVHGAIYKQRGWLTSAGKDIKNKEEILALLEAIHLPKRVAIIHCPGHQRGTDPVATGNRKADEAAKQAAQSTRILTETTKNAGKRTADGSEFEKRTADGSEFESPKKKAKVE

SEQ ID NO: 1814 - protein, 2216 aa, synthetic construct
MPAAKRVKLDGGDKKYSIGLDIGTNSVGWAVITDEYKVPSKKFKVLGNTDRHSIKKNLIGALLFDSGETAEATRLKRTARRRYTRRKNRICYLQEIFSNEMAKVDDSFFHRLEESFLVEEDKKHERHPIFGNIVDEVAYHEKYPTIYHLRKKLVDSTDKADLRLIYLALAHMIKFRGHFLIEGDLNPDNSDVDKLFIQLVQTYNQLFEENPINASGVDAKAILSARLSKSRRLENLIAQLPGEKKNGLFGNLIALSLGLTPNFKSNFDLAEDAKLQLSKDTYDDDLDNLLAQIGDQYADLFLAAKNLSDAILLSDILRVNTEITKAPLSASMIKRYDEHHQDLTLLKALVRQQLPEKYKEIFFDQSKNGYAGYIDGGASQEEFYKFIKPILEKMDGTEELLVKLNREDLLRKQRTFDNGSIPHQIHLGELHAILRRQEDFYPFLKDNREKIEKILTFRIPYYVGPLARGNSRFAWMTRKSEETITPWNFEEVVDKGASAQSFIERMTNFDKNLPNEKVLPKHSLLYEYFTVYNELTKVKYVTEGMRKPAFLSGEQKKAIVDLLFKTNRKVTVKQLKEDYFKKIECFDSVEISGVEDRFNASLGTYHDLLKIIKDKDFLDNEENEDILEDIVLTLTLFEDREMIEERLKTYAHLFDDKVMKQLKRRRYTGWGRLSRKLINGIRDKQSGKTILDFLKSDGFANRNFMQLIHDDSLTFKEDIQKAQVSGQGDSLHEHIANLAGSPAIKKGILQTVKVVDELVKVMGRHKPENIVIEMARENQTTQKGQKNSRERMKRIEEGIKELGSQILKEHPVENTQLQNEKLYLYYLQNGRDMYVDQELDINRLSDYDVDHIVPQSFLKDDSIDNKVLTRSDKARGKSDNVPSEEVVKKMKNYWRQLLNAKLITQRKFDNLTKAERGGLSELDKAGFIKRQLVETRQITKHVAQILDSRMNTKYDENDKLIREVKVITLKSKLVSDFRKDFQFYKVREINNYHHAHDAYLNAVVGTALIKKYPKLESEFVYGDYKVYDVRKMIAKSEQEIGKATAKYFFYSNIMNFFKTEITLANGEIRKRPLIETNGETGEIVWDKGRDFATVRKVLSMPQVNIVKKTEVQTGGFSKESILPKRNSDKLIARKKDWDPKKYGGFDSPTVAYSVLVVAKVEKGKSKKLKSVKELLGITIMERSSFEKNPIDFLEAKGYKEVKKDLIIKLPKYSLFELENGRKRMLASAGELQKGNELALPSKYVNFLYLASHYEKLKGSPEDNEQKQLFVEQHKHYLDEIIEQISEFSKRVILADANLDKVLSAYNKHRDKPIREQAENIIHLFTLTNLGAPAAFKYFDTTIDRKRYTSTKEVLDATLIHQSITGLYETRIDLSQLGGDGGGSSGSSGSSGGTLGDQGSRGSDPLPEPRVTLTVEGIPTEFLVNTGAEHSVLTKPMGKMGSKRTVVAGATGSKVYPWTTKRLLKIGQKQVTHSFLVIPECPAPLLGRDLLTKLKAQIQFSTEGPQVTWEDRPAMCLVLNLEEEYRLHEKPVPPSIDPSWLQLFPMVWAEKAGMGLANQVPPVVVELKSDASPVAVRQYPMSKEAREGIRPHIQRFLDLGILVPCQSPWNTPLLPVKKPGTNDYRPVQDLREVNKRVQDIHPTVPNPYNLLSSLPPSHTWYSVLDLKDAFFCLKLHPNSQPLFAFEWRDPEKGNTGQLTWTRLPQGFKNSPTLFNEALHRDLASFRALNPQVVMLQYVDDLLVAAPTYRDCKEGTRRLLQELSKLGYRVSAKKAQLCREEVTYLGYLLKGGKRWLTPARKATVMKIPTPTTPRQVREFLGKAGFCRLFIPGFASLAAPLYPLTRPKVPFTWTEAHQEAFGRIKEALLSAPALALPDLTKPFALYVDEKEGVARGVLTQTLGPWRRPVAYLSKKLDPVASGWPTCLKAIAAVALLLKDADKLTLGQNVLVIAPHNLESIVRQPPDRWMTNARMTHYQSLLLNERVSFAPPAILNPATLLPVESDDTPIHICSEILAEETGTRPDLRDQPLPGVPAWYTDGSSFIMDGRRQAGAAIVDNKRTVWASNLPEGTSAQKAELIALTQALRLAEGKSINIYTDSRYAFATAHVHGAIYKQRGWLTSAGKDIKNKEEILALLEAIHLPKRVAIIHCPGHQRGTDPVATGNRKADEAAKQAAQSTRILTETTKNAGKRTADGSEFEKRTADGSEFESPKKKAKVE

SEQ ID NO: 1815 - protein, 2213 aa, synthetic construct
MPAAKRVKLDGGDKKYSIGLDIGTNSVGWAVITDEYKVPSKKFKVLGNTDRHSIKKNLIGALLFDSGETAEATRLKRTARRRYTRRKNRICYLQEIFSNEMAKVDDSFFHRLEESFLVEEDKKHERHPIFGNIVDEVAYHEKYPTIYHLRKKLVDSTDKADLRLIYLALAHMIKFRGHFLIEGDLNPDNSDVDKLFIQLVQTYNQLFEENPINASGVDAKAILSARLSKSRRLENLIAQLPGEKKNGLFGNLIALSLGLTPNFKSNFDLAEDAKLQLSKDTYDDDLDNLLAQIGDQYADLFLAAKNLSDAILLSDILRVNTEITKAPLSASMIKRYDEHHQDLTLLKALVRQQLPEKYKEIFFDQSKNGYAGYIDGGASQEEFYKFIKPILEKMDGTEELLVKLNREDLLRKQRTFDNGSIPHQIHLGELHAILRRQEDFYPFLKDNREKIEKILTFRIPYYVGPLARGNSRFAWMTRKSEETITPWNFEEVVDKGASAQSFIERMTNFDKNLPNEKVLPKHSLLYEYFTVYNELTKVKYVTEGMRKPAFLSGEQKKAIVDLLFKTNRKVTVKQLKEDYFKKIECFDSVEISGVEDRFNASLGTYHDLLKIIKDKDFLDNEENEDILEDIVLTLTLFEDREMIEERLKTYAHLFDDKVMKQLKRRRYTGWGRLSRKLINGIRDKQSGKTILDFLKSDGFANRNFMQLIHDDSLTFKEDIQKAQVSGQGDSLHEHIANLAGSPAIKKGILQTVKVVDELVKVMGRHKPENIVIEMARENQTTQKGQKNSRERMKRIEEGIKELGSQILKEHPVENTQLQNEKLYLYYLQNGRDMYVDQELDINRLSDYDVDHIVPQSFLKDDSIDNKVLTRSDKARGKSDNVPSEEVVKKMKNYWRQLLNAKLITQRKFDNLTKAERGGLSELDKAGFIKRQLVETRQITKHVAQILDSRMNTKYDENDKLIREVKVITLKSKLVSDFRKDFQFYKVREINNYHHAHDAYLNAVVGTALIKKYPKLESEFVYGDYKVYDVRKMIAKSEQEIGKATAKYFFYSNIMNFFKTEITLANGEIRKRPLIETNGETGEIVWDKGRDFATVRKVLSMPQVNIVKKTEVQTGGFSKESILPKRNSDKLIARKKDWDPKKYGGFDSPTVAYSVLVVAKVEKGKSKKLKSVKELLGITIMERSSFEKNPIDFLEAKGYKEVKKDLIIKLPKYSLFELENGRKRMLASAGELQKGNELALPSKYVNFLYLASHYEKLKGSPEDNEQKQLFVEQHKHYLDEIIEQISEFSKRVILADANLDKVLSAYNKHRDKPIREQAENIIHLFTLTNLGAPAAFKYFDTTIDRKRYTSTKEVLDATLIHQSITGLYETRIDLSQLGGDGGGSSPAPGGTLGDQGSRGSDPLPEPRVTLTVEGIPTEFLVNTGAEHSVLTKPMGKMGSKRTVVAGATGSKVYPWTTKRLLKIGQKQVTHSFLVIPECPAPLLGRDLLTKLKAQIQFSTEGPQVTWEDRPAMCLVLNLEEEYRLHEKPVPPSIDPSWLQLFPMVWAEKAGMGLANQVPPVVVELKSDASPVAVRQYPMSKEAREGIRPHIQRFLDLGILVPCQSPWNTPLLPVKKPGTNDYRPVQDLREVNKRVQDIHPTVPNPYNLLSSLPPSHTWYSVLDLKDAFFCLKLHPNSQPLFAFEWRDPEKGNTGQLTWTRLPQGFKNSPTLFNEALHRDLASFRALNPQVVMLQYVDDLLVAAPTYRDCKEGTRRLLQELSKLGYRVSAKKAQLCREEVTYLGYLLKGGKRWLTPARKATVMKIPTPTTPRQVREFLGKAGFCRLFIPGFASLAAPLYPLTRPKVPFTWTEAHQEAFGRIKEALLSAPALALPDLTKPFALYVDEKEGVARGVLTQTLGPWRRPVAYLSKKLDPVASGWPTCLKAIAAVALLLKDADKLTLGQNVLVIAPHNLESIVRQPPDRWMTNARMTHYQSLLLNERVSFAPPAILNPATLLPVESDDTPIHICSEILAEETGTRPDLRDQPLPGVPAWYTDGSSFIMDGRRQAGAAIVDNKRTVWASNLPEGTSAQKAELIALTQALRLAEGKSINIYTDSRYAFATAHVHGAIYKQRGWLTSAGKDIKNKEEILALLEAIHLPKRVAIIHCPGHQRGTDPVATGNRKADEAAKQAAQSTRILTETTKNAGKRTADGSEFEKRTADGSEFESPKKKAKVE

SEQ ID NO: 1816 - protein, 2218 aa, synthetic construct
MPAAKRVKLDGGDKKYSIGLDIGTNSVGWAVITDEYKVPSKKFKVLGNTDRHSIKKNLIGALLFDSGETAEATRLKRTARRRYTRRKNRICYLQEIFSNEMAKVDDSFFHRLEESFLVEEDKKHERHPIFGNIVDEVAYHEKYPTIYHLRKKLVDSTDKADLRLIYLALAHMIKFRGHFLIEGDLNPDNSDVDKLFIQLVQTYNQLFEENPINASGVDAKAILSARLSKSRRLENLIAQLPGEKKNGLFGNLIALSLGLTPNFKSNFDLAEDAKLQLSKDTYDDDLDNLLAQIGDQYADLFLAAKNLSDAILLSDILRVNTEITKAPLSASMIKRYDEHHQDLTLLKALVRQQLPEKYKEIFFDQSKNGYAGYIDGGASQEEFYKFIKPILEKMDGTEELLVKLNREDLLRKQRTFDNGSIPHQIHLGELHAILRRQEDFYPFLKDNREKIEKILTFRIPYYVGPLARGNSRFAWMTRKSEETITPWNFEEVVDKGASAQSFIERMTNFDKNLPNEKVLPKHSLLYEYFTVYNELTKVKYVTEGMRKPAFLSGEQKKAIVDLLFKTNRKVTVKQLKEDYFKKIECFDSVEISGVEDRFNASLGTYHDLLKIIKDKDFLDNEENEDILEDIVLTLTLFEDREMIEERLKTYAHLFDDKVMKQLKRRRYTGWGRLSRKLINGIRDKQSGKTILDFLKSDGFANRNFMQLIHDDSLTFKEDIQKAQVSGQGDSLHEHIANLAGSPAIKKGILQTVKVVDELVKVMGRHKPENIVIEMARENQTTQKGQKNSRERMKRIEEGIKELGSQILKEHPVENTQLQNEKLYLYYLQNGRDMYVDQELDINRLSDYDVDHIVPQSFLKDDSIDNKVLTRSDKARGKSDNVPSEEVVKKMKNYWRQLLNAKLITQRKFDNLTKAERGGLSELDKAGFIKRQLVETRQITKHVAQILDSRMNTKYDENDKLIREVKVITLKSKLVSDFRKDFQFYKVREINNYHHAHDAYLNAVVGTALIKKYPKLESEFVYGDYKVYDVRKMIAKSEQEIGKATAKYFFYSNIMNFFKTEITLANGEIRKRPLIETNGETGEIVWDKGRDFATVRKVLSMPQVNIVKKTEVQTGGFSKESILPKRNSDKLIARKKDWDPKKYGGFDSPTVAYSVLVVAKVEKGKSKKLKSVKELLGITIMERSSFEKNPIDFLEAKGYKEVKKDLIIKLPKYSLFELENGRKRMLASAGELQKGNELALPSKYVNFLYLASHYEKLKGSPEDNEQKQLFVEQHKHYLDEIIEQISEFSKRVILADANLDKVLSAYNKHRDKPIREQAENIIHLFTLTNLGAPAAFKYFDTTIDRKRYTSTKEVLDATLIHQSITGLYETRIDLSQLGGDGGPAPEAAAKGSSGGTLGDQGSRGSDPLPEPRVTLTVEGIPTEFLVNTGAEHSVLTKPMGKMGSKRTVVAGATGSKVYPWTTKRLLKIGQKQVTHSFLVIPECPAPLLGRDLLTKLKAQIQFSTEGPQVTWEDRPAMCLVLNLEEEYRLHEKPVPPSIDPSWLQLFPMVWAEKAGMGLANQVPPVVVELKSDASPVAVRQYPMSKEAREGIRPHIQRFLDLGILVPCQSPWNTPLLPVKKPGTNDYRPVQDLREVNKRVQDIHPTVPNPYNLLSSLPPSHTWYSVLDLKDAFFCLKLHPNSQPLFAFEWRDPEKGNTGQLTWTRLPQGFKNSPTLFNEALHRDLASFRALNPQVVMLQYVDDLLVAAPTYRDCKEGTRRLLQELSKLGYRVSAKKAQLCREEVTYLGYLLKGGKRWLTPARKATVMKIPTPTTPRQVREFLGKAGFCRLFIPGFASLAAPLYPLTRPKVPFTWTEAHQEAFGRIKEALLSAPALALPDLTKPFALYVDEKEGVARGVLTQTLGPWRRPVAYLSKKLDPVASGWPTCLKAIAAVALLLKDADKLTLGQNVLVIAPHNLESIVRQPPDRWMTNARMTHYQSLLLNERVSFAPPAILNPATLLPVESDDTPIHICSEILAEETGTRPDLRDQPLPGVPAWYTDGSSFIMDGRRQAGAAIVDNKRTVWASNLPEGTSAQKAELIALTQALRLAEGKSINIYTDSRYAFATAHVHGAIYKQRGWLTSAGKDIKNKEEILALLEAIHLPKRVAIIHCPGHQRGTDPVATGNRKADEAAKQAAQSTRILTETTKNAGKRTADGSEFEKRTADGSEFESPKKKAKVE

SEQ ID NO: 1817 - protein, 2218 aa, synthetic construct
MPAAKRVKLDGGDKKYSIGLDIGTNSVGWAVITDEYKVPSKKFKVLGNTDRHSIKKNLIGALLFDSGETAEATRLKRTARRRYTRRKNRICYLQEIFSNEMAKVDDSFFHRLEESFLVEEDKKHERHPIFGNIVDEVAYHEKYPTIYHLRKKLVDSTDKADLRLIYLALAHMIKFRGHFLIEGDLNPDNSDVDKLFIQLVQTYNQLFEENPINASGVDAKAILSARLSKSRRLENLIAQLPGEKKNGLFGNLIALSLGLTPNFKSNFDLAEDAKLQLSKDTYDDDLDNLLAQIGDQYADLFLAAKNLSDAILLSDILRVNTEITKAPLSASMIKRYDEHHQDLTLLKALVRQQLPEKYKEIFFDQSKNGYAGYIDGGASQEEFYKFIKPILEKMDGTEELLVKLNREDLLRKQRTFDNGSIPHQIHLGELHAILRRQEDFYPFLKDNREKIEKILTFRIPYYVGPLARGNSRFAWMTRKSEETITPWNFEEVVDKGASAQSFIERMTNFDKNLPNEKVLPKHSLLYEYFTVYNELTKVKYVTEGMRKPAFLSGEQKKAIVDLLFKTNRKVTVKQLKEDYFKKIECFDSVEISGVEDRFNASLGTYHDLLKIIKDKDFLDNEENEDILEDIVLTLTLFEDREMIEERLKTYAHLFDDKVMKQLKRRRYTGWGRLSRKLINGIRDKQSGKTILDFLKSDGFANRNFMQLIHDDSLTFKEDIQKAQVSGQGDSLHEHIANLAGSPAIKKGILQTVKVVDELVKVMGRHKPENIVIEMARENQTTQKGQKNSRERMKRIEEGIKELGSQILKEHPVENTQLQNEKLYLYYLQNGRDMYVDQELDINRLSDYDVDHIVPQSFLKDDSIDNKVLTRSDKARGKSDNVPSEEVVKKMKNYWRQLLNAKLITQRKFDNLTKAERGGLSELDKAGFIKRQLVETRQITKHVAQILDSRMNTKYDENDKLIREVKVITLKSKLVSDFRKDFQFYKVREINNYHHAHDAYLNAVVGTALIKKYPKLESEFVYGDYKVYDVRKMIAKSEQEIGKATAKYFFYSNIMNFFKTEITLANGEIRKRPLIETNGETGEIVWDKGRDFATVRKVLSMPQVNIVKKTEVQTGGFSKESILPKRNSDKLIARKKDWDPKKYGGFDSPTVAYSVLVVAKVEKGKSKKLKSVKELLGITIMERSSFEKNPIDFLEAKGYKEVKKDLIIKLPKYSLFELENGRKRMLASAGELQKGNELALPSKYVNFLYLASHYEKLKGSPEDNEQKQLFVEQHKHYLDEIIEQISEFSKRVILADANLDKVLSAYNKHRDKPIREQAENIIHLFTLTNLGAPAAFKYFDTTIDRKRYTSTKEVLDATLIHQSITGLYETRIDLSQLGGDGGGSSGGGEAAAKGGTLGDQGSRGSDPLPEPRVTLTVEGIPTEFLVNTGAEHSVLTKPMGKMGSKRTVVAGATGSKVYPWTTKRLLKIGQKQVTHSFLVIPECPAPLLGRDLLTKLKAQIQFSTEGPQVTWEDRPAMCLVLNLEEEYRLHEKPVPPSIDPSWLQLFPMVWAEKAGMGLANQVPPVVVELKSDASPVAVRQYPMSKEAREGIRPHIQRFLDLGILVPCQSPWNTPLLPVKKPGTNDYRPVQDLREVNKRVQDIHPTVPNPYNLLSSLPPSHTWYSVLDLKDAFFCLKLHPNSQPLFAFEWRDPEKGNTGQLTWTRLPQGFKNSPTLFNEALHRDLASFRALNPQVVMLQYVDDLLVAAPTYRDCKEGTRRLLQELSKLGYRVSAKKAQLCREEVTYLGYLLKGGKRWLTPARKATVMKIPTPTTPRQVREFLGKAGFCRLFIPGFASLAAPLYPLTRPKVPFTWTEAHQEAFGRIKEALLSAPALALPDLTKPFALYVDEKEGVARGVLTQTLGPWRRPVAYLSKKLDPVASGWPTCLKAIAAVALLLKDADKLTLGQNVLVIAPHNLESIVRQPPDRWMTNARMTHYQSLLLNERVSFAPPAILNPATLLPVESDDTPIHICSEILAEETGTRPDLRDQPLPGVPAWYTDGSSFIMDGRRQAGAAIVDNKRTVWASNLPEGTSAQKAELIALTQALRLAEGKSINIYTDSRYAFATAHVHGAIYKQRGWLTSAGKDIKNKEEILALLEAIHLPKRVAIIHCPGHQRGTDPVATGNRKADEAAKQAAQSTRILTETTKNAGKRTADGSEFEKRTADGSEFESPKKKAKVE

SEQ ID NO: 1818 - protein, 2216 aa, synthetic construct
MPAAKRVKLDGGDKKYSIGLDIGTNSVGWAVITDEYKVPSKKFKVLGNTDRHSIKKNLIGALLFDSGETAEATRLKRTARRRYTRRKNRICYLQEIFSNEMAKVDDSFFHRLEESFLVEEDKKHERHPIFGNIVDEVAYHEKYPTIYHLRKKLVDSTDKADLRLIYLALAHMIKFRGHFLIEGDLNPDNSDVDKLFIQLVQTYNQLFEENPINASGVDAKAILSARLSKSRRLENLIAQLPGEKKNGLFGNLIALSLGLTPNFKSNFDLAEDAKLQLSKDTYDDDLDNLLAQIGDQYADLFLAAKNLSDAILLSDILRVNTEITKAPLSASMIKRYDEHHQDLTLLKALVRQQLPEKYKEIFFDQSKNGYAGYIDGGASQEEFYKFIKPILEKMDGTEELLVKLNREDLLRKQRTFDNGSIPHQIHLGELHAILRRQEDFYPFLKDNREKIEKILTFRIPYYVGPLARGNSRFAWMTRKSEETITPWNFEEVVDKGASAQSFIERMTNFDKNLPNEKVLPKHSLLYEYFTVYNELTKVKYVTEGMRKPAFLSGEQKKAIVDLLFKTNRKVTVKQLKEDYFKKIECFDSVEISGVEDRFNASLGTYHDLLKIIKDKDFLDNEENEDILEDIVLTLTLFEDREMIEERLKTYAHLFDDKVMKQLKRRRYTGWGRLSRKLINGIRDKQSGKTILDFLKSDGFANRNFMQLIHDDSLTFKEDIQKAQVSGQGDSLHEHIANLAGSPAIKKGILQTVKVVDELVKVMGRHKPENIVIEMARENQTTQKGQKNSRERMKRIEEGIKELGSQILKEHPVENTQLQNEKLYLYYLQNGRDMYVDQELDINRLSDYDVDHIVPQSFLKDDSIDNKVLTRSDKARGKSDNVPSEEVVKKMKNYWRQLLNAKLITQRKFDNLTKAERGGLSELDKAGFIKRQLVETRQITKHVAQILDSRMNTKYDENDKLIREVKVITLKSKLVSDFRKDFQFYKVREINNYHHAHDAYLNAVVGTALIKKYPKLESEFVYGDYKVYDVRKMIAKSEQEIGKATAKYFFYSNIMNFFKTEITLANGEIRKRPLIETNGETGEIVWDKGRDFATVRKVLSMPQVNIVKKTEVQTGGFSKESILPKRNSDKLIARKKDWDPKKYGGFDSPTVAYSVLVVAKVEKGKSKKLKSVKELLGITIMERSSFEKNPIDFLEAKGYKEVKKDLIIKLPKYSLFELENGRKRMLASAGELQKGNELALPSKYVNFLYLASHYEKLKGSPEDNEQKQLFVEQHKHYLDEIIEQISEFSKRVILADANLDKVLSAYNKHRDKPIREQAENIIHLFTLTNLGAPAAFKYFDTTIDRKRYTSTKEVLDATLIHQSITGLYETRIDLSQLGGDGGGGGGSSPAPGGTLGDQGSRGSDPLPEPRVTLTVEGIPTEFLVNTGAEHSVLTKPMGKMGSKRTVVAGATGSKVYPWTTKRLLKIGQKQVTHSFLVIPECPAPLLGRDLLTKLKAQIQFSTEGPQVTWEDRPAMCLVLNLEEEYRLHEKPVPPSIDPSWLQLFPMVWAEKAGMGLANQVPPVVVELKSDASPVAVRQYPMSKEAREGIRPHIQRFLDLGILVPCQSPWNTPLLPVKKPGTNDYRPVQDLREVNKRVQDIHPTVPNPYNLLSSLPPSHTWYSVLDLKDAFFCLKLHPNSQPLFAFEWRDPEKGNTGQLTWTRLPQGFKNSPTLFNEALHRDLASFRALNPQVVMLQYVDDLLVAAPTYRDCKEGTRRLLQELSKLGYRVSAKKAQLCREEVTYLGYLLKGGKRWLTPARKATVMKIPTPTTPRQVREFLGKAGFCRLFIPGFASLAAPLYPLTRPKVPFTWTEAHQEAFGRIKEALLSAPALALPDLTKPFALYVDEKEGVARGVLTQTLGPWRRPVAYLSKKLDPVASGWPTCLKAIAAVALLLKDADKLTLGQNVLVIAPHNLESIVRQPPDRWMTNARMTHYQSLLLNERVSFAPPAILNPATLLPVESDDTPIHICSEILAEETGTRPDLRDQPLPGVPAWYTDGSSFIMDGRRQAGAAIVDNKRTVWASNLPEGTSAQKAELIALTQALRLAEGKSINIYTDSRYAFATAHVHGAIYKQRGWLTSAGKDIKNKEEILALLEAIHLPKRVAIIHCPGHQRGTDPVATGNRKADEAAKQAAQSTRILTETTKNAGKRTADGSEFEKRTADGSEFESPKKKAKVE

SEQ ID NO: 1819 - protein, 2216 aa, synthetic construct
MPAAKRVKLDGGDKKYSIGLDIGTNSVGWAVITDEYKVPSKKFKVLGNTDRHSIKKNLIGALLFDSGETAEATRLKRTARRRYTRRKNRICYLQEIFSNEMAKVDDSFFHRLEESFLVEEDKKHERHPIFGNIVDEVAYHEKYPTIYHLRKKLVDSTDKADLRLIYLALAHMIKFRGHFLIEGDLNPDNSDVDKLFIQLVQTYNQLFEENPINASGVDAKAILSARLSKSRRLENLIAQLPGEKKNGLFGNLIALSLGLTPNFKSNFDLAEDAKLQLSKDTYDDDLDNLLAQIGDQYADLFLAAKNLSDAILLSDILRVNTEITKAPLSASMIKRYDEHHQDLTLLKALVRQQLPEKYKEIFFDQSKNGYAGYIDGGASQEEFYKFIKPILEKMDGTEELLVKLNREDLLRKQRTFDNGSIPHQIHLGELHAILRRQEDFYPFLKDNREKIEKILTFRIPYYVGPLARGNSRFAWMTRKSEETITPWNFEEVVDKGASAQSFIERMTNFDKNLPNEKVLPKHSLLYEYFTVYNELTKVKYVTEGMRKPAFLSGEQKKAIVDLLFKTNRKVTVKQLKEDYFKKIECFDSVEISGVEDRFNASLGTYHDLLKIIKDKDFLDNEENEDILEDIVLTLTLFEDREMIEERLKTYAHLFDDKVMKQLKRRRYTGWGRLSRKLINGIRDKQSGKTILDFLKSDGFANRNFMQLIHDDSLTFKEDIQKAQVSGQGDSLHEHIANLAGSPAIKKGILQTVKVVDELVKVMGRHKPENIVIEMARENQTTQKGQKNSRERMKRIEEGIKELGSQILKEHPVENTQLQNEKLYLYYLQNGRDMYVDQELDINRLSDYDVDHIVPQSFLKDDSIDNKVLTRSDKARGKSDNVPSEEVVKKMKNYWRQLLNAKLITQRKFDNLTKAERGGLSELDKAGFIKRQLVETRQITKHVAQILDSRMNTKYDENDKLIREVKVITLKSKLVSDFRKDFQFYKVREINNYHHAHDAYLNAVVGTALIKKYPKLESEFVYGDYKVYDVRKMIAKSEQEIGKATAKYFFYSNIMNFFKTEITLANGEIRKRPLIETNGETGEIVWDKGRDFATVRKVLSMPQVNIVKKTEVQTGGFSKESILPKRNSDKLIARKKDWDPKKYGGFDSPTVAYSVLVVAKVEKGKSKKLKSVKELLGITIMERSSFEKNPIDFLEAKGYKEVKKDLIIKLPKYSLFELENGRKRMLASAGELQKGNELALPSKYVNFLYLASHYEKLKGSPEDNEQKQLFVEQHKHYLDEIIEQISEFSKRVILADANLDKVLSAYNKHRDKPIREQAENIIHLFTLTNLGAPAAFKYFDTTIDRKRYTSTKEVLDATLIHQSITGLYETRIDLSQLGGDGGGGSGGGGSSGGTLGDQGSRGSDPLPEPRVTLTVEGIPTEFLVNTGAEHSVLTKPMGKMGSKRTVVAGATGSKVYPWTTKRLLKIGQKQVTHSFLVIPECPAPLLGRDLLTKLKAQIQFSTEGPQVTWEDRPAMCLVLNLEEEYRLHEKPVPPSIDPSWLQLFPMVWAEKAGMGLANQVPPVVVELKSDASPVAVRQYPMSKEAREGIRPHIQRFLDLGILVPCQSPWNTPLLPVKKPGTNDYRPVQDLREVNKRVQDIHPTVPNPYNLLSSLPPSHTWYSVLDLKDAFFCLKLHPNSQPLFAFEWRDPEKGNTGQLTWTRLPQGFKNSPTLFNEALHRDLASFRALNPQVVMLQYVDDLLVAAPTYRDCKEGTRRLLQELSKLGYRVSAKKAQLCREEVTYLGYLLKGGKRWLTPARKATVMKIPTPTTPRQVREFLGKAGFCRLFIPGFASLAAPLYPLTRPKVPFTWTEAHQEAFGRIKEALLSAPALALPDLTKPFALYVDEKEGVARGVLTQTLGPWRRPVAYLSKKLDPVASGWPTCLKAIAAVALLLKDADKLTLGQNVLVIAPHNLESIVRQPPDRWMTNARMTHYQSLLLNERVSFAPPAILNPATLLPVESDDTPIHICSEILAEETGTRPDLRDQPLPGVPAWYTDGSSFIMDGRRQAGAAIVDNKRTVWASNLPEGTSAQKAELIALTQALRLAEGKSINIYTDSRYAFATAHVHGAIYKQRGWLTSAGKDIKNKEEILALLEAIHLPKRVAIIHCPGHQRGTDPVATGNRKADEAAKQAAQSTRILTETTKNAGKRTADGSEFEKRTADGSEFESPKKKAKVE

SEQ ID NO: 1820 - protein, 2215 aa, synthetic construct
MPAAKRVKLDGGDKKYSIGLDIGTNSVGWAVITDEYKVPSKKFKVLGNTDRHSIKKNLIGALLFDSGETAEATRLKRTARRRYTRRKNRICYLQEIFSNEMAKVDDSFFHRLEESFLVEEDKKHERHPIFGNIVDEVAYHEKYPTIYHLRKKLVDSTDKADLRLIYLALAHMIKFRGHFLIEGDLNPDNSDVDKLFIQLVQTYNQLFEENPINASGVDAKAILSARLSKSRRLENLIAQLPGEKKNGLFGNLIALSLGLTPNFKSNFDLAEDAKLQLSKDTYDDDLDNLLAQIGDQYADLFLAAKNLSDAILLSDILRVNTEITKAPLSASMIKRYDEHHQDLTLLKALVRQQLPEKYKEIFFDQSKNGYAGYIDGGASQEEFYKFIKPILEKMDGTEELLVKLNREDLLRKQRTFDNGSIPHQIHLGELHAILRRQEDFYPFLKDNREKIEKILTFRIPYYVGPLARGNSRFAWMTRKSEETITPWNFEEVVDKGASAQSFIERMTNFDKNLPNEKVLPKHSLLYEYFTVYNELTKVKYVTEGMRKPAFLSGEQKKAIVDLLFKTNRKVTVKQLKEDYFKKIECFDSVEISGVEDRFNASLGTYHDLLKIIKDKDFLDNEENEDILEDIVLTLTLFEDREMIEERLKTYAHLFDDKVMKQLKRRRYTGWGRLSRKLINGIRDKQSGKTILDFLKSDGFANRNFMQLIHDDSLTFKEDIQKAQVSGQGDSLHEHIANLAGSPAIKKGILQTVKVVDELVKVMGRHKPENIVIEMARENQTTQKGQKNSRERMKRIEEGIKELGSQILKEHPVENTQLQNEKLYLYYLQNGRDMYVDQELDINRLSDYDVDHIVPQSFLKDDSIDNKVLTRSDKARGKSDNVPSEEVVKKMKNYWRQLLNAKLITQRKFDNLTKAERGGLSELDKAGFIKRQLVETRQITKHVAQILDSRMNTKYDENDKLIREVKVITLKSKLVSDFRKDFQFYKVREINNYHHAHDAYLNAVVGTALIKKYPKLESEFVYGDYKVYDVRKMIAKSEQEIGKATAKYFFYSNIMNFFKTEITLANGEIRKRPLIETNGETGEIVWDKGRDFATVRKVLSMPQVNIVKKTEVQTGGFSKESILPKRNSDKLIARKKDWDPKKYGGFDSPTVAYSVLVVAKVEKGKSKKLKSVKELLGITIMERSSFEKNPIDFLEAKGYKEVKKDLIIKLPKYSLFELENGRKRMLASAGELQKGNELALPSKYVNFLYLASHYEKLKGSPEDNEQKQLFVEQHKHYLDEIIEQISEFSKRVILADANLDKVLSAYNKHRDKPIREQAENIIHLFTLTNLGAPAAFKYFDTTIDRKRYTSTKEVLDATLIHQSITGLYETRIDLSQLGGDGGEAAAKGGGGGTLGDQGSRGSDPLPEPRVTLTVEGIPTEFLVNTGAEHSVLTKPMGKMGSKRTVVAGATGSKVYPWTTKRLLKIGQKQVTHSFLVIPECPAPLLGRDLLTKLKAQIQFSTEGPQVTWEDRPAMCLVLNLEEEYRLHEKPVPPSIDPSWLQLFPMVWAEKAGMGLANQVPPVVVELKSDASPVAVRQYPMSKEAREGIRPHIQRFLDLGILVPCQSPWNTPLLPVKKPGTNDYRPVQDLREVNKRVQDIHPTVPNPYNLLSSLPPSHTWYSVLDLKDAFFCLKLHPNSQPLFAFEWRDPEKGNTGQLTWTRLPQGFKNSPTLFNEALHRDLASFRALNPQVVMLQYVDDLLVAAPTYRDCKEGTRRLLQELSKLGYRVSAKKAQLCREEVTYLGYLLKGGKRWLTPARKATVMKIPTPTTPRQVREFLGKAGFCRLFIPGFASLAAPLYPLTRPKVPFTWTEAHQEAFGRIKEALLSAPALALPDLTKPFALYVDEKEGVARGVLTQTLGPWRRPVAYLSKKLDPVASGWPTCLKAIAAVALLLKDADKLTLGQNVLVIAPHNLESIVRQPPDRWMTNARMTHYQSLLLNERVSFAPPAILNPATLLPVESDDTPIHICSEILAEETGTRPDLRDQPLPGVPAWYTDGSSFIMDGRRQAGAAIVDNKRTVWASNLPEGTSAQKAELIALTQALRLAEGKSINIYTDSRYAFATAHVHGAIYKQRGWLTSAGKDIKNKEEILALLEAIHLPKRVAIIHCPGHQRGTDPVATGNRKADEAAKQAAQSTRILTETTKNAGKRTADGSEFEKRTADGSEFESPKKKAKVE

SEQ ID NO: 1821 - protein, 2215 aa, synthetic construct
MPAAKRVKLDGGDKKYSIGLDIGTNSVGWAVITDEYKVPSKKFKVLGNTDRHSIKKNLIGALLFDSGETAEATRLKRTARRRYTRRKNRICYLQEIFSNEMAKVDDSFFHRLEESFLVEEDKKHERHPIFGNIVDEVAYHEKYPTIYHLRKKLVDSTDKADLRLIYLALAHMIKFRGHFLIEGDLNPDNSDVDKLFIQLVQTYNQLFEENPINASGVDAKAILSARLSKSRRLENLIAQLPGEKKNGLFGNLIALSLGLTPNFKSNFDLAEDAKLQLSKDTYDDDLDNLLAQIGDQYADLFLAAKNLSDAILLSDILRVNTEITKAPLSASMIKRYDEHHQDLTLLKALVRQQLPEKYKEIFFDQSKNGYAGYIDGGASQEEFYKFIKPILEKMDGTEELLVKLNREDLLRKQRTFDNGSIPHQIHLGELHAILRRQEDFYPFLKDNREKIEKILTFRIPYYVGPLARGNSRFAWMTRKSEETITPWNFEEVVDKGASAQSFIERMTNFDKNLPNEKVLPKHSLLYEYFTVYNELTKVKYVTEGMRKPAFLSGEQKKAIVDLLFKTNRKVTVKQLKEDYFKKIECFDSVEISGVEDRFNASLGTYHDLLKIIKDKDFLDNEENEDILEDIVLTLTLFEDREMIEERLKTYAHLFDDKVMKQLKRRRYTGWGRLSRKLINGIRDKQSGKTILDFLKSDGFANRNFMQLIHDDSLTFKEDIQKAQVSGQGDSLHEHIANLAGSPAIKKGILQTVKVVDELVKVMGRHKPENIVIEMARENQTTQKGQKNSRERMKRIEEGIKELGSQILKEHPVENTQLQNEKLYLYYLQNGRDMYVDQELDINRLSDYDVDHIVPQSFLKDDSIDNKVLTRSDKARGKSDNVPSEEVVKKMKNYWRQLLNAKLITQRKFDNLTKAERGGLSELDKAGFIKRQLVETRQITKHVAQILDSRMNTKYDENDKLIREVKVITLKSKLVSDFRKDFQFYKVREINNYHHAHDAYLNAVVGTALIKKYPKLESEFVYGDYKVYDVRKMIAKSEQEIGKATAKYFFYSNIMNFFKTEITLANGEIRKRPLIETNGETGEIVWDKGRDFATVRKVLSMPQVNIVKKTEVQTGGFSKESILPKRNSDKLIARKKDWDPKKYGGFDSPTVAYSVLVVAKVEKGKSKKLKSVKELLGITIMERSSFEKNPIDFLEAKGYKEVKKDLIIKLPKYSLFELENGRKRMLASAGELQKGNELALPSKYVNFLYLASHYEKLKGSPEDNEQKQLFVEQHKHYLDEIIEQISEFSKRVILADANLDKVLSAYNKHRDKPIREQAENIIHLFTLTNLGAPAAFKYFDTTIDRKRYTSTKEVLDATLIHQSITGLYETRIDLSQLGGDGGEAAAKGGSGGTLGDQGSRGSDPLPEPRVTLTVEGIPTEFLVNTGAEHSVLTKPMGKMGSKRTVVAGATGSKVYPWTTKRLLKIGQKQVTHSFLVIPECPAPLLGRDLLTKLKAQIQFSTEGPQVTWEDRPAMCLVLNLEEEYRLHEKPVPPSIDPSWLQLFPMVWAEKAGMGLANQVPPVVVELKSDASPVAVRQYPMSKEAREGIRPHIQRFLDLGILVPCQSPWNTPLLPVKKPGTNDYRPVQDLREVNKRVQDIHPTVPNPYNLLSSLPPSHTWYSVLDLKDAFFCLKLHPNSQPLFAFEWRDPEKGNTGQLTWTRLPQGFKNSPTLFNEALHRDLASFRALNPQVVMLQYVDDLLVAAPTYRDCKEGTRRLLQELSKLGYRVSAKKAQLCREEVTYLGYLLKGGKRWLTPARKATVMKIPTPTTPRQVREFLGKAGFCRLFIPGFASLAAPLYPLTRPKVPFTWTEAHQEAFGRIKEALLSAPALALPDLTKPFALYVDEKEGVARGVLTQTLGPWRRPVAYLSKKLDPVASGWPTCLKAIAAVALLLKDADKLTLGQNVLVIAPHNLESIVRQPPDRWMTNARMTHYQSLLLNERVSFAPPAILNPATLLPVESDDTPIHICSEILAEETGTRPDLRDQPLPGVPAWYTDGSSFIMDGRRQAGAAIVDNKRTVWASNLPEGTSAQKAELIALTQALRLAEGKSINIYTDSRYAFATAHVHGAIYKQRGWLTSAGKDIKNKEEILALLEAIHLPKRVAIIHCPGHQRGTDPVATGNRKADEAAKQAAQSTRILTETTKNAGKRTADGSEFEKRTADGSEFESPKKKAKVE

SEQ ID NO: 1822 - protein, 2218 aa, synthetic construct
MPAAKRVKLDGGDKKYSIGLDIGTNSVGWAVITDEYKVPSKKFKVLGNTDRHSIKKNLIGALLFDSGETAEATRLKRTARRRYTRRKNRICYLQEIFSNEMAKVDDSFFHRLEESFLVEEDKKHERHPIFGNIVDEVAYHEKYPTIYHLRKKLVDSTDKADLRLIYLALAHMIKFRGHFLIEGDLNPDNSDVDKLFIQLVQTYNQLFEENPINASGVDAKAILSARLSKSRRLENLIAQLPGEKKNGLFGNLIALSLGLTPNFKSNFDLAEDAKLQLSKDTYDDDLDNLLAQIGDQYADLFLAAKNLSDAILLSDILRVNTEITKAPLSASMIKRYDEHHQDLTLLKALVRQQLPEKYKEIFFDQSKNGYAGYIDGGASQEEFYKFIKPILEKMDGTEELLVKLNREDLLRKQRTFDNGSIPHQIHLGELHAILRRQEDFYPFLKDNREKIEKILTFRIPYYVGPLARGNSRFAWMTRKSEETITPWNFEEVVDKGASAQSFIERMTNFDKNLPNEKVLPKHSLLYEYFTVYNELTKVKYVTEGMRKPAFLSGEQKKAIVDLLFKTNRKVTVKQLKEDYFKKIECFDSVEISGVEDRFNASLGTYHDLLKIIKDKDFLDNEENEDILEDIVLTLTLFEDREMIEERLKTYAHLFDDKVMKQLKRRRYTGWGRLSRKLINGIRDKQSGKTILDFLKSDGFANRNFMQLIHDDSLTFKEDIQKAQVSGQGDSLHEHIANLAGSPAIKKGILQTVKVVDELVKVMGRHKPENIVIEMARENQTTQKGQKNSRERMKRIEEGIKELGSQILKEHPVENTQLQNEKLYLYYLQNGRDMYVDQELDINRLSDYDVDHIVPQSFLKDDSIDNKVLTRSDKARGKSDNVPSEEVVKKMKNYWRQLLNAKLITQRKFDNLTKAERGGLSELDKAGFIKRQLVETRQITKHVAQILDSRMNTKYDENDKLIREVKVITLKSKLVSDFRKDFQFYKVREINNYHHAHDAYLNAVVGTALIKKYPKLESEFVYGDYKVYDVRKMIAKSEQEIGKATAKYFFYSNIMNFFKTEITLANGEIRKRPLIETNGETGEIVWDKGRDFATVRKVLSMPQVNIVKKTEVQTGGFSKESILPKRNSDKLIARKKDWDPKKYGGFDSPTVAYSVLVVAKVEKGKSKKLKSVKELLGITIMERSSFEKNPIDFLEAKGYKEVKKDLIIKLPKYSLFELENGRKRMLASAGELQKGNELALPSKYVNFLYLASHYEKLKGSPEDNEQKQLFVEQHKHYLDEIIEQISEFSKRVILADANLDKVLSAYNKHRDKPIREQAENIIHLFTLTNLGAPAAFKYFDTTIDRKRYTSTKEVLDATLIHQSITGLYETRIDLSQLGGDGGEAAAKPAPGSSGGTLGDQGSRGSDPLPEPRVTLTVEGIPTEFLVNTGAEHSVLTKPMGKMGSKRTVVAGATGSKVYPWTTKRLLKIGQKQVTHSFLVIPECPAPLLGRDLLTKLKAQIQFSTEGPQVTWEDRPAMCLVLNLEEEYRLHEKPVPPSIDPSWLQLFPMVWAEKAGMGLANQVPPVVVELKSDASPVAVRQYPMSKEAREGIRPHIQRFLDLGILVPCQSPWNTPLLPVKKPGTNDYRPVQDLREVNKRVQDIHPTVPNPYNLLSSLPPSHTWYSVLDLKDAFFCLKLHPNSQPLFAFEWRDPEKGNTGQLTWTRLPQGFKNSPTLFNEALHRDLASFRALNPQVVMLQYVDDLLVAAPTYRDCKEGTRRLLQELSKLGYRVSAKKAQLCREEVTYLGYLLKGGKRWLTPARKATVMKIPTPTTPRQVREFLGKAGFCRLFIPGFASLAAPLYPLTRPKVPFTWTEAHQEAFGRIKEALLSAPALALPDLTKPFALYVDEKEGVARGVLTQTLGPWRRPVAYLSKKLDPVASGWPTCLKAIAAVALLLKDADKLTLGQNVLVIAPHNLESIVRQPPDRWMTNARMTHYQSLLLNERVSFAPPAILNPATLLPVESDDTPIHICSEILAEETGTRPDLRDQPLPGVPAWYTDGSSFIMDGRRQAGAAIVDNKRTVWASNLPEGTSAQKAELIALTQALRLAEGKSINIYTDSRYAFATAHVHGAIYKQRGWLTSAGKDIKNKEEILALLEAIHLPKRVAIIHCPGHQRGTDPVATGNRKADEAAKQAAQSTRILTETTKNAGKRTADGSEFEKRTADGSEFESPKKKAKVE

SEQ ID NO: 1823 - protein, 2218 aa, synthetic construct
MPAAKRVKLDGGDKKYSIGLDIGTNSVGWAVITDEYKVPSKKFKVLGNTDRHSIKKNLIGALLFDSGETAEATRLKRTARRRYTRRKNRICYLQEIFSNEMAKVDDSFFHRLEESFLVEEDKKHERHPIFGNIVDEVAYHEKYPTIYHLRKKLVDSTDKADLRLIYLALAHMIKFRGHFLIEGDLNPDNSDVDKLFIQLVQTYNQLFEENPINASGVDAKAILSARLSKSRRLENLIAQLPGEKKNGLFGNLIALSLGLTPNFKSNFDLAEDAKLQLSKDTYDDDLDNLLAQIGDQYADLFLAAKNLSDAILLSDILRVNTEITKAPLSASMIKRYDEHHQDLTLLKALVRQQLPEKYKEIFFDQSKNGYAGYIDGGASQEEFYKFIKPILEKMDGTEELLVKLNREDLLRKQRTFDNGSIPHQIHLGELHAILRRQEDFYPFLKDNREKIEKILTFRIPYYVGPLARGNSRFAWMTRKSEETITPWNFEEVVDKGASAQSFIERMTNFDKNLPNEKVLPKHSLLYEYFTVYNELTKVKYVTEGMRKPAFLSGEQKKAIVDLLFKTNRKVTVKQLKEDYFKKIECFDSVEISGVEDRFNASLGTYHDLLKIIKDKDFLDNEENEDILEDIVLTLTLFEDREMIEERLKTYAHLFDDKVMKQLKRRRYTGWGRLSRKLINGIRDKQSGKTILDFLKSDGFANRNFMQLIHDDSLTFKEDIQKAQVSGQGDSLHEHIANLAGSPAIKKGILQTVKVVDELVKVMGRHKPENIVIEMARENQTTQKGQKNSRERMKRIEEGIKELGSQILKEHPVENTQLQNEKLYLYYLQNGRDMYVDQELDINRLSDYDVDHIVPQSFLKDDSIDNKVLTRSDKARGKSDNVPSEEVVKKMKNYWRQLLNAKLITQRKFDNLTKAERGGLSELDKAGFIKRQLVETRQITKHVAQILDSRMNTKYDENDKLIREVKVITLKSKLVSDFRKDFQFYKVREINNYHHAHDAYLNAVVGTALIKKYPKLESEFVYGDYKVYDVRKMIAKSEQEIGKATAKYFFYSNIMNFFKTEITLANGEIRKRPLIETNGETGEIVWDKGRDFATVRKVLSMPQVNIVKKTEVQTGGFSKESILPKRNSDKLIARKKDWDPKKYGGFDSPTVAYSVLVVAKVEKGKSKKLKSVKELLGITIMERSSFEKNPIDFLEAKGYKEVKKDLIIKLPKYSLFELENGRKRMLASAGELQKGNELALPSKYVNFLYLASHYEKLKGSPEDNEQKQLFVEQHKHYLDEIIEQISEFSKRVILADANLDKVLSAYNKHRDKPIREQAENIIHLFTLTNLGAPAAFKYFDTTIDRKRYTSTKEVLDATLIHQSITGLYETRIDLSQLGGDGGGGGGSSEAAAKGGTLGDQGSRGSDPLPEPRVTLTVEGIPTEFLVNTGAEHSVLTKPMGKMGSKRTVVAGATGSKVYPWTTKRLLKIGQKQVTHSFLVIPECPAPLLGRDLLTKLKAQIQFSTEGPQVTWEDRPAMCLVLNLEEEYRLHEKPVPPSIDPSWLQLFPMVWAEKAGMGLANQVPPVVVELKSDASPVAVRQYPMSKEAREGIRPHIQRFLDLGILVPCQSPWNTPLLPVKKPGTNDYRPVQDLREVNKRVQDIHPTVPNPYNLLSSLPPSHTWYSVLDLKDAFFCLKLHPNSQPLFAFEWRDPEKGNTGQLTWTRLPQGFKNSPTLFNEALHRDLASFRALNPQVVMLQYVDDLLVAAPTYRDCKEGTRRLLQELSKLGYRVSAKKAQLCREEVTYLGYLLKGGKRWLTPARKATVMKIPTPTTPRQVREFLGKAGFCRLFIPGFASLAAPLYPLTRPKVPFTWTEAHQEAFGRIKEALLSAPALALPDLTKPFALYVDEKEGVARGVLTQTLGPWRRPVAYLSKKLDPVASGWPTCLKAIAAVALLLKDADKLTLGQNVLVIAPHNLESIVRQPPDRWMTNARMTHYQSLLLNERVSFAPPAILNPATLLPVESDDTPIHICSEILAEETGTRPDLRDQPLPGVPAWYTDGSSFIMDGRRQAGAAIVDNKRTVWASNLPEGTSAQKAELIALTQALRLAEGKSINIYTDSRYAFATAHVHGAIYKQRGWLTSAGKDIKNKEEILALLEAIHLPKRVAIIHCPGHQRGTDPVATGNRKADEAAKQAAQSTRILTETTKNAGKRTADGSEFEKRTADGSEFESPKKKAKVE

SEQ ID NO: 1824 - protein, 2216 aa, synthetic construct
MPAAKRVKLDGGDKKYSIGLDIGTNSVGWAVITDEYKVPSKKFKVLGNTDRHSIKKNLIGALLFDSGETAEATRLKRTARRRYTRRKNRICYLQEIFSNEMAKVDDSFFHRLEESFLVEEDKKHERHPIFGNIVDEVAYHEKYPTIYHLRKKLVDSTDKADLRLIYLALAHMIKFRGHFLIEGDLNPDNSDVDKLFIQLVQTYNQLFEENPINASGVDAKAILSARLSKSRRLENLIAQLPGEKKNGLFGNLIALSLGLTPNFKSNFDLAEDAKLQLSKDTYDDDLDNLLAQIGDQYADLFLAAKNLSDAILLSDILRVNTEITKAPLSASMIKRYDEHHQDLTLLKALVRQQLPEKYKEIFFDQSKNGYAGYIDGGASQEEFYKFIKPILEKMDGTEELLVKLNREDLLRKQRTFDNGSIPHQIHLGELHAILRRQEDFYPFLKDNREKIEKILTFRIPYYVGPLARGNSRFAWMTRKSEETITPWNFEEVVDKGASAQSFIERMTNFDKNLPNEKVLPKHSLLYEYFTVYNELTKVKYVTEGMRKPAFLSGEQKKAIVDLLFKTNRKVTVKQLKEDYFKKIECFDSVEISGVEDRFNASLGTYHDLLKIIKDKDFLDNEENEDILEDIVLTLTLFEDREMIEERLKTYAHLFDDKVMKQLKRRRYTGWGRLSRKLINGIRDKQSGKTILDFLKSDGFANRNFMQLIHDDSLTFKEDIQKAQVSGQGDSLHEHIANLAGSPAIKKGILQTVKVVDELVKVMGRHKPENIVIEMARENQTTQKGQKNSRERMKRIEEGIKELGSQILKEHPVENTQLQNEKLYLYYLQNGRDMYVDQELDINRLSDYDVDHIVPQSFLKDDSIDNKVLTRSDKARGKSDNVPSEEVVKKMKNYWRQLLNAKLITQRKFDNLTKAERGGLSELDKAGFIKRQLVETRQITKHVAQILDSRMNTKYDENDKLIREVKVITLKSKLVSDFRKDFQFYKVREINNYHHAHDAYLNAVVGTALIKKYPKLESEFVYGDYKVYDVRKMIAKSEQEIGKATAKYFFYSNIMNFFKTEITLANGEIRKRPLIETNGETGEIVWDKGRDFATVRKVLSMPQVNIVKKTEVQTGGFSKESILPKRNSDKLIARKKDWDPKKYGGFDSPTVAYSVLVVAKVEKGKSKKLKSVKELLGITIMERSSFEKNPIDFLEAKGYKEVKKDLIIKLPKYSLFELENGRKRMLASAGELQKGNELALPSKYVNFLYLASHYEKLKGSPEDNEQKQLFVEQHKHYLDEIIEQISEFSKRVILADANLDKVLSAYNKHRDKPIREQAENIIHLFTLTNLGAPAAFKYFDTTIDRKRYTSTKEVLDATLIHQSITGLYETRIDLSQLGGDGGPAPAPAPAPGGTLGDQGSRGSDPLPEPRVTLTVEGIPTEFLVNTGAEHSVLTKPMGKMGSKRTVVAGATGSKVYPWTTKRLLKIGQKQVTHSFLVIPECPAPLLGRDLLTKLKAQIQFSTEGPQVTWEDRPAMCLVLNLEEEYRLHEKPVPPSIDPSWLQLFPMVWAEKAGMGLANQVPPVVVELKSDASPVAVRQYPMSKEAREGIRPHIQRFLDLGILVPCQSPWNTPLLPVKKPGTNDYRPVQDLREVNKRVQDIHPTVPNPYNLLSSLPPSHTWYSVLDLKDAFFCLKLHPNSQPLFAFEWRDPEKGNTGQLTWTRLPQGFKNSPTLFNEALHRDLASFRALNPQVVMLQYVDDLLVAAPTYRDCKEGTRRLLQELSKLGYRVSAKKAQLCREEVTYLGYLLKGGKRWLTPARKATVMKIPTPTTPRQVREFLGKAGFCRLFIPGFASLAAPLYPLTRPKVPFTWTEAHQEAFGRIKEALLSAPALALPDLTKPFALYVDEKEGVARGVLTQTLGPWRRPVAYLSKKLDPVASGWPTCLKAIAAVALLLKDADKLTLGQNVLVIAPHNLESIVRQPPDRWMTNARMTHYQSLLLNERVSFAPPAILNPATLLPVESDDTPIHICSEILAEETGTRPDLRDQPLPGVPAWYTDGSSFIMDGRRQAGAAIVDNKRTVWASNLPEGTSAQKAELIALTQALRLAEGKSINIYTDSRYAFATAHVHGAIYKQRGWLTSAGKDIKNKEEILALLEAIHLPKRVAIIHCPGHQRGTDPVATGNRKADEAAKQAAQSTRILTETTKNAGKRTADGSEFEKRTADGSEFESPKKKAKVE

SEQ ID NO: 1825 - protein, 2215 aa, synthetic construct
MPAAKRVKLDGGDKKYSIGLDIGTNSVGWAVITDEYKVPSKKFKVLGNTDRHSIKKNLIGALLFDSGETAEATRLKRTARRRYTRRKNRICYLQEIFSNEMAKVDDSFFHRLEESFLVEEDKKHERHPIFGNIVDEVAYHEKYPTIYHLRKKLVDSTDKADLRLIYLALAHMIKFRGHFLIEGDLNPDNSDVDKLFIQLVQTYNQLFEENPINASGVDAKAILSARLSKSRRLENLIAQLPGEKKNGLFGNLIALSLGLTPNFKSNFDLAEDAKLQLSKDTYDDDLDNLLAQIGDQYADLFLAAKNLSDAILLSDILRVNTEITKAPLSASMIKRYDEHHQDLTLLKALVRQQLPEKYKEIFFDQSKNGYAGYIDGGASQEEFYKFIKPILEKMDGTEELLVKLNREDLLRKQRTFDNGSIPHQIHLGELHAILRRQEDFYPFLKDNREKIEKILTFRIPYYVGPLARGNSRFAWMTRKSEETITPWNFEEVVDKGASAQSFIERMTNFDKNLPNEKVLPKHSLLYEYFTVYNELTKVKYVTEGMRKPAFLSGEQKKAIVDLLFKTNRKVTVKQLKEDYFKKIECFDSVEISGVEDRFNASLGTYHDLLKIIKDKDFLDNEENEDILEDIVLTLTLFEDREMIEERLKTYAHLFDDKVMKQLKRRRYTGWGRLSRKLINGIRDKQSGKTILDFLKSDGFANRNFMQLIHDDSLTFKEDIQKAQVSGQGDSLHEHIANLAGSPAIKKGILQTVKVVDELVKVMGRHKPENIVIEMARENQTTQKGQKNSRERMKRIEEGIKELGSQILKEHPVENTQLQNEKLYLYYLQNGRDMYVDQELDINRLSDYDVDHIVPQSFLKDDSIDNKVLTRSDKARGKSDNVPSEEVVKKMKNYWRQLLNAKLITQRKFDNLTKAERGGLSELDKAGFIKRQLVETRQITKHVAQILDSRMNTKYDENDKLIREVKVITLKSKLVSDFRKDFQFYKVREINNYHHAHDAYLNAVVGTALIKKYPKLESEFVYGDYKVYDVRKMIAKSEQEIGKATAKYFFYSNIMNFFKTEITLANGEIRKRPLIETNGETGEIVWDKGRDFATVRKVLSMPQVNIVKKTEVQTGGFSKESILPKRNSDKLIARKKDWDPKKYGGFDSPTVAYSVLVVAKVEKGKSKKLKSVKELLGITIMERSSFEKNPIDFLEAKGYKEVKKDLIIKLPKYSLFELENGRKRMLASAGELQKGNELALPSKYVNFLYLASHYEKLKGSPEDNEQKQLFVEQHKHYLDEIIEQISEFSKRVILADANLDKVLSAYNKHRDKPIREQAENIIHLFTLTNLGAPAAFKYFDTTIDRKRYTSTKEVLDATLIHQSITGLYETRIDLSQLGGDGGGGSEAAAKGGTLGDQGSRGSDPLPEPRVTLTVEGIPTEFLVNTGAEHSVLTKPMGKMGSKRTVVAGATGSKVYPWTTKRLLKIGQKQVTHSFLVIPECPAPLLGRDLLTKLKAQIQFSTEGPQVTWEDRPAMCLVLNLEEEYRLHEKPVPPSIDPSWLQLFPMVWAEKAGMGLANQVPPVVVELKSDASPVAVRQYPMSKEAREGIRPHIQRFLDLGILVPCQSPWNTPLLPVKKPGTNDYRPVQDLREVNKRVQDIHPTVPNPYNLLSSLPPSHTWYSVLDLKDAFFCLKLHPNSQPLFAFEWRDPEKGNTGQLTWTRLPQGFKNSPTLFNEALHRDLASFRALNPQVVMLQYVDDLLVAAPTYRDCKEGTRRLLQELSKLGYRVSAKKAQLCREEVTYLGYLLKGGKRWLTPARKATVMKIPTPTTPRQVREFLGKAGFCRLFIPGFASLAAPLYPLTRPKVPFTWTEAHQEAFGRIKEALLSAPALALPDLTKPFALYVDEKEGVARGVLTQTLGPWRRPVAYLSKKLDPVASGWPTCLKAIAAVALLLKDADKLTLGQNVLVIAPHNLESIVRQPPDRWMTNARMTHYQSLLLNERVSFAPPAILNPATLLPVESDDTPIHICSEILAEETGTRPDLRDQPLPGVPAWYTDGSSFIMDGRRQAGAAIVDNKRTVWASNLPEGTSAQKAELIALTQALRLAEGKSINIYTDSRYAFATAHVHGAIYKQRGWLTSAGKDIKNKEEILALLEAIHLPKRVAIIHCPGHQRGTDPVATGNRKADEAAKQAAQSTRILTETTKNAGKRTADGSEFEKRTADGSEFESPKKKAKVE

SEQ ID NO: 1826 - protein, 2216 aa, synthetic construct
MPAAKRVKLDGGDKKYSIGLDIGTNSVGWAVITDEYKVPSKKFKVLGNTDRHSIKKNLIGALLFDSGETAEATRLKRTARRRYTRRKNRICYLQEIFSNEMAKVDDSFFHRLEESFLVEEDKKHERHPIFGNIVDEVAYHEKYPTIYHLRKKLVDSTDKADLRLIYLALAHMIKFRGHFLIEGDLNPDNSDVDKLFIQLVQTYNQLFEENPINASGVDAKAILSARLSKSRRLENLIAQLPGEKKNGLFGNLIALSLGLTPNFKSNFDLAEDAKLQLSKDTYDDDLDNLLAQIGDQYADLFLAAKNLSDAILLSDILRVNTEITKAPLSASMIKRYDEHHQDLTLLKALVRQQLPEKYKEIFFDQSKNGYAGYIDGGASQEEFYKFIKPILEKMDGTEELLVKLNREDLLRKQRTFDNGSIPHQIHLGELHAILRRQEDFYPFLKDNREKIEKILTFRIPYYVGPLARGNSRFAWMTRKSEETITPWNFEEVVDKGASAQSFIERMTNFDKNLPNEKVLPKHSLLYEYFTVYNELTKVKYVTEGMRKPAFLSGEQKKAIVDLLFKTNRKVTVKQLKEDYFKKIECFDSVEISGVEDRFNASLGTYHDLLKIIKDKDFLDNEENEDILEDIVLTLTLFEDREMIEERLKTYAHLFDDKVMKQLKRRRYTGWGRLSRKLINGIRDKQSGKTILDFLKSDGFANRNFMQLIHDDSLTFKEDIQKAQVSGQGDSLHEHIANLAGSPAIKKGILQTVKVVDELVKVMGRHKPENIVIEMARENQTTQKGQKNSRERMKRIEEGIKELGSQILKEHPVENTQLQNEKLYLYYLQNGRDMYVDQELDINRLSDYDVDHIVPQSFLKDDSIDNKVLTRSDKARGKSDNVPSEEVVKKMKNYWRQLLNAKLITQRKFDNLTKAERGGLSELDKAGFIKRQLVETRQITKHVAQILDSRMNTKYDENDKLIREVKVITLKSKLVSDFRKDFQFYKVREINNYHHAHDAYLNAVVGTALIKKYPKLESEFVYGDYKVYDVRKMIAKSEQEIGKATAKYFFYSNIMNFFKTEITLANGEIRKRPLIETNGETGEIVWDKGRDFATVRKVLSMPQVNIVKKTEVQTGGFSKESILPKRNSDKLIARKKDWDPKKYGGFDSPTVAYSVLVVAKVEKGKSKKLKSVKELLGITIMERSSFEKNPIDFLEAKGYKEVKKDLIIKLPKYSLFELENGRKRMLASAGELQKGNELALPSKYVNFLYLASHYEKLKGSPEDNEQKQLFVEQHKHYLDEIIEQISEFSKRVILADANLDKVLSAYNKHRDKPIREQAENIIHLFTLTNLGAPAAFKYFDTTIDRKRYTSTKEVLDATLIHQSITGLYETRIDLSQLGGDGGGGGPAPGGSGGTLGDQGSRGSDPLPEPRVTLTVEGIPTEFLVNTGAEHSVLTKPMGKMGSKRTVVAGATGSKVYPWTTKRLLKIGQKQVTHSFLVIPECPAPLLGRDLLTKLKAQIQFSTEGPQVTWEDRPAMCLVLNLEEEYRLHEKPVPPSIDPSWLQLFPMVWAEKAGMGLANQVPPVVVELKSDASPVAVRQYPMSKEAREGIRPHIQRFLDLGILVPCQSPWNTPLLPVKKPGTNDYRPVQDLREVNKRVQDIHPTVPNPYNLLSSLPPSHTWYSVLDLKDAFFCLKLHPNSQPLFAFEWRDPEKGNTGQLTWTRLPQGFKNSPTLFNEALHRDLASFRALNPQVVMLQYVDDLLVAAPTYRDCKEGTRRLLQELSKLGYRVSAKKAQLCREEVTYLGYLLKGGKRWLTPARKATVMKIPTPTTPRQVREFLGKAGFCRLFIPGFASLAAPLYPLTRPKVPFTWTEAHQEAFGRIKEALLSAPALALPDLTKPFALYVDEKEGVARGVLTQTLGPWRRPVAYLSKKLDPVASGWPTCLKAIAAVALLLKDADKLTLGQNVLVIAPHNLESIVRQPPDRWMTNARMTHYQSLLLNERVSFAPPAILNPATLLPVESDDTPIHICSEILAEETGTRPDLRDQPLPGVPAWYTDGSSFIMDGRRQAGAAIVDNKRTVWASNLPEGTSAQKAELIALTQALRLAEGKSINIYTDSRYAFATAHVHGAIYKQRGWLTSAGKDIKNKEEILALLEAIHLPKRVAIIHCPGHQRGTDPVATGNRKADEAAKQAAQSTRILTETTKNAGKRTADGSEFEKRTADGSEFESPKKKAKVE

SEQ ID NO: 1827 - protein, 2216 aa, synthetic construct
MPAAKRVKLDGGDKKYSIGLDIGTNSVGWAVITDEYKVPSKKFKVLGNTDRHSIKKNLIGALLFDSGETAEATRLKRTARRRYTRRKNRICYLQEIFSNEMAKVDDSFFHRLEESFLVEEDKKHERHPIFGNIVDEVAYHEKYPTIYHLRKKLVDSTDKADLRLIYLALAHMIKFRGHFLIEGDLNPDNSDVDKLFIQLVQTYNQLFEENPINASGVDAKAILSARLSKSRRLENLIAQLPGEKKNGLFGNLIALSLGLTPNFKSNFDLAEDAKLQLSKDTYDDDLDNLLAQIGDQYADLFLAAKNLSDAILLSDILRVNTEITKAPLSASMIKRYDEHHQDLTLLKALVRQQLPEKYKEIFFDQSKNGYAGYIDGGASQEEFYKFIKPILEKMDGTEELLVKLNREDLLRKQRTFDNGSIPHQIHLGELHAILRRQEDFYPFLKDNREKIEKILTFRIPYYVGPLARGNSRFAWMTRKSEETITPWNFEEVVDKGASAQSFIERMTNFDKNLPNEKVLPKHSLLYEYFTVYNELTKVKYVTEGMRKPAFLSGEQKKAIVDLLFKTNRKVTVKQLKEDYFKKIECFDSVEISGVEDRFNASLGTYHDLLKIIKDKDFLDNEENEDILEDIVLTLTLFEDREMIEERLKTYAHLFDDKVMKQLKRRRYTGWGRLSRKLINGIRDKQSGKTILDFLKSDGFANRNFMQLIHDDSLTFKEDIQKAQVSGQGDSLHEHIANLAGSPAIKKGILQTVKVVDELVKVMGRHKPENIVIEMARENQTTQKGQKNSRERMKRIEEGIKELGSQILKEHPVENTQLQNEKLYLYYLQNGRDMYVDQELDINRLSDYDVDHIVPQSFLKDDSIDNKVLTRSDKARGKSDNVPSEEVVKKMKNYWRQLLNAKLITQRKFDNLTKAERGGLSELDKAGFIKRQLVETRQITKHVAQILDSRMNTKYDENDKLIREVKVITLKSKLVSDFRKDFQFYKVREINNYHHAHDAYLNAVVGTALIKKYPKLESEFVYGDYKVYDVRKMIAKSEQEIGKATAKYFFYSNIMNFFKTEITLANGEIRKRPLIETNGETGEIVWDKGRDFATVRKVLSMPQVNIVKKTEVQTGGFSKESILPKRNSDKLIARKKDWDPKKYGGFDSPTVAYSVLVVAKVEKGKSKKLKSVKELLGITIMERSSFEKNPIDFLEAKGYKEVKKDLIIKLPKYSLFELENGRKRMLASAGELQKGNELALPSKYVNFLYLASHYEKLKGSPEDNEQKQLFVEQHKHYLDEIIEQISEFSKRVILADANLDKVLSAYNKHRDKPIREQAENIIHLFTLTNLGAPAAFKYFDTTIDRKRYTSTKEVLDATLIHQSITGLYETRIDLSQLGGDGGPAPGGSGSSGGTLGDQGSRGSDPLPEPRVTLTVEGIPTEFLVNTGAEHSVLTKPMGKMGSKRTVVAGATGSKVYPWTTKRLLKIGQKQVTHSFLVIPECPAPLLGRDLLTKLKAQIQFSTEGPQVTWEDRPAMCLVLNLEEEYRLHEKPVPPSIDPSWLQLFPMVWAEKAGMGLANQVPPVVVELKSDASPVAVRQYPMSKEAREGIRPHIQRFLDLGILVPCQSPWNTPLLPVKKPGTNDYRPVQDLREVNKRVQDIHPTVPNPYNLLSSLPPSHTWYSVLDLKDAFFCLKLHPNSQPLFAFEWRDPEKGNTGQLTWTRLPQGFKNSPTLFNEALHRDLASFRALNPQVVMLQYVDDLLVAAPTYRDCKEGTRRLLQELSKLGYRVSAKKAQLCREEVTYLGYLLKGGKRWLTPARKATVMKIPTPTTPRQVREFLGKAGFCRLFIPGFASLAAPLYPLTRPKVPFTWTEAHQEAFGRIKEALLSAPALALPDLTKPFALYVDEKEGVARGVLTQTLGPWRRPVAYLSKKLDPVASGWPTCLKAIAAVALLLKDADKLTLGQNVLVIAPHNLESIVRQPPDRWMTNARMTHYQSLLLNERVSFAPPAILNPATLLPVESDDTPIHICSEILAEETGTRPDLRDQPLPGVPAWYTDGSSFIMDGRRQAGAAIVDNKRTVWASNLPEGTSAQKAELIALTQALRLAEGKSINIYTDSRYAFATAHVHGAIYKQRGWLTSAGKDIKNKEEILALLEAIHLPKRVAIIHCPGHQRGTDPVATGNRKADEAAKQAAQSTRILTETTKNAGKRTADGSEFEKRTADGSEFESPKKKAKVE

SEQ ID NO: 1828 - protein, 2212 aa, synthetic construct
MPAAKRVKLDGGDKKYSIGLDIGTNSVGWAVITDEYKVPSKKFKVLGNTDRHSIKKNLIGALLFDSGETAEATRLKRTARRRYTRRKNRICYLQEIFSNEMAKVDDSFFHRLEESFLVEEDKKHERHPIFGNIVDEVAYHEKYPTIYHLRKKLVDSTDKADLRLIYLALAHMIKFRGHFLIEGDLNPDNSDVDKLFIQLVQTYNQLFEENPINASGVDAKAILSARLSKSRRLENLIAQLPGEKKNGLFGNLIALSLGLTPNFKSNFDLAEDAKLQLSKDTYDDDLDNLLAQIGDQYADLFLAAKNLSDAILLSDILRVNTEITKAPLSASMIKRYDEHHQDLTLLKALVRQQLPEKYKEIFFDQSKNGYAGYIDGGASQEEFYKFIKPILEKMDGTEELLVKLNREDLLRKQRTFDNGSIPHQIHLGELHAILRRQEDFYPFLKDNREKIEKILTFRIPYYVGPLARGNSRFAWMTRKSEETITPWNFEEVVDKGASAQSFIERMTNFDKNLPNEKVLPKHSLLYEYFTVYNELTKVKYVTEGMRKPAFLSGEQKKAIVDLLFKTNRKVTVKQLKEDYFKKIECFDSVEISGVEDRFNASLGTYHDLLKIIKDKDFLDNEENEDILEDIVLTLTLFEDREMIEERLKTYAHLFDDKVMKQLKRRRYTGWGRLSRKLINGIRDKQSGKTILDFLKSDGFANRNFMQLIHDDSLTFKEDIQKAQVSGQGDSLHEHIANLAGSPAIKKGILQTVKVVDELVKVMGRHKPENIVIEMARENQTTQKGQKNSRERMKRIEEGIKELGSQILKEHPVENTQLQNEKLYLYYLQNGRDMYVDQELDINRLSDYDVDHIVPQSFLKDDSIDNKVLTRSDKARGKSDNVPSEEVVKKMKNYWRQLLNAKLITQRKFDNLTKAERGGLSELDKAGFIKRQLVETRQITKHVAQILDSRMNTKYDENDKLIREVKVITLKSKLVSDFRKDFQFYKVREINNYHHAHDAYLNAVVGTALIKKYPKLESEFVYGDYKVYDVRKMIAKSEQEIGKATAKYFFYSNIMNFFKTEITLANGEIRKRPLIETNGETGEIVWDKGRDFATVRKVLSMPQVNIVKKTEVQTGGFSKESILPKRNSDKLIARKKDWDPKKYGGFDSPTVAYSVLVVAKVEKGKSKKLKSVKELLGITIMERSSFEKNPIDFLEAKGYKEVKKDLIIKLPKYSLFELENGRKRMLASAGELQKGNELALPSKYVNFLYLASHYEKLKGSPEDNEQKQLFVEQHKHYLDEIIEQISEFSKRVILADANLDKVLSAYNKHRDKPIREQAENIIHLFTLTNLGAPAAFKYFDTTIDRKRYTSTKEVLDATLIHQSITGLYETRIDLSQLGGDGGGGGGGGGTLGDQGSRGSDPLPEPRVTLTVEGIPTEFLVNTGAEHSVLTKPMGKMGSKRTVVAGATGSKVYPWTTKRLLKIGQKQVTHSFLVIPECPAPLLGRDLLTKLKAQIQFSTEGPQVTWEDRPAMCLVLNLEEEYRLHEKPVPPSIDPSWLQLFPMVWAEKAGMGLANQVPPVVVELKSDASPVAVRQYPMSKEAREGIRPHIQRFLDLGILVPCQSPWNTPLLPVKKPGTNDYRPVQDLREVNKRVQDIHPTVPNPYNLLSSLPPSHTWYSVLDLKDAFFCLKLHPNSQPLFAFEWRDPEKGNTGQLTWTRLPQGFKNSPTLFNEALHRDLASFRALNPQVVMLQYVDDLLVAAPTYRDCKEGTRRLLQELSKLGYRVSAKKAQLCREEVTYLGYLLKGGKRWLTPARKATVMKIPTPTTPRQVREFLGKAGFCRLFIPGFASLAAPLYPLTRPKVPFTWTEAHQEAFGRIKEALLSAPALALPDLTKPFALYVDEKEGVARGVLTQTLGPWRRPVAYLSKKLDPVASGWPTCLKAIAAVALLLKDADKLTLGQNVLVIAPHNLESIVRQPPDRWMTNARMTHYQSLLLNERVSFAPPAILNPATLLPVESDDTPIHICSEILAEETGTRPDLRDQPLPGVPAWYTDGSSFIMDGRRQAGAAIVDNKRTVWASNLPEGTSAQKAELIALTQALRLAEGKSINIYTDSRYAFATAHVHGAIYKQRGWLTSAGKDIKNKEEILALLEAIHLPKRVAIIHCPGHQRGTDPVATGNRKADEAAKQAAQSTRILTETTKNAGKRTADGSEFEKRTADGSEFESPKKKAKVE

SEQ ID NO: 1829 - protein, 2218 aa, synthetic construct
MPAAKRVKLDGGDKKYSIGLDIGTNSVGWAVITDEYKVPSKKFKVLGNTDRHSIKKNLIGALLFDSGETAEATRLKRTARRRYTRRKNRICYLQEIFSNEMAKVDDSFFHRLEESFLVEEDKKHERHPIFGNIVDEVAYHEKYPTIYHLRKKLVDSTDKADLRLIYLALAHMIKFRGHFLIEGDLNPDNSDVDKLFIQLVQTYNQLFEENPINASGVDAKAILSARLSKSRRLENLIAQLPGEKKNGLFGNLIALSLGLTPNFKSNFDLAEDAKLQLSKDTYDDDLDNLLAQIGDQYADLFLAAKNLSDAILLSDILRVNTEITKAPLSASMIKRYDEHHQDLTLLKALVRQQLPEKYKEIFFDQSKNGYAGYIDGGASQEEFYKFIKPILEKMDGTEELLVKLNREDLLRKQRTFDNGSIPHQIHLGELHAILRRQEDFYPFLKDNREKIEKILTFRIPYYVGPLARGNSRFAWMTRKSEETITPWNFEEVVDKGASAQSFIERMTNFDKNLPNEKVLPKHSLLYEYFTVYNELTKVKYVTEGMRKPAFLSGEQKKAIVDLLFKTNRKVTVKQLKEDYFKKIECFDSVEISGVEDRFNASLGTYHDLLKIIKDKDFLDNEENEDILEDIVLTLTLFEDREMIEERLKTYAHLFDDKVMKQLKRRRYTGWGRLSRKLINGIRDKQSGKTILDFLKSDGFANRNFMQLIHDDSLTFKEDIQKAQVSGQGDSLHEHIANLAGSPAIKKGILQTVKVVDELVKVMGRHKPENIVIEMARENQTTQKGQKNSRERMKRIEEGIKELGSQILKEHPVENTQLQNEKLYLYYLQNGRDMYVDQELDINRLSDYDVDHIVPQSFLKDDSIDNKVLTRSDKARGKSDNVPSEEVVKKMKNYWRQLLNAKLITQRKFDNLTKAERGGLSELDKAGFIKRQLVETRQITKHVAQILDSRMNTKYDENDKLIREVKVITLKSKLVSDFRKDFQFYKVREINNYHHAHDAYLNAVVGTALIKKYPKLESEFVYGDYKVYDVRKMIAKSEQEIGKATAKYFFYSNIMNFFKTEITLANGEIRKRPLIETNGETGEIVWDKGRDFATVRKVLSMPQVNIVKKTEVQTGGFSKESILPKRNSDKLIARKKDWDPKKYGGFDSPTVAYSVLVVAKVEKGKSKKLKSVKELLGITIMERSSFEKNPIDFLEAKGYKEVKKDLIIKLPKYSLFELENGRKRMLASAGELQKGNELALPSKYVNFLYLASHYEKLKGSPEDNEQKQLFVEQHKHYLDEIIEQISEFSKRVILADANLDKVLSAYNKHRDKPIREQAENIIHLFTLTNLGAPAAFKYFDTTIDRKRYTSTKEVLDATLIHQSITGLYETRIDLSQLGGDGGGGSEAAAKGGGGGTLGDQGSRGSDPLPEPRVTLTVEGIPTEFLVNTGAEHSVLTKPMGKMGSKRTVVAGATGSKVYPWTTKRLLKIGQKQVTHSFLVIPECPAPLLGRDLLTKLKAQIQFSTEGPQVTWEDRPAMCLVLNLEEEYRLHEKPVPPSIDPSWLQLFPMVWAEKAGMGLANQVPPVVVELKSDASPVAVRQYPMSKEAREGIRPHIQRFLDLGILVPCQSPWNTPLLPVKKPGTNDYRPVQDLREVNKRVQDIHPTVPNPYNLLSSLPPSHTWYSVLDLKDAFFCLKLHPNSQPLFAFEWRDPEKGNTGQLTWTRLPQGFKNSPTLFNEALHRDLASFRALNPQVVMLQYVDDLLVAAPTYRDCKEGTRRLLQELSKLGYRVSAKKAQLCREEVTYLGYLLKGGKRWLTPARKATVMKIPTPTTPRQVREFLGKAGFCRLFIPGFASLAAPLYPLTRPKVPFTWTEAHQEAFGRIKEALLSAPALALPDLTKPFALYVDEKEGVARGVLTQTLGPWRRPVAYLSKKLDPVASGWPTCLKAIAAVALLLKDADKLTLGQNVLVIAPHNLESIVRQPPDRWMTNARMTHYQSLLLNERVSFAPPAILNPATLLPVESDDTPIHICSEILAEETGTRPDLRDQPLPGVPAWYTDGSSFIMDGRRQAGAAIVDNKRTVWASNLPEGTSAQKAELIALTQALRLAEGKSINIYTDSRYAFATAHVHGAIYKQRGWLTSAGKDIKNKEEILALLEAIHLPKRVAIIHCPGHQRGTDPVATGNRKADEAAKQAAQSTRILTETTKNAGKRTADGSEFEKRTADGSEFESPKKKAKVE

SEQ ID NO: 1830 - protein, 2216 aa, synthetic construct
MPAAKRVKLDGGDKKYSIGLDIGTNSVGWAVITDEYKVPSKKFKVLGNTDRHSIKKNLIGALLFDSGETAEATRLKRTARRRYTRRKNRICYLQEIFSNEMAKVDDSFFHRLEESFLVEEDKKHERHPIFGNIVDEVAYHEKYPTIYHLRKKLVDSTDKADLRLIYLALAHMIKFRGHFLIEGDLNPDNSDVDKLFIQLVQTYNQLFEENPINASGVDAKAILSARLSKSRRLENLIAQLPGEKKNGLFGNLIALSLGLTPNFKSNFDLAEDAKLQLSKDTYDDDLDNLLAQIGDQYADLFLAAKNLSDAILLSDILRVNTEITKAPLSASMIKRYDEHHQDLTLLKALVRQQLPEKYKEIFFDQSKNGYAGYIDGGASQEEFYKFIKPILEKMDGTEELLVKLNREDLLRKQRTFDNGSIPHQIHLGELHAILRRQEDFYPFLKDNREKIEKILTFRIPYYVGPLARGNSRFAWMTRKSEETITPWNFEEVVDKGASAQSFIERMTNFDKNLPNEKVLPKHSLLYEYFTVYNELTKVKYVTEGMRKPAFLSGEQKKAIVDLLFKTNRKVTVKQLKEDYFKKIECFDSVEISGVEDRFNASLGTYHDLLKIIKDKDFLDNEENEDILEDIVLTLTLFEDREMIEERLKTYAHLFDDKVMKQLKRRRYTGWGRLSRKLINGIRDKQSGKTILDFLKSDGFANRNFMQLIHDDSLTFKEDIQKAQVSGQGDSLHEHIANLAGSPAIKKGILQTVKVVDELVKVMGRHKPENIVIEMARENQTTQKGQKNSRERMKRIEEGIKELGSQILKEHPVENTQLQNEKLYLYYLQNGRDMYVDQELDINRLSDYDVDHIVPQSFLKDDSIDNKVLTRSDKARGKSDNVPSEEVVKKMKNYWRQLLNAKLITQRKFDNLTKAERGGLSELDKAGFIKRQLVETRQITKHVAQILDSRMNTKYDENDKLIREVKVITLKSKLVSDFRKDFQFYKVREINNYHHAHDAYLNAVVGTALIKKYPKLESEFVYGDYKVYDVRKMIAKSEQEIGKATAKYFFYSNIMNFFKTEITLANGEIRKRPLIETNGETGEIVWDKGRDFATVRKVLSMPQVNIVKKTEVQTGGFSKESILPKRNSDKLIARKKDWDPKKYGGFDSPTVAYSVLVVAKVEKGKSKKLKSVKELLGITIMERSSFEKNPIDFLEAKGYKEVKKDLIIKLPKYSLFELENGRKRMLASAGELQKGNELALPSKYVNFLYLASHYEKLKGSPEDNEQKQLFVEQHKHYLDEIIEQISEFSKRVILADANLDKVLSAYNKHRDKPIREQAENIIHLFTLTNLGAPAAFKYFDTTIDRKRYTSTKEVLDATLIHQSITGLYETRIDLSQLGGDGGGSSGGSPAPGGTLGDQGSRGSDPLPEPRVTLTVEGIPTEFLVNTGAEHSVLTKPMGKMGSKRTVVAGATGSKVYPWTTKRLLKIGQKQVTHSFLVIPECPAPLLGRDLLTKLKAQIQFSTEGPQVTWEDRPAMCLVLNLEEEYRLHEKPVPPSIDPSWLQLFPMVWAEKAGMGLANQVPPVVVELKSDASPVAVRQYPMSKEAREGIRPHIQRFLDLGILVPCQSPWNTPLLPVKKPGTNDYRPVQDLREVNKRVQDIHPTVPNPYNLLSSLPPSHTWYSVLDLKDAFFCLKLHPNSQPLFAFEWRDPEKGNTGQLTWTRLPQGFKNSPTLFNEALHRDLASFRALNPQVVMLQYVDDLLVAAPTYRDCKEGTRRLLQELSKLGYRVSAKKAQLCREEVTYLGYLLKGGKRWLTPARKATVMKIPTPTTPRQVREFLGKAGFCRLFIPGFASLAAPLYPLTRPKVPFTWTEAHQEAFGRIKEALLSAPALALPDLTKPFALYVDEKEGVARGVLTQTLGPWRRPVAYLSKKLDPVASGWPTCLKAIAAVALLLKDADKLTLGQNVLVIAPHNLESIVRQPPDRWMTNARMTHYQSLLLNERVSFAPPAILNPATLLPVESDDTPIHICSEILAEETGTRPDLRDQPLPGVPAWYTDGSSFIMDGRRQAGAAIVDNKRTVWASNLPEGTSAQKAELIALTQALRLAEGKSINIYTDSRYAFATAHVHGAIYKQRGWLTSAGKDIKNKEEILALLEAIHLPKRVAIIHCPGHQRGTDPVATGNRKADEAAKQAAQSTRILTETTKNAGKRTADGSEFEKRTADGSEFESPKKKAKVE

SEQ ID NO: 1831 - protein, 2213 aa, synthetic construct
MPAAKRVKLDGGDKKYSIGLDIGTNSVGWAVITDEYKVPSKKFKVLGNTDRHSIKKNLIGALLFDSGETAEATRLKRTARRRYTRRKNRICYLQEIFSNEMAKVDDSFFHRLEESFLVEEDKKHERHPIFGNIVDEVAYHEKYPTIYHLRKKLVDSTDKADLRLIYLALAHMIKFRGHFLIEGDLNPDNSDVDKLFIQLVQTYNQLFEENPINASGVDAKAILSARLSKSRRLENLIAQLPGEKKNGLFGNLIALSLGLTPNFKSNFDLAEDAKLQLSKDTYDDDLDNLLAQIGDQYADLFLAAKNLSDAILLSDILRVNTEITKAPLSASMIKRYDEHHQDLTLLKALVRQQLPEKYKEIFFDQSKNGYAGYIDGGASQEEFYKFIKPILEKMDGTEELLVKLNREDLLRKQRTFDNGSIPHQIHLGELHAILRRQEDFYPFLKDNREKIEKILTFRIPYYVGPLARGNSRFAWMTRKSEETITPWNFEEVVDKGASAQSFIERMTNFDKNLPNEKVLPKHSLLYEYFTVYNELTKVKYVTEGMRKPAFLSGEQKKAIVDLLFKTNRKVTVKQLKEDYFKKIECFDSVEISGVEDRFNASLGTYHDLLKIIKDKDFLDNEENEDILEDIVLTLTLFEDREMIEERLKTYAHLFDDKVMKQLKRRRYTGWGRLSRKLINGIRDKQSGKTILDFLKSDGFANRNFMQLIHDDSLTFKEDIQKAQVSGQGDSLHEHIANLAGSPAIKKGILQTVKVVDELVKVMGRHKPENIVIEMARENQTTQKGQKNSRERMKRIEEGIKELGSQILKEHPVENTQLQNEKLYLYYLQNGRDMYVDQELDINRLSDYDVDHIVPQSFLKDDSIDNKVLTRSDKARGKSDNVPSEEVVKKMKNYWRQLLNAKLITQRKFDNLTKAERGGLSELDKAGFIKRQLVETRQITKHVAQILDSRMNTKYDENDKLIREVKVITLKSKLVSDFRKDFQFYKVREINNYHHAHDAYLNAVVGTALIKKYPKLESEFVYGDYKVYDVRKMIAKSEQEIGKATAKYFFYSNIMNFFKTEITLANGEIRKRPLIETNGETGEIVWDKGRDFATVRKVLSMPQVNIVKKTEVQTGGFSKESILPKRNSDKLIARKKDWDPKKYGGFDSPTVAYSVLVVAKVEKGKSKKLKSVKELLGITIMERSSFEKNPIDFLEAKGYKEVKKDLIIKLPKYSLFELENGRKRMLASAGELQKGNELALPSKYVNFLYLASHYEKLKGSPEDNEQKQLFVEQHKHYLDEIIEQISEFSKRVILADANLDKVLSAYNKHRDKPIREQAENIIHLFTLTNLGAPAAFKYFDTTIDRKRYTSTKEVLDATLIHQSITGLYETRIDLSQLGGDGGGSSGSSGGTLGDQGSRGSDPLPEPRVTLTVEGIPTEFLVNTGAEHSVLTKPMGKMGSKRTVVAGATGSKVYPWTTKRLLKIGQKQVTHSFLVIPECPAPLLGRDLLTKLKAQIQFSTEGPQVTWEDRPAMCLVLNLEEEYRLHEKPVPPSIDPSWLQLFPMVWAEKAGMGLANQVPPVVVELKSDASPVAVRQYPMSKEAREGIRPHIQRFLDLGILVPCQSPWNTPLLPVKKPGTNDYRPVQDLREVNKRVQDIHPTVPNPYNLLSSLPPSHTWYSVLDLKDAFFCLKLHPNSQPLFAFEWRDPEKGNTGQLTWTRLPQGFKNSPTLFNEALHRDLASFRALNPQVVMLQYVDDLLVAAPTYRDCKEGTRRLLQELSKLGYRVSAKKAQLCREEVTYLGYLLKGGKRWLTPARKATVMKIPTPTTPRQVREFLGKAGFCRLFIPGFASLAAPLYPLTRPKVPFTWTEAHQEAFGRIKEALLSAPALALPDLTKPFALYVDEKEGVARGVLTQTLGPWRRPVAYLSKKLDPVASGWPTCLKAIAAVALLLKDADKLTLGQNVLVIAPHNLESIVRQPPDRWMTNARMTHYQSLLLNERVSFAPPAILNPATLLPVESDDTPIHICSEILAEETGTRPDLRDQPLPGVPAWYTDGSSFIMDGRRQAGAAIVDNKRTVWASNLPEGTSAQKAELIALTQALRLAEGKSINIYTDSRYAFATAHVHGAIYKQRGWLTSAGKDIKNKEEILALLEAIHLPKRVAIIHCPGHQRGTDPVATGNRKADEAAKQAAQSTRILTETTKNAGKRTADGSEFEKRTADGSEFESPKKKAKVE

SEQ ID NO: 1832 - protein, 2216 aa, synthetic construct
MPAAKRVKLDGGDKKYSIGLDIGTNSVGWAVITDEYKVPSKKFKVLGNTDRHSIKKNLIGALLFDSGETAEATRLKRTARRRYTRRKNRICYLQEIFSNEMAKVDDSFFHRLEESFLVEEDKKHERHPIFGNIVDEVAYHEKYPTIYHLRKKLVDSTDKADLRLIYLALAHMIKFRGHFLIEGDLNPDNSDVDKLFIQLVQTYNQLFEENPINASGVDAKAILSARLSKSRRLENLIAQLPGEKKNGLFGNLIALSLGLTPNFKSNFDLAEDAKLQLSKDTYDDDLDNLLAQIGDQYADLFLAAKNLSDAILLSDILRVNTEITKAPLSASMIKRYDEHHQDLTLLKALVRQQLPEKYKEIFFDQSKNGYAGYIDGGASQEEFYKFIKPILEKMDGTEELLVKLNREDLLRKQRTFDNGSIPHQIHLGELHAILRRQEDFYPFLKDNREKIEKILTFRIPYYVGPLARGNSRFAWMTRKSEETITPWNFEEVVDKGASAQSFIERMTNFDKNLPNEKVLPKHSLLYEYFTVYNELTKVKYVTEGMRKPAFLSGEQKKAIVDLLFKTNRKVTVKQLKEDYFKKIECFDSVEISGVEDRFNASLGTYHDLLKIIKDKDFLDNEENEDILEDIVLTLTLFEDREMIEERLKTYAHLFDDKVMKQLKRRRYTGWGRLSRKLINGIRDKQSGKTILDFLKSDGFANRNFMQLIHDDSLTFKEDIQKAQVSGQGDSLHEHIANLAGSPAIKKGILQTVKVVDELVKVMGRHKPENIVIEMARENQTTQKGQKNSRERMKRIEEGIKELGSQILKEHPVENTQLQNEKLYLYYLQNGRDMYVDQELDINRLSDYDVDHIVPQSFLKDDSIDNKVLTRSDKARGKSDNVPSEEVVKKMKNYWRQLLNAKLITQRKFDNLTKAERGGLSELDKAGFIKRQLVETRQITKHVAQILDSRMNTKYDENDKLIREVKVITLKSKLVSDFRKDFQFYKVREINNYHHAHDAYLNAVVGTALIKKYPKLESEFVYGDYKVYDVRKMIAKSEQEIGKATAKYFFYSNIMNFFKTEITLANGEIRKRPLIETNGETGEIVWDKGRDFATVRKVLSMPQVNIVKKTEVQTGGFSKESILPKRNSDKLIARKKDWDPKKYGGFDSPTVAYSVLVVAKVEKGKSKKLKSVKELLGITIMERSSFEKNPIDFLEAKGYKEVKKDLIIKLPKYSLFELENGRKRMLASAGELQKGNELALPSKYVNFLYLASHYEKLKGSPEDNEQKQLFVEQHKHYLDEIIEQISEFSKRVILADANLDKVLSAYNKHRDKPIREQAENIIHLFTLTNLGAPAAFKYFDTTIDRKRYTSTKEVLDATLIHQSITGLYETRIDLSQLGGDGGGGSGGGPAPGGTLGDQGSRGSDPLPEPRVTLTVEGIPTEFLVNTGAEHSVLTKPMGKMGSKRTVVAGATGSKVYPWTTKRLLKIGQKQVTHSFLVIPECPAPLLGRDLLTKLKAQIQFSTEGPQVTWEDRPAMCLVLNLEEEYRLHEKPVPPSIDPSWLQLFPMVWAEKAGMGLANQVPPVVVELKSDASPVAVRQYPMSKEAREGIRPHIQRFLDLGILVPCQSPWNTPLLPVKKPGTNDYRPVQDLREVNKRVQDIHPTVPNPYNLLSSLPPSHTWYSVLDLKDAFFCLKLHPNSQPLFAFEWRDPEKGNTGQLTWTRLPQGFKNSPTLFNEALHRDLASFRALNPQVVMLQYVDDLLVAAPTYRDCKEGTRRLLQELSKLGYRVSAKKAQLCREEVTYLGYLLKGGKRWLTPARKATVMKIPTPTTPRQVREFLGKAGFCRLFIPGFASLAAPLYPLTRPKVPFTWTEAHQEAFGRIKEALLSAPALALPDLTKPFALYVDEKEGVARGVLTQTLGPWRRPVAYLSKKLDPVASGWPTCLKAIAAVALLLKDADKLTLGQNVLVIAPHNLESIVRQPPDRWMTNARMTHYQSLLLNERVSFAPPAILNPATLLPVESDDTPIHICSEILAEETGTRPDLRDQPLPGVPAWYTDGSSFIMDGRRQAGAAIVDNKRTVWASNLPEGTSAQKAELIALTQALRLAEGKSINIYTDSRYAFATAHVHGAIYKQRGWLTSAGKDIKNKEEILALLEAIHLPKRVAIIHCPGHQRGTDPVATGNRKADEAAKQAAQSTRILTETTKNAGKRTADGSEFEKRTADGSEFESPKKKAKVE

SEQ ID NO: 1833 - protein, 2218 aa, synthetic construct
MPAAKRVKLDGGDKKYSIGLDIGTNSVGWAVITDEYKVPSKKFKVLGNTDRHSIKKNLIGALLFDSGETAEATRLKRTARRRYTRRKNRICYLQEIFSNEMAKVDDSFFHRLEESFLVEEDKKHERHPIFGNIVDEVAYHEKYPTIYHLRKKLVDSTDKADLRLIYLALAHMIKFRGHFLIEGDLNPDNSDVDKLFIQLVQTYNQLFEENPINASGVDAKAILSARLSKSRRLENLIAQLPGEKKNGLFGNLIALSLGLTPNFKSNFDLAEDAKLQLSKDTYDDDLDNLLAQIGDQYADLFLAAKNLSDAILLSDILRVNTEITKAPLSASMIKRYDEHHQDLTLLKALVRQQLPEKYKEIFFDQSKNGYAGYIDGGASQEEFYKFIKPILEKMDGTEELLVKLNREDLLRKQRTFDNGSIPHQIHLGELHAILRRQEDFYPFLKDNREKIEKILTFRIPYYVGPLARGNSRFAWMTRKSEETITPWNFEEVVDKGASAQSFIERMTNFDKNLPNEKVLPKHSLLYEYFTVYNELTKVKYVTEGMRKPAFLSGEQKKAIVDLLFKTNRKVTVKQLKEDYFKKIECFDSVEISGVEDRFNASLGTYHDLLKIIKDKDFLDNEENEDILEDIVLTLTLFEDREMIEERLKTYAHLFDDKVMKQLKRRRYTGWGRLSRKLINGIRDKQSGKTILDFLKSDGFANRNFMQLIHDDSLTFKEDIQKAQVSGQGDSLHEHIANLAGSPAIKKGILQTVKVVDELVKVMGRHKPENIVIEMARENQTTQKGQKNSRERMKRIEEGIKELGSQILKEHPVENTQLQNEKLYLYYLQNGRDMYVDQELDINRLSDYDVDHIVPQSFLKDDSIDNKVLTRSDKARGKSDNVPSEEVVKKMKNYWRQLLNAKLITQRKFDNLTKAERGGLSELDKAGFIKRQLVETRQITKHVAQILDSRMNTKYDENDKLIREVKVITLKSKLVSDFRKDFQFYKVREINNYHHAHDAYLNAVVGTALIKKYPKLESEFVYGDYKVYDVRKMIAKSEQEIGKATAKYFFYSNIMNFFKTEITLANGEIRKRPLIETNGETGEIVWDKGRDFATVRKVLSMPQVNIVKKTEVQTGGFSKESILPKRNSDKLIARKKDWDPKKYGGFDSPTVAYSVLVVAKVEKGKSKKLKSVKELLGITIMERSSFEKNPIDFLEAKGYKEVKKDLIIKLPKYSLFELENGRKRMLASAGELQKGNELALPSKYVNFLYLASHYEKLKGSPEDNEQKQLFVEQHKHYLDEIIEQISEFSKRVILADANLDKVLSAYNKHRDKPIREQAENIIHLFTLTNLGAPAAFKYFDTTIDRKRYTSTKEVLDATLIHQSITGLYETRIDLSQLGGDGGEAAAKGGSPAPGGTLGDQGSRGSDPLPEPRVTLTVEGIPTEFLVNTGAEHSVLTKPMGKMGSKRTVVAGATGSKVYPWTTKRLLKIGQKQVTHSFLVIPECPAPLLGRDLLTKLKAQIQFSTEGPQVTWEDRPAMCLVLNLEEEYRLHEKPVPPSIDPSWLQLFPMVWAEKAGMGLANQVPPVVVELKSDASPVAVRQYPMSKEAREGIRPHIQRFLDLGILVPCQSPWNTPLLPVKKPGTNDYRPVQDLREVNKRVQDIHPTVPNPYNLLSSLPPSHTWYSVLDLKDAFFCLKLHPNSQPLFAFEWRDPEKGNTGQLTWTRLPQGFKNSPTLFNEALHRDLASFRALNPQVVMLQYVDDLLVAAPTYRDCKEGTRRLLQELSKLGYRVSAKKAQLCREEVTYLGYLLKGGKRWLTPARKATVMKIPTPTTPRQVREFLGKAGFCRLFIPGFASLAAPLYPLTRPKVPFTWTEAHQEAFGRIKEALLSAPALALPDLTKPFALYVDEKEGVARGVLTQTLGPWRRPVAYLSKKLDPVASGWPTCLKAIAAVALLLKDADKLTLGQNVLVIAPHNLESIVRQPPDRWMTNARMTHYQSLLLNERVSFAPPAILNPATLLPVESDDTPIHICSEILAEETGTRPDLRDQPLPGVPAWYTDGSSFIMDGRRQAGAAIVDNKRTVWASNLPEGTSAQKAELIALTQALRLAEGKSINIYTDSRYAFATAHVHGAIYKQRGWLTSAGKDIKNKEEILALLEAIHLPKRVAIIHCPGHQRGTDPVATGNRKADEAAKQAAQSTRILTETTKNAGKRTADGSEFEKRTADGSEFESPKKKAKVE

SEQ ID NO: 1834 - protein, 2216 aa, synthetic construct
MPAAKRVKLDGGDKKYSIGLDIGTNSVGWAVITDEYKVPSKKFKVLGNTDRHSIKKNLIGALLFDSGETAEATRLKRTARRRYTRRKNRICYLQEIFSNEMAKVDDSFFHRLEESFLVEEDKKHERHPIFGNIVDEVAYHEKYPTIYHLRKKLVDSTDKADLRLIYLALAHMIKFRGHFLIEGDLNPDNSDVDKLFIQLVQTYNQLFEENPINASGVDAKAILSARLSKSRRLENLIAQLPGEKKNGLFGNLIALSLGLTPNFKSNFDLAEDAKLQLSKDTYDDDLDNLLAQIGDQYADLFLAAKNLSDAILLSDILRVNTEITKAPLSASMIKRYDEHHQDLTLLKALVRQQLPEKYKEIFFDQSKNGYAGYIDGGASQEEFYKFIKPILEKMDGTEELLVKLNREDLLRKQRTFDNGSIPHQIHLGELHAILRRQEDFYPFLKDNREKIEKILTFRIPYYVGPLARGNSRFAWMTRKSEETITPWNFEEVVDKGASAQSFIERMTNFDKNLPNEKVLPKHSLLYEYFTVYNELTKVKYVTEGMRKPAFLSGEQKKAIVDLLFKTNRKVTVKQLKEDYFKKIECFDSVEISGVEDRFNASLGTYHDLLKIIKDKDFLDNEENEDILEDIVLTLTLFEDREMIEERLKTYAHLFDDKVMKQLKRRRYTGWGRLSRKLINGIRDKQSGKTILDFLKSDGFANRNFMQLIHDDSLTFKEDIQKAQVSGQGDSLHEHIANLAGSPAIKKGILQTVKVVDELVKVMGRHKPENIVIEMARENQTTQKGQKNSRERMKRIEEGIKELGSQILKEHPVENTQLQNEKLYLYYLQNGRDMYVDQELDINRLSDYDVDHIVPQSFLKDDSIDNKVLTRSDKARGKSDNVPSEEVVKKMKNYWRQLLNAKLITQRKFDNLTKAERGGLSELDKAGFIKRQLVETRQITKHVAQILDSRMNTKYDENDKLIREVKVITLKSKLVSDFRKDFQFYKVREINNYHHAHDAYLNAVVGTALIKKYPKLESEFVYGDYKVYDVRKMIAKSEQEIGKATAKYFFYSNIMNFFKTEITLANGEIRKRPLIETNGETGEIVWDKGRDFATVRKVLSMPQVNIVKKTEVQTGGFSKESILPKRNSDKLIARKKDWDPKKYGGFDSPTVAYSVLVVAKVEKGKSKKLKSVKELLGITIMERSSFEKNPIDFLEAKGYKEVKKDLIIKLPKYSLFELENGRKRMLASAGELQKGNELALPSKYVNFLYLASHYEKLKGSPEDNEQKQLFVEQHKHYLDEIIEQISEFSKRVILADANLDKVLSAYNKHRDKPIREQAENIIHLFTLTNLGAPAAFKYFDTTIDRKRYTSTKEVLDATLIHQSITGLYETRIDLSQLGGDGGGGGGGSPAPGGTLGDQGSRGSDPLPEPRVTLTVEGIPTEFLVNTGAEHSVLTKPMGKMGSKRTVVAGATGSKVYPWTTKRLLKIGQKQVTHSFLVIPECPAPLLGRDLLTKLKAQIQFSTEGPQVTWEDRPAMCLVLNLEEEYRLHEKPVPPSIDPSWLQLFPMVWAEKAGMGLANQVPPVVVELKSDASPVAVRQYPMSKEAREGIRPHIQRFLDLGILVPCQSPWNTPLLPVKKPGTNDYRPVQDLREVNKRVQDIHPTVPNPYNLLSSLPPSHTWYSVLDLKDAFFCLKLHPNSQPLFAFEWRDPEKGNTGQLTWTRLPQGFKNSPTLFNEALHRDLASFRALNPQVVMLQYVDDLLVAAPTYRDCKEGTRRLLQELSKLGYRVSAKKAQLCREEVTYLGYLLKGGKRWLTPARKATVMKIPTPTTPRQVREFLGKAGFCRLFIPGFASLAAPLYPLTRPKVPFTWTEAHQEAFGRIKEALLSAPALALPDLTKPFALYVDEKEGVARGVLTQTLGPWRRPVAYLSKKLDPVASGWPTCLKAIAAVALLLKDADKLTLGQNVLVIAPHNLESIVRQPPDRWMTNARMTHYQSLLLNERVSFAPPAILNPATLLPVESDDTPIHICSEILAEETGTRPDLRDQPLPGVPAWYTDGSSFIMDGRRQAGAAIVDNKRTVWASNLPEGTSAQKAELIALTQALRLAEGKSINIYTDSRYAFATAHVHGAIYKQRGWLTSAGKDIKNKEEILALLEAIHLPKRVAIIHCPGHQRGTDPVATGNRKADEAAKQAAQSTRILTETTKNAGKRTADGSEFEKRTADGSEFESPKKKAKVE

SEQ ID NO: 1835 - protein, 2216 aa, synthetic construct
MPAAKRVKLDGGDKKYSIGLDIGTNSVGWAVITDEYKVPSKKFKVLGNTDRHSIKKNLIGALLFDSGETAEATRLKRTARRRYTRRKNRICYLQEIFSNEMAKVDDSFFHRLEESFLVEEDKKHERHPIFGNIVDEVAYHEKYPTIYHLRKKLVDSTDKADLRLIYLALAHMIKFRGHFLIEGDLNPDNSDVDKLFIQLVQTYNQLFEENPINASGVDAKAILSARLSKSRRLENLIAQLPGEKKNGLFGNLIALSLGLTPNFKSNFDLAEDAKLQLSKDTYDDDLDNLLAQIGDQYADLFLAAKNLSDAILLSDILRVNTEITKAPLSASMIKRYDEHHQDLTLLKALVRQQLPEKYKEIFFDQSKNGYAGYIDGGASQEEFYKFIKPILEKMDGTEELLVKLNREDLLRKQRTFDNGSIPHQIHLGELHAILRRQEDFYPFLKDNREKIEKILTFRIPYYVGPLARGNSRFAWMTRKSEETITPWNFEEVVDKGASAQSFIERMTNFDKNLPNEKVLPKHSLLYEYFTVYNELTKVKYVTEGMRKPAFLSGEQKKAIVDLLFKTNRKVTVKQLKEDYFKKIECFDSVEISGVEDRFNASLGTYHDLLKIIKDKDFLDNEENEDILEDIVLTLTLFEDREMIEERLKTYAHLFDDKVMKQLKRRRYTGWGRLSRKLINGIRDKQSGKTILDFLKSDGFANRNFMQLIHDDSLTFKEDIQKAQVSGQGDSLHEHIANLAGSPAIKKGILQTVKVVDELVKVMGRHKPENIVIEMARENQTTQKGQKNSRERMKRIEEGIKELGSQILKEHPVENTQLQNEKLYLYYLQNGRDMYVDQELDINRLSDYDVDHIVPQSFLKDDSIDNKVLTRSDKARGKSDNVPSEEVVKKMKNYWRQLLNAKLITQRKFDNLTKAERGGLSELDKAGFIKRQLVETRQITKHVAQILDSRMNTKYDENDKLIREVKVITLKSKLVSDFRKDFQFYKVREINNYHHAHDAYLNAVVGTALIKKYPKLESEFVYGDYKVYDVRKMIAKSEQEIGKATAKYFFYSNIMNFFKTEITLANGEIRKRPLIETNGETGEIVWDKGRDFATVRKVLSMPQVNIVKKTEVQTGGFSKESILPKRNSDKLIARKKDWDPKKYGGFDSPTVAYSVLVVAKVEKGKSKKLKSVKELLGITIMERSSFEKNPIDFLEAKGYKEVKKDLIIKLPKYSLFELENGRKRMLASAGELQKGNELALPSKYVNFLYLASHYEKLKGSPEDNEQKQLFVEQHKHYLDEIIEQISEFSKRVILADANLDKVLSAYNKHRDKPIREQAENIIHLFTLTNLGAPAAFKYFDTTIDRKRYTSTKEVLDATLIHQSITGLYETRIDLSQLGGDGGPAPGGGGGSGGTLGDQGSRGSDPLPEPRVTLTVEGIPTEFLVNTGAEHSVLTKPMGKMGSKRTVVAGATGSKVYPWTTKRLLKIGQKQVTHSFLVIPECPAPLLGRDLLTKLKAQIQFSTEGPQVTWEDRPAMCLVLNLEEEYRLHEKPVPPSIDPSWLQLFPMVWAEKAGMGLANQVPPVVVELKSDASPVAVRQYPMSKEAREGIRPHIQRFLDLGILVPCQSPWNTPLLPVKKPGTNDYRPVQDLREVNKRVQDIHPTVPNPYNLLSSLPPSHTWYSVLDLKDAFFCLKLHPNSQPLFAFEWRDPEKGNTGQLTWTRLPQGFKNSPTLFNEALHRDLASFRALNPQVVMLQYVDDLLVAAPTYRDCKEGTRRLLQELSKLGYRVSAKKAQLCREEVTYLGYLLKGGKRWLTPARKATVMKIPTPTTPRQVREFLGKAGFCRLFIPGFASLAAPLYPLTRPKVPFTWTEAHQEAFGRIKEALLSAPALALPDLTKPFALYVDEKEGVARGVLTQTLGPWRRPVAYLSKKLDPVASGWPTCLKAIAAVALLLKDADKLTLGQNVLVIAPHNLESIVRQPPDRWMTNARMTHYQSLLLNERVSFAPPAILNPATLLPVESDDTPIHICSEILAEETGTRPDLRDQPLPGVPAWYTDGSSFIMDGRRQAGAAIVDNKRTVWASNLPEGTSAQKAELIALTQALRLAEGKSINIYTDSRYAFATAHVHGAIYKQRGWLTSAGKDIKNKEEILALLEAIHLPKRVAIIHCPGHQRGTDPVATGNRKADEAAKQAAQSTRILTETTKNAGKRTADGSEFEKRTADGSEFESPKKKAKVE

SEQ ID NO: 1836 - protein, 2118 aa, synthetic construct
MPAAKRVKLDGGDKKYSIGLDIGTNSVGWAVITDEYKVPSKKFKVLGNTDRHSIKKNLIGALLFDSGETAEATRLKRTARRRYTRRKNRICYLQEIFSNEMAKVDDSFFHRLEESFLVEEDKKHERHPIFGNIVDEVAYHEKYPTIYHLRKKLVDSTDKADLRLIYLALAHMIKFRGHFLIEGDLNPDNSDVDKLFIQLVQTYNQLFEENPINASGVDAKAILSARLSKSRRLENLIAQLPGEKKNGLFGNLIALSLGLTPNFKSNFDLAEDAKLQLSKDTYDDDLDNLLAQIGDQYADLFLAAKNLSDAILLSDILRVNTEITKAPLSASMIKRYDEHHQDLTLLKALVRQQLPEKYKEIFFDQSKNGYAGYIDGGASQEEFYKFIKPILEKMDGTEELLVKLNREDLLRKQRTFDNGSIPHQIHLGELHAILRRQEDFYPFLKDNREKIEKILTFRIPYYVGPLARGNSRFAWMTRKSEETITPWNFEEVVDKGASAQSFIERMTNFDKNLPNEKVLPKHSLLYEYFTVYNELTKVKYVTEGMRKPAFLSGEQKKAIVDLLFKTNRKVTVKQLKEDYFKKIECFDSVEISGVEDRFNASLGTYHDLLKIIKDKDFLDNEENEDILEDIVLTLTLFEDREMIEERLKTYAHLFDDKVMKQLKRRRYTGWGRLSRKLINGIRDKQSGKTILDFLKSDGFANRNFMQLIHDDSLTFKEDIQKAQVSGQGDSLHEHIANLAGSPAIKKGILQTVKVVDELVKVMGRHKPENIVIEMARENQTTQKGQKNSRERMKRIEEGIKELGSQILKEHPVENTQLQNEKLYLYYLQNGRDMYVDQELDINRLSDYDVDHIVPQSFLKDDSIDNKVLTRSDKARGKSDNVPSEEVVKKMKNYWRQLLNAKLITQRKFDNLTKAERGGLSELDKAGFIKRQLVETRQITKHVAQILDSRMNTKYDENDKLIREVKVITLKSKLVSDFRKDFQFYKVREINNYHHAHDAYLNAVVGTALIKKYPKLESEFVYGDYKVYDVRKMIAKSEQEIGKATAKYFFYSNIMNFFKTEITLANGEIRKRPLIETNGETGEIVWDKGRDFATVRKVLSMPQVNIVKKTEVQTGGFSKESILPKRNSDKLIARKKDWDPKKYGGFDSPTVAYSVLVVAKVEKGKSKKLKSVKELLGITIMERSSFEKNPIDFLEAKGYKEVKKDLIIKLPKYSLFELENGRKRMLASAGELQKGNELALPSKYVNFLYLASHYEKLKGSPEDNEQKQLFVEQHKHYLDEIIEQISEFSKRVILADANLDKVLSAYNKHRDKPIREQAENIIHLFTLTNLGAPAAFKYFDTTIDRKRYTSTKEVLDATLIHQSITGLYETRIDLSQLGGDGGSGGSSGGSSGSETPGTSESATPESSGGSSGGSSGGTLNLEDEYRLYETSAEPEVSPGSTWLSDFPQAWAETGGMGLAVRQAPLIIPLKATSTPVSIKQYPMSQEAKLGIKPHIQRLLDQGILVPCQSPWNTPLLPVKKPGTNDYRPVQDLREVNKRVEDIHPTVPNPYNLLSGLPPSHRWYTVLDLKDAFFCLRLHPTSQPLFAFEWRDPGMGISGQLTWTRLPQGFKNSPTLFDEALHRDLADFRIQHPDLILLQYVDDILLAATSELDCQQGTRALLLTLGNLGYRASAKKAQLCQKQVKYLGYLLKEGQRWLTEARKETVMGQPTPKTPRQLREFLGTAGFCRLWIPGFAEMAAPLYPLTKTGTLFNWGPDQQKAYQEIKQALLTAPALGLPDLTKPFELFVDEKQGYAKGVLTQKLGPWRRPVAYLSKKLDPVAAGWPPCLRMVAAIAVLRKDAGKLTMGQPLVILAPHAVEALVKQPPDRWLSNARMTHYQAMLLDTDRVQFGPVVALNPATLLPLPEEGAPHDCLEILAETHGTRPDLTDQPIPDADHTWYTDGSSFLQEGQRKAGAAVTTETEVIWARALPAGTSAQRAELIALTQALKMAEGKRLNVYTDSRYAFATAHIHGEIYRRRGLLTSEGREIKNKSEILALLKALFLPKRLSIIHCLGHQKGDSAEARGNRLADQAAREAAIKTPPDTSTLLAGKRTADGSEFEKRTADGSEFESPKKKAKVE

SEQ ID NO: 1837 - protein, 2105 aa, synthetic construct
MPAAKRVKLDGGDKKYSIGLDIGTNSVGWAVITDEYKVPSKKFKVLGNTDRHSIKKNLIGALLFDSGETAEATRLKRTARRRYTRRKNRICYLQEIFSNEMAKVDDSFFHRLEESFLVEEDKKHERHPIFGNIVDEVAYHEKYPTIYHLRKKLVDSTDKADLRLIYLALAHMIKFRGHFLIEGDLNPDNSDVDKLFIQLVQTYNQLFEENPINASGVDAKAILSARLSKSRRLENLIAQLPGEKKNGLFGNLIALSLGLTPNFKSNFDLAEDAKLQLSKDTYDDDLDNLLAQIGDQYADLFLAAKNLSDAILLSDILRVNTEITKAPLSASMIKRYDEHHQDLTLLKALVRQQLPEKYKEIFFDQSKNGYAGYIDGGASQEEFYKFIKPILEKMDGTEELLVKLNREDLLRKQRTFDNGSIPHQIHLGELHAILRRQEDFYPFLKDNREKIEKILTFRIPYYVGPLARGNSRFAWMTRKSEETITPWNFEEVVDKGASAQSFIERMTNFDKNLPNEKVLPKHSLLYEYFTVYNELTKVKYVTEGMRKPAFLSGEQKKAIVDLLFKTNRKVTVKQLKEDYFKKIECFDSVEISGVEDRFNASLGTYHDLLKIIKDKDFLDNEENEDILEDIVLTLTLFEDREMIEERLKTYAHLFDDKVMKQLKRRRYTGWGRLSRKLINGIRDKQSGKTILDFLKSDGFANRNFMQLIHDDSLTFKEDIQKAQVSGQGDSLHEHIANLAGSPAIKKGILQTVKVVDELVKVMGRHKPENIVIEMARENQTTQKGQKNSRERMKRIEEGIKELGSQILKEHPVENTQLQNEKLYLYYLQNGRDMYVDQELDINRLSDYDVDHIVPQSFLKDDSIDNKVLTRSDKARGKSDNVPSEEVVKKMKNYWRQLLNAKLITQRKFDNLTKAERGGLSELDKAGFIKRQLVETRQITKHVAQILDSRMNTKYDENDKLIREVKVITLKSKLVSDFRKDFQFYKVREINNYHHAHDAYLNAVVGTALIKKYPKLESEFVYGDYKVYDVRKMIAKSEQEIGKATAKYFFYSNIMNFFKTEITLANGEIRKRPLIETNGETGEIVWDKGRDFATVRKVLSMPQVNIVKKTEVQTGGFSKESILPKRNSDKLIARKKDWDPKKYGGFDSPTVAYSVLVVAKVEKGKSKKLKSVKELLGITIMERSSFEKNPIDFLEAKGYKEVKKDLIIKLPKYSLFELENGRKRMLASAGELQKGNELALPSKYVNFLYLASHYEKLKGSPEDNEQKQLFVEQHKHYLDEIIEQISEFSKRVILADANLDKVLSAYNKHRDKPIREQAENIIHLFTLTNLGAPAAFKYFDTTIDRKRYTSTKEVLDATLIHQSITGLYETRIDLSQLGGDGGEAAAKEAAAKEAAAKEAAAKGGTLNLEDEYRLYETSAEPEVSPGSTWLSDFPQAWAETGGMGLAVRQAPLIIPLKATSTPVSIKQYPMSQEAKLGIKPHIQRLLDQGILVPCQSPWNTPLLPVKKPGTNDYRPVQDLREVNKRVEDIHPTVPNPYNLLSGLPPSHRWYTVLDLKDAFFCLRLHPTSQPLFAFEWRDPGMGISGQLTWTRLPQGFKNSPTLFDEALHRDLADFRIQHPDLILLQYVDDILLAATSELDCQQGTRALLLTLGNLGYRASAKKAQLCQKQVKYLGYLLKEGQRWLTEARKETVMGQPTPKTPRQLREFLGTAGFCRLWIPGFAEMAAPLYPLTKTGTLFNWGPDQQKAYQEIKQALLTAPALGLPDLTKPFELFVDEKQGYAKGVLTQKLGPWRRPVAYLSKKLDPVAAGWPPCLRMVAAIAVLRKDAGKLTMGQPLVILAPHAVEALVKQPPDRWLSNARMTHYQAMLLDTDRVQFGPVVALNPATLLPLPEEGAPHDCLEILAETHGTRPDLTDQPIPDADHTWYTDGSSFLQEGQRKAGAAVTTETEVIWARALPAGTSAQRAELIALTQALKMAEGKRLNVYTDSRYAFATAHIHGEIYRRRGLLTSEGREIKNKSEILALLKALFLPKRLSIIHCLGHQKGDSAEARGNRLADQAAREAAIKTPPDTSTLLAGKRTADGSEFEKRTADGSEFESPKKKAKVE

SEQ ID NO: 1838 - protein, 2094 aa, synthetic construct
MPAAKRVKLDGGDKKYSIGLDIGTNSVGWAVITDEYKVPSKKFKVLGNTDRHSIKKNLIGALLFDSGETAEATRLKRTARRRYTRRKNRICYLQEIFSNEMAKVDDSFFHRLEESFLVEEDKKHERHPIFGNIVDEVAYHEKYPTIYHLRKKLVDSTDKADLRLIYLALAHMIKFRGHFLIEGDLNPDNSDVDKLFIQLVQTYNQLFEENPINASGVDAKAILSARLSKSRRLENLIAQLPGEKKNGLFGNLIALSLGLTPNFKSNFDLAEDAKLQLSKDTYDDDLDNLLAQIGDQYADLFLAAKNLSDAILLSDILRVNTEITKAPLSASMIKRYDEHHQDLTLLKALVRQQLPEKYKEIFFDQSKNGYAGYIDGGASQEEFYKFIKPILEKMDGTEELLVKLNREDLLRKQRTFDNGSIPHQIHLGELHAILRRQEDFYPFLKDNREKIEKILTFRIPYYVGPLARGNSRFAWMTRKSEETITPWNFEEVVDKGASAQSFIERMTNFDKNLPNEKVLPKHSLLYEYFTVYNELTKVKYVTEGMRKPAFLSGEQKKAIVDLLFKTNRKVTVKQLKEDYFKKIECFDSVEISGVEDRFNASLGTYHDLLKIIKDKDFLDNEENEDILEDIVLTLTLFEDREMIEERLKTYAHLFDDKVMKQLKRRRYTGWGRLSRKLINGIRDKQSGKTILDFLKSDGFANRNFMQLIHDDSLTFKEDIQKAQVSGQGDSLHEHIANLAGSPAIKKGILQTVKVVDELVKVMGRHKPENIVIEMARENQTTQKGQKNSRERMKRIEEGIKELGSQILKEHPVENTQLQNEKLYLYYLQNGRDMYVDQELDINRLSDYDVDHIVPQSFLKDDSIDNKVLTRSDKARGKSDNVPSEEVVKKMKNYWRQLLNAKLITQRKFDNLTKAERGGLSELDKAGFIKRQLVETRQITKHVAQILDSRMNTKYDENDKLIREVKVITLKSKLVSDFRKDFQFYKVREINNYHHAHDAYLNAVVGTALIKKYPKLESEFVYGDYKVYDVRKMIAKSEQEIGKATAKYFFYSNIMNFFKTEITLANGEIRKRPLIETNGETGEIVWDKGRDFATVRKVLSMPQVNIVKKTEVQTGGFSKESILPKRNSDKLIARKKDWDPKKYGGFDSPTVAYSVLVVAKVEKGKSKKLKSVKELLGITIMERSSFEKNPIDFLEAKGYKEVKKDLIIKLPKYSLFELENGRKRMLASAGELQKGNELALPSKYVNFLYLASHYEKLKGSPEDNEQKQLFVEQHKHYLDEIIEQISEFSKRVILADANLDKVLSAYNKHRDKPIREQAENIIHLFTLTNLGAPAAFKYFDTTIDRKRYTSTKEVLDATLIHQSITGLYETRIDLSQLGGDGGGSSGGGPAPGGTLNLEDEYRLYETSAEPEVSPGSTWLSDFPQAWAETGGMGLAVRQAPLIIPLKATSTPVSIKQYPMSQEAKLGIKPHIQRLLDQGILVPCQSPWNTPLLPVKKPGTNDYRPVQDLREVNKRVEDIHPTVPNPYNLLSGLPPSHRWYTVLDLKDAFFCLRLHPTSQPLFAFEWRDPGMGISGQLTWTRLPQGFKNSPTLFDEALHRDLADFRIQHPDLILLQYVDDILLAATSELDCQQGTRALLLTLGNLGYRASAKKAQLCQKQVKYLGYLLKEGQRWLTEARKETVMGQPTPKTPRQLREFLGTAGFCRLWIPGFAEMAAPLYPLTKTGTLFNWGPDQQKAYQEIKQALLTAPALGLPDLTKPFELFVDEKQGYAKGVLTQKLGPWRRPVAYLSKKLDPVAAGWPPCLRMVAAIAVLRKDAGKLTMGQPLVILAPHAVEALVKQPPDRWLSNARMTHYQAMLLDTDRVQFGPVVALNPATLLPLPEEGAPHDCLEILAETHGTRPDLTDQPIPDADHTWYTDGSSFLQEGQRKAGAAVTTETEVIWARALPAGTSAQRAELIALTQALKMAEGKRLNVYTDSRYAFATAHIHGEIYRRRGLLTSEGREIKNKSEILALLKALFLPKRLSIIHCLGHQKGDSAEARGNRLADQAAREAAIKTPPDTSTLLAGKRTADGSEFEKRTADGSEFESPKKKAKVE

SEQ ID NO: 1839 - protein, 2096 aa, synthetic construct
MPAAKRVKLDGGDKKYSIGLDIGTNSVGWAVITDEYKVPSKKFKVLGNTDRHSIKKNLIGALLFDSGETAEATRLKRTARRRYTRRKNRICYLQEIFSNEMAKVDDSFFHRLEESFLVEEDKKHERHPIFGNIVDEVAYHEKYPTIYHLRKKLVDSTDKADLRLIYLALAHMIKFRGHFLIEGDLNPDNSDVDKLFIQLVQTYNQLFEENPINASGVDAKAILSARLSKSRRLENLIAQLPGEKKNGLFGNLIALSLGLTPNFKSNFDLAEDAKLQLSKDTYDDDLDNLLAQIGDQYADLFLAAKNLSDAILLSDILRVNTEITKAPLSASMIKRYDEHHQDLTLLKALVRQQLPEKYKEIFFDQSKNGYAGYIDGGASQEEFYKFIKPILEKMDGTEELLVKLNREDLLRKQRTFDNGSIPHQIHLGELHAILRRQEDFYPFLKDNREKIEKILTFRIPYYVGPLARGNSRFAWMTRKSEETITPWNFEEVVDKGASAQSFIERMTNFDKNLPNEKVLPKHSLLYEYFTVYNELTKVKYVTEGMRKPAFLSGEQKKAIVDLLFKTNRKVTVKQLKEDYFKKIECFDSVEISGVEDRFNASLGTYHDLLKIIKDKDFLDNEENEDILEDIVLTLTLFEDREMIEERLKTYAHLFDDKVMKQLKRRRYTGWGRLSRKLINGIRDKQSGKTILDFLKSDGFANRNFMQLIHDDSLTFKEDIQKAQVSGQGDSLHEHIANLAGSPAIKKGILQTVKVVDELVKVMGRHKPENIVIEMARENQTTQKGQKNSRERMKRIEEGIKELGSQILKEHPVENTQLQNEKLYLYYLQNGRDMYVDQELDINRLSDYDVDHIVPQSFLKDDSIDNKVLTRSDKARGKSDNVPSEEVVKKMKNYWRQLLNAKLITQRKFDNLTKAERGGLSELDKAGFIKRQLVETRQITKHVAQILDSRMNTKYDENDKLIREVKVITLKSKLVSDFRKDFQFYKVREINNYHHAHDAYLNAVVGTALIKKYPKLESEFVYGDYKVYDVRKMIAKSEQEIGKATAKYFFYSNIMNFFKTEITLANGEIRKRPLIETNGETGEIVWDKGRDFATVRKVLSMPQVNIVKKTEVQTGGFSKESILPKRNSDKLIARKKDWDPKKYGGFDSPTVAYSVLVVAKVEKGKSKKLKSVKELLGITIMERSSFEKNPIDFLEAKGYKEVKKDLIIKLPKYSLFELENGRKRMLASAGELQKGNELALPSKYVNFLYLASHYEKLKGSPEDNEQKQLFVEQHKHYLDEIIEQISEFSKRVILADANLDKVLSAYNKHRDKPIREQAENIIHLFTLTNLGAPAAFKYFDTTIDRKRYTSTKEVLDATLIHQSITGLYETRIDLSQLGGDGGEAAAKGGGPAPGGTLNLEDEYRLYETSAEPEVSPGSTWLSDFPQAWAETGGMGLAVRQAPLIIPLKATSTPVSIKQYPMSQEAKLGIKPHIQRLLDQGILVPCQSPWNTPLLPVKKPGTNDYRPVQDLREVNKRVEDIHPTVPNPYNLLSGLPPSHRWYTVLDLKDAFFCLRLHPTSQPLFAFEWRDPGMGISGQLTWTRLPQGFKNSPTLFDEALHRDLADFRIQHPDLILLQYVDDILLAATSELDCQQGTRALLLTLGNLGYRASAKKAQLCQKQVKYLGYLLKEGQRWLTEARKETVMGQPTPKTPRQLREFLGTAGFCRLWIPGFAEMAAPLYPLTKTGTLFNWGPDQQKAYQEIKQALLTAPALGLPDLTKPFELFVDEKQGYAKGVLTQKLGPWRRPVAYLSKKLDPVAAGWPPCLRMVAAIAVLRKDAGKLTMGQPLVILAPHAVEALVKQPPDRWLSNARMTHYQAMLLDTDRVQFGPVVALNPATLLPLPEEGAPHDCLEILAETHGTRPDLTDQPIPDADHTWYTDGSSFLQEGQRKAGAAVTTETEVIWARALPAGTSAQRAELIALTQALKMAEGKRLNVYTDSRYAFATAHIHGEIYRRRGLLTSEGREIKNKSEILALLKALFLPKRLSIIHCLGHQKGDSAEARGNRLADQAAREAAIKTPPDTSTLLAGKRTADGSEFEKRTADGSEFESPKKKAKVE

SEQ ID NO: 1840 - protein, 2096 aa, synthetic construct
MPAAKRVKLDGGDKKYSIGLDIGTNSVGWAVITDEYKVPSKKFKVLGNTDRHSIKKNLIGALLFDSGETAEATRLKRTARRRYTRRKNRICYLQEIFSNEMAKVDDSFFHRLEESFLVEEDKKHERHPIFGNIVDEVAYHEKYPTIYHLRKKLVDSTDKADLRLIYLALAHMIKFRGHFLIEGDLNPDNSDVDKLFIQLVQTYNQLFEENPINASGVDAKAILSARLSKSRRLENLIAQLPGEKKNGLFGNLIALSLGLTPNFKSNFDLAEDAKLQLSKDTYDDDLDNLLAQIGDQYADLFLAAKNLSDAILLSDILRVNTEITKAPLSASMIKRYDEHHQDLTLLKALVRQQLPEKYKEIFFDQSKNGYAGYIDGGASQEEFYKFIKPILEKMDGTEELLVKLNREDLLRKQRTFDNGSIPHQIHLGELHAILRRQEDFYPFLKDNREKIEKILTFRIPYYVGPLARGNSRFAWMTRKSEETITPWNFEEVVDKGASAQSFIERMTNFDKNLPNEKVLPKHSLLYEYFTVYNELTKVKYVTEGMRKPAFLSGEQKKAIVDLLFKTNRKVTVKQLKEDYFKKIECFDSVEISGVEDRFNASLGTYHDLLKIIKDKDFLDNEENEDILEDIVLTLTLFEDREMIEERLKTYAHLFDDKVMKQLKRRRYTGWGRLSRKLINGIRDKQSGKTILDFLKSDGFANRNFMQLIHDDSLTFKEDIQKAQVSGQGDSLHEHIANLAGSPAIKKGILQTVKVVDELVKVMGRHKPENIVIEMARENQTTQKGQKNSRERMKRIEEGIKELGSQILKEHPVENTQLQNEKLYLYYLQNGRDMYVDQELDINRLSDYDVDHIVPQSFLKDDSIDNKVLTRSDKARGKSDNVPSEEVVKKMKNYWRQLLNAKLITQRKFDNLTKAERGGLSELDKAGFIKRQLVETRQITKHVAQILDSRMNTKYDENDKLIREVKVITLKSKLVSDFRKDFQFYKVREINNYHHAHDAYLNAVVGTALIKKYPKLESEFVYGDYKVYDVRKMIAKSEQEIGKATAKYFFYSNIMNFFKTEITLANGEIRKRPLIETNGETGEIVWDKGRDFATVRKVLSMPQVNIVKKTEVQTGGFSKESILPKRNSDKLIARKKDWDPKKYGGFDSPTVAYSVLVVAKVEKGKSKKLKSVKELLGITIMERSSFEKNPIDFLEAKGYKEVKKDLIIKLPKYSLFELENGRKRMLASAGELQKGNELALPSKYVNFLYLASHYEKLKGSPEDNEQKQLFVEQHKHYLDEIIEQISEFSKRVILADANLDKVLSAYNKHRDKPIREQAENIIHLFTLTNLGAPAAFKYFDTTIDRKRYTSTKEVLDATLIHQSITGLYETRIDLSQLGGDGGGGGPAPEAAAKGGTLNLEDEYRLYETSAEPEVSPGSTWLSDFPQAWAETGGMGLAVRQAPLIIPLKATSTPVSIKQYPMSQEAKLGIKPHIQRLLDQGILVPCQSPWNTPLLPVKKPGTNDYRPVQDLREVNKRVEDIHPTVPNPYNLLSGLPPSHRWYTVLDLKDAFFCLRLHPTSQPLFAFEWRDPGMGISGQLTWTRLPQGFKNSPTLFDEALHRDLADFRIQHPDLILLQYVDDILLAATSELDCQQGTRALLLTLGNLGYRASAKKAQLCQKQVKYLGYLLKEGQRWLTEARKETVMGQPTPKTPRQLREFLGTAGFCRLWIPGFAEMAAPLYPLTKTGTLFNWGPDQQKAYQEIKQALLTAPALGLPDLTKPFELFVDEKQGYAKGVLTQKLGPWRRPVAYLSKKLDPVAAGWPPCLRMVAAIAVLRKDAGKLTMGQPLVILAPHAVEALVKQPPDRWLSNARMTHYQAMLLDTDRVQFGPVVALNPATLLPLPEEGAPHDCLEILAETHGTRPDLTDQPIPDADHTWYTDGSSFLQEGQRKAGAAVTTETEVIWARALPAGTSAQRAELIALTQALKMAEGKRLNVYTDSRYAFATAHIHGEIYRRRGLLTSEGREIKNKSEILALLKALFLPKRLSIIHCLGHQKGDSAEARGNRLADQAAREAAIKTPPDTSTLLAGKRTADGSEFEKRTADGSEFESPKKKAKVE

SEQ ID NO: 1841 - protein, 2096 aa, synthetic construct
MPAAKRVKLDGGDKKYSIGLDIGTNSVGWAVITDEYKVPSKKFKVLGNTDRHSIKKNLIGALLFDSGETAEATRLKRTARRRYTRRKNRICYLQEIFSNEMAKVDDSFFHRLEESFLVEEDKKHERHPIFGNIVDEVAYHEKYPTIYHLRKKLVDSTDKADLRLIYLALAHMIKFRGHFLIEGDLNPDNSDVDKLFIQLVQTYNQLFEENPINASGVDAKAILSARLSKSRRLENLIAQLPGEKKNGLFGNLIALSLGLTPNFKSNFDLAEDAKLQLSKDTYDDDLDNLLAQIGDQYADLFLAAKNLSDAILLSDILRVNTEITKAPLSASMIKRYDEHHQDLTLLKALVRQQLPEKYKEIFFDQSKNGYAGYIDGGASQEEFYKFIKPILEKMDGTEELLVKLNREDLLRKQRTFDNGSIPHQIHLGELHAILRRQEDFYPFLKDNREKIEKILTFRIPYYVGPLARGNSRFAWMTRKSEETITPWNFEEVVDKGASAQSFIERMTNFDKNLPNEKVLPKHSLLYEYFTVYNELTKVKYVTEGMRKPAFLSGEQKKAIVDLLFKTNRKVTVKQLKEDYFKKIECFDSVEISGVEDRFNASLGTYHDLLKIIKDKDFLDNEENEDILEDIVLTLTLFEDREMIEERLKTYAHLFDDKVMKQLKRRRYTGWGRLSRKLINGIRDKQSGKTILDFLKSDGFANRNFMQLIHDDSLTFKEDIQKAQVSGQGDSLHEHIANLAGSPAIKKGILQTVKVVDELVKVMGRHKPENIVIEMARENQTTQKGQKNSRERMKRIEEGIKELGSQILKEHPVENTQLQNEKLYLYYLQNGRDMYVDQELDINRLSDYDVDHIVPQSFLKDDSIDNKVLTRSDKARGKSDNVPSEEVVKKMKNYWRQLLNAKLITQRKFDNLTKAERGGLSELDKAGFIKRQLVETRQITKHVAQILDSRMNTKYDENDKLIREVKVITLKSKLVSDFRKDFQFYKVREINNYHHAHDAYLNAVVGTALIKKYPKLESEFVYGDYKVYDVRKMIAKSEQEIGKATAKYFFYSNIMNFFKTEITLANGEIRKRPLIETNGETGEIVWDKGRDFATVRKVLSMPQVNIVKKTEVQTGGFSKESILPKRNSDKLIARKKDWDPKKYGGFDSPTVAYSVLVVAKVEKGKSKKLKSVKELLGITIMERSSFEKNPIDFLEAKGYKEVKKDLIIKLPKYSLFELENGRKRMLASAGELQKGNELALPSKYVNFLYLASHYEKLKGSPEDNEQKQLFVEQHKHYLDEIIEQISEFSKRVILADANLDKVLSAYNKHRDKPIREQAENIIHLFTLTNLGAPAAFKYFDTTIDRKRYTSTKEVLDATLIHQSITGLYETRIDLSQLGGDGGEAAAKGGGGGSGGTLNLEDEYRLYETSAEPEVSPGSTWLSDFPQAWAETGGMGLAVRQAPLIIPLKATSTPVSIKQYPMSQEAKLGIKPHIQRLLDQGILVPCQSPWNTPLLPVKKPGTNDYRPVQDLREVNKRVEDIHPTVPNPYNLLSGLPPSHRWYTVLDLKDAFFCLRLHPTSQPLFAFEWRDPGMGISGQLTWTRLPQGFKNSPTLFDEALHRDLADFRIQHPDLILLQYVDDILLAATSELDCQQGTRALLLTLGNLGYRASAKKAQLCQKQVKYLGYLLKEGQRWLTEARKETVMGQPTPKTPRQLREFLGTAGFCRLWIPGFAEMAAPLYPLTKTGTLFNWGPDQQKAYQEIKQALLTAPALGLPDLTKPFELFVDEKQGYAKGVLTQKLGPWRRPVAYLSKKLDPVAAGWPPCLRMVAAIAVLRKDAGKLTMGQPLVILAPHAVEALVKQPPDRWLSNARMTHYQAMLLDTDRVQFGPVVALNPATLLPLPEEGAPHDCLEILAETHGTRPDLTDQPIPDADHTWYTDGSSFLQEGQRKAGAAVTTETEVIWARALPAGTSAQRAELIALTQALKMAEGKRLNVYTDSRYAFATAHIHGEIYRRRGLLTSEGREIKNKSEILALLKALFLPKRLSIIHCLGHQKGDSAEARGNRLADQAAREAAIKTPPDTSTLLAGKRTADGSEFEKRTADGSEFESPKKKAKVE

SEQ ID NO: 1842 - protein, 2096 aa, synthetic construct
MPAAKRVKLDGGDKKYSIGLDIGTNSVGWAVITDEYKVPSKKFKVLGNTDRHSIKKNLIGALLFDSGETAEATRLKRTARRRYTRRKNRICYLQEIFSNEMAKVDDSFFHRLEESFLVEEDKKHERHPIFGNIVDEVAYHEKYPTIYHLRKKLVDSTDKADLRLIYLALAHMIKFRGHFLIEGDLNPDNSDVDKLFIQLVQTYNQLFEENPINASGVDAKAILSARLSKSRRLENLIAQLPGEKKNGLFGNLIALSLGLTPNFKSNFDLAEDAKLQLSKDTYDDDLDNLLAQIGDQYADLFLAAKNLSDAILLSDILRVNTEITKAPLSASMIKRYDEHHQDLTLLKALVRQQLPEKYKEIFFDQSKNGYAGYIDGGASQEEFYKFIKPILEKMDGTEELLVKLNREDLLRKQRTFDNGSIPHQIHLGELHAILRRQEDFYPFLKDNREKIEKILTFRIPYYVGPLARGNSRFAWMTRKSEETITPWNFEEVVDKGASAQSFIERMTNFDKNLPNEKVLPKHSLLYEYFTVYNELTKVKYVTEGMRKPAFLSGEQKKAIVDLLFKTNRKVTVKQLKEDYFKKIECFDSVEISGVEDRFNASLGTYHDLLKIIKDKDFLDNEENEDILEDIVLTLTLFEDREMIEERLKTYAHLFDDKVMKQLKRRRYTGWGRLSRKLINGIRDKQSGKTILDFLKSDGFANRNFMQLIHDDSLTFKEDIQKAQVSGQGDSLHEHIANLAGSPAIKKGILQTVKVVDELVKVMGRHKPENIVIEMARENQTTQKGQKNSRERMKRIEEGIKELGSQILKEHPVENTQLQNEKLYLYYLQNGRDMYVDQELDINRLSDYDVDHIVPQSFLKDDSIDNKVLTRSDKARGKSDNVPSEEVVKKMKNYWRQLLNAKLITQRKFDNLTKAERGGLSELDKAGFIKRQLVETRQITKHVAQILDSRMNTKYDENDKLIREVKVITLKSKLVSDFRKDFQFYKVREINNYHHAHDAYLNAVVGTALIKKYPKLESEFVYGDYKVYDVRKMIAKSEQEIGKATAKYFFYSNIMNFFKTEITLANGEIRKRPLIETNGETGEIVWDKGRDFATVRKVLSMPQVNIVKKTEVQTGGFSKESILPKRNSDKLIARKKDWDPKKYGGFDSPTVAYSVLVVAKVEKGKSKKLKSVKELLGITIMERSSFEKNPIDFLEAKGYKEVKKDLIIKLPKYSLFELENGRKRMLASAGELQKGNELALPSKYVNFLYLASHYEKLKGSPEDNEQKQLFVEQHKHYLDEIIEQISEFSKRVILADANLDKVLSAYNKHRDKPIREQAENIIHLFTLTNLGAPAAFKYFDTTIDRKRYTSTKEVLDATLIHQSITGLYETRIDLSQLGGDGGPAPEAAAKGSSGGTLNLEDEYRLYETSAEPEVSPGSTWLSDFPQAWAETGGMGLAVRQAPLIIPLKATSTPVSIKQYPMSQEAKLGIKPHIQRLLDQGILVPCQSPWNTPLLPVKKPGTNDYRPVQDLREVNKRVEDIHPTVPNPYNLLSGLPPSHRWYTVLDLKDAFFCLRLHPTSQPLFAFEWRDPGMGISGQLTWTRLPQGFKNSPTLFNEALHRDLADFRIQHPDLILLQYVDDILLAATSELDCQQGTRALLLTLGNLGYRASAKKAQLCQKQVKYLGYLLKEGQRWLTEARKETVMGQPTPKTPRQLREFLGTAGFCRLWIPGFAEMAAPLYPLTKPGTLFNWGPDQQKAYQEIKQALLTAPALGLPDLTKPFELFVDEKQGYAKGVLTQKLGPWRRPVAYLSKKLDPVAAGWPPCLRMVAAIAVLRKDAGKLTMGQPLVILAPHAVEALVKQPPDRWLSNARMTHYQAMLLDTDRVQFGPVVALNPATLLPLPEEGAPHDCLEILAETHGTRPDLTDQPIPDADHTWYTDGSSFLQEGQRKAGAAVTTETEVIWARALPAGTSAQRAELIALTQALKMAEGKRLNVYTDSRYAFATAHIHGEIYRRRGWLTSEGREIKNKSEILALLKALFLPKRLSIIHCLGHQKGDSAEARGNRLADQAAREAAIKTPPDTSTLLAGKRTADGSEFEKRTADGSEFESPKKKAKVE

SEQ ID NO: 1843 - protein, 2093 aa, synthetic construct
MPAAKRVKLDGGDKKYSIGLDIGTNSVGWAVITDEYKVPSKKFKVLGNTDRHSIKKNLIGALLFDSGETAEATRLKRTARRRYTRRKNRICYLQEIFSNEMAKVDDSFFHRLEESFLVEEDKKHERHPIFGNIVDEVAYHEKYPTIYHLRKKLVDSTDKADLRLIYLALAHMIKFRGHFLIEGDLNPDNSDVDKLFIQLVQTYNQLFEENPINASGVDAKAILSARLSKSRRLENLIAQLPGEKKNGLFGNLIALSLGLTPNFKSNFDLAEDAKLQLSKDTYDDDLDNLLAQIGDQYADLFLAAKNLSDAILLSDILRVNTEITKAPLSASMIKRYDEHHQDLTLLKALVRQQLPEKYKEIFFDQSKNGYAGYIDGGASQEEFYKFIKPILEKMDGTEELLVKLNREDLLRKQRTFDNGSIPHQIHLGELHAILRRQEDFYPFLKDNREKIEKILTFRIPYYVGPLARGNSRFAWMTRKSEETITPWNFEEVVDKGASAQSFIERMTNFDKNLPNEKVLPKHSLLYEYFTVYNELTKVKYVTEGMRKPAFLSGEQKKAIVDLLFKTNRKVTVKQLKEDYFKKIECFDSVEISGVEDRFNASLGTYHDLLKIIKDKDFLDNEENEDILEDIVLTLTLFEDREMIEERLKTYAHLFDDKVMKQLKRRRYTGWGRLSRKLINGIRDKQSGKTILDFLKSDGFANRNFMQLIHDDSLTFKEDIQKAQVSGQGDSLHEHIANLAGSPAIKKGILQTVKVVDELVKVMGRHKPENIVIEMARENQTTQKGQKNSRERMKRIEEGIKELGSQILKEHPVENTQLQNEKLYLYYLQNGRDMYVDQELDINRLSDYDVDHIVPQSFLKDDSIDNKVLTRSDKARGKSDNVPSEEVVKKMKNYWRQLLNAKLITQRKFDNLTKAERGGLSELDKAGFIKRQLVETRQITKHVAQILDSRMNTKYDENDKLIREVKVITLKSKLVSDFRKDFQFYKVREINNYHHAHDAYLNAVVGTALIKKYPKLESEFVYGDYKVYDVRKMIAKSEQEIGKATAKYFFYSNIMNFFKTEITLANGEIRKRPLIETNGETGEIVWDKGRDFATVRKVLSMPQVNIVKKTEVQTGGFSKESILPKRNSDKLIARKKDWDPKKYGGFDSPTVAYSVLVVAKVEKGKSKKLKSVKELLGITIMERSSFEKNPIDFLEAKGYKEVKKDLIIKLPKYSLFELENGRKRMLASAGELQKGNELALPSKYVNFLYLASHYEKLKGSPEDNEQKQLFVEQHKHYLDEIIEQISEFSKRVILADANLDKVLSAYNKHRDKPIREQAENIIHLFTLTNLGAPAAFKYFDTTIDRKRYTSTKEVLDATLIHQSITGLYETRIDLSQLGGDGGPAPEAAAKGGTLNLEDEYRLYETSAEPEVSPGSTWLSDFPQAWAETGGMGLAVRQAPLIIPLKATSTPVSIKQYPMSQEAKLGIKPHIQRLLDQGILVPCQSPWNTPLLPVKKPGTNDYRPVQDLREVNKRVEDIHPTVPNPYNLLSGLPPSHRWYTVLDLKDAFFCLRLHPTSQPLFAFEWRDPGMGISGQLTWTRLPQGFKNSPTLFNEALHRDLADFRIQHPDLILLQYVDDILLAATSELDCQQGTRALLLTLGNLGYRASAKKAQLCQKQVKYLGYLLKEGQRWLTEARKETVMGQPTPKTPRQLREFLGTAGFCRLWIPGFAEMAAPLYPLTKPGTLFNWGPDQQKAYQEIKQALLTAPALGLPDLTKPFELFVDEKQGYAKGVLTQKLGPWRRPVAYLSKKLDPVAAGWPPCLRMVAAIAVLRKDAGKLTMGQPLVILAPHAVEALVKQPPDRWLSNARMTHYQAMLLDTDRVQFGPVVALNPATLLPLPEEGAPHDCLEILAETHGTRPDLTDQPIPDADHTWYTDGSSFLQEGQRKAGAAVTTETEVIWARALPAGTSAQRAELIALTQALKMAEGKRLNVYTDSRYAFATAHIHGEIYRRRGWLTSEGREIKNKSEILALLKALFLPKRLSIIHCLGHQKGDSAEARGNRLADQAAREAAIKTPPDTSTLLAGKRTADGSEFEKRTADGSEFESPKKKAKVE

SEQ ID NO: 1844 - protein, 2098 aa, synthetic construct
MPAAKRVKLDGGDKKYSIGLDIGTNSVGWAVITDEYKVPSKKFKVLGNTDRHSIKKNLIGALLFDSGETAEATRLKRTARRRYTRRKNRICYLQEIFSNEMAKVDDSFFHRLEESFLVEEDKKHERHPIFGNIVDEVAYHEKYPTIYHLRKKLVDSTDKADLRLIYLALAHMIKFRGHFLIEGDLNPDNSDVDKLFIQLVQTYNQLFEENPINASGVDAKAILSARLSKSRRLENLIAQLPGEKKNGLFGNLIALSLGLTPNFKSNFDLAEDAKLQLSKDTYDDDLDNLLAQIGDQYADLFLAAKNLSDAILLSDILRVNTEITKAPLSASMIKRYDEHHQDLTLLKALVRQQLPEKYKEIFFDQSKNGYAGYIDGGASQEEFYKFIKPILEKMDGTEELLVKLNREDLLRKQRTFDNGSIPHQIHLGELHAILRRQEDFYPFLKDNREKIEKILTFRIPYYVGPLARGNSRFAWMTRKSEETITPWNFEEVVDKGASAQSFIERMTNFDKNLPNEKVLPKHSLLYEYFTVYNELTKVKYVTEGMRKPAFLSGEQKKAIVDLLFKTNRKVTVKQLKEDYFKKIECFDSVEISGVEDRFNASLGTYHDLLKIIKDKDFLDNEENEDILEDIVLTLTLFEDREMIEERLKTYAHLFDDKVMKQLKRRRYTGWGRLSRKLINGIRDKQSGKTILDFLKSDGFANRNFMQLIHDDSLTFKEDIQKAQVSGQGDSLHEHIANLAGSPAIKKGILQTVKVVDELVKVMGRHKPENIVIEMARENQTTQKGQKNSRERMKRIEEGIKELGSQILKEHPVENTQLQNEKLYLYYLQNGRDMYVDQELDINRLSDYDVDHIVPQSFLKDDSIDNKVLTRSDKARGKSDNVPSEEVVKKMKNYWRQLLNAKLITQRKFDNLTKAERGGLSELDKAGFIKRQLVETRQITKHVAQILDSRMNTKYDENDKLIREVKVITLKSKLVSDFRKDFQFYKVREINNYHHAHDAYLNAVVGTALIKKYPKLESEFVYGDYKVYDVRKMIAKSEQEIGKATAKYFFYSNIMNFFKTEITLANGEIRKRPLIETNGETGEIVWDKGRDFATVRKVLSMPQVNIVKKTEVQTGGFSKESILPKRNSDKLIARKKDWDPKKYGGFDSPTVAYSVLVVAKVEKGKSKKLKSVKELLGITIMERSSFEKNPIDFLEAKGYKEVKKDLIIKLPKYSLFELENGRKRMLASAGELQKGNELALPSKYVNFLYLASHYEKLKGSPEDNEQKQLFVEQHKHYLDEIIEQISEFSKRVILADANLDKVLSAYNKHRDKPIREQAENIIHLFTLTNLGAPAAFKYFDTTIDRKRYTSTKEVLDATLIHQSITGLYETRIDLSQLGGDGGPAPAPAPAPAPAPGGTLNLEDEYRLYETSAEPEVSPGSTWLSDFPQAWAETGGMGLAVRQAPLIIPLKATSTPVSIKQYPMSQEAKLGIKPHIQRLLDQGILVPCQSPWNTPLLPVKKPGTNDYRPVQDLREVNKRVEDIHPTVPNPYNLLSGLPPSHRWYTVLDLKDAFFCLRLHPTSQPLFAFEWRDPGMGISGQLTWTRLPQGFKNSPTLFNEALHRDLADFRIQHPDLILLQYVDDILLAATSELDCQQGTRALLLTLGNLGYRASAKKAQLCQKQVKYLGYLLKEGQRWLTEARKETVMGQPTPKTPRQLREFLGTAGFCRLWIPGFAEMAAPLYPLTKPGTLFNWGPDQQKAYQEIKQALLTAPALGLPDLTKPFELFVDEKQGYAKGVLTQKLGPWRRPVAYLSKKLDPVAAGWPPCLRMVAAIAVLRKDAGKLTMGQPLVILAPHAVEALVKQPPDRWLSNARMTHYQAMLLDTDRVQFGPVVALNPATLLPLPEEGAPHDCLEILAETHGTRPDLTDQPIPDADHTWYTDGSSFLQEGQRKAGAAVTTETEVIWARALPAGTSAQRAELIALTQALKMAEGKRLNVYTDSRYAFATAHIHGEIYRRRGWLTSEGREIKNKSEILALLKALFLPKRLSIIHCLGHQKGDSAEARGNRLADQAAREAAIKTPPDTSTLLAGKRTADGSEFEKRTADGSEFESPKKKAKVE

SEQ ID NO: 1845 - protein, 2096 aa, synthetic construct
MPAAKRVKLDGGDKKYSIGLDIGTNSVGWAVITDEYKVPSKKFKVLGNTDRHSIKKNLIGALLFDSGETAEATRLKRTARRRYTRRKNRICYLQEIFSNEMAKVDDSFFHRLEESFLVEEDKKHERHPIFGNIVDEVAYHEKYPTIYHLRKKLVDSTDKADLRLIYLALAHMIKFRGHFLIEGDLNPDNSDVDKLFIQLVQTYNQLFEENPINASGVDAKAILSARLSKSRRLENLIAQLPGEKKNGLFGNLIALSLGLTPNFKSNFDLAEDAKLQLSKDTYDDDLDNLLAQIGDQYADLFLAAKNLSDAILLSDILRVNTEITKAPLSASMIKRYDEHHQDLTLLKALVRQQLPEKYKEIFFDQSKNGYAGYIDGGASQEEFYKFIKPILEKMDGTEELLVKLNREDLLRKQRTFDNGSIPHQIHLGELHAILRRQEDFYPFLKDNREKIEKILTFRIPYYVGPLARGNSRFAWMTRKSEETITPWNFEEVVDKGASAQSFIERMTNFDKNLPNEKVLPKHSLLYEYFTVYNELTKVKYVTEGMRKPAFLSGEQKKAIVDLLFKTNRKVTVKQLKEDYFKKIECFDSVEISGVEDRFNASLGTYHDLLKIIKDKDFLDNEENEDILEDIVLTLTLFEDREMIEERLKTYAHLFDDKVMKQLKRRRYTGWGRLSRKLINGIRDKQSGKTILDFLKSDGFANRNFMQLIHDDSLTFKEDIQKAQVSGQGDSLHEHIANLAGSPAIKKGILQTVKVVDELVKVMGRHKPENIVIEMARENQTTQKGQKNSRERMKRIEEGIKELGSQILKEHPVENTQLQNEKLYLYYLQNGRDMYVDQELDINRLSDYDVDHIVPQSFLKDDSIDNKVLTRSDKARGKSDNVPSEEVVKKMKNYWRQLLNAKLITQRKFDNLTKAERGGLSELDKAGFIKRQLVETRQITKHVAQILDSRMNTKYDENDKLIREVKVITLKSKLVSDFRKDFQFYKVREINNYHHAHDAYLNAVVGTALIKKYPKLESEFVYGDYKVYDVRKMIAKSEQEIGKATAKYFFYSNIMNFFKTEITLANGEIRKRPLIETNGETGEIVWDKGRDFATVRKVLSMPQVNIVKKTEVQTGGFSKESILPKRNSDKLIARKKDWDPKKYGGFDSPTVAYSVLVVAKVEKGKSKKLKSVKELLGITIMERSSFEKNPIDFLEAKGYKEVKKDLIIKLPKYSLFELENGRKRMLASAGELQKGNELALPSKYVNFLYLASHYEKLKGSPEDNEQKQLFVEQHKHYLDEIIEQISEFSKRVILADANLDKVLSAYNKHRDKPIREQAENIIHLFTLTNLGAPAAFKYFDTTIDRKRYTSTKEVLDATLIHQSITGLYETRIDLSQLGGDGGGSSGGGEAAAKGGTLNLEDEYRLYETSAEPEVSPGSTWLSDFPQAWAETGGMGLAVRQAPLIIPLKATSTPVSIKQYPMSQEAKLGIKPHIQRLLDQGILVPCQSPWNTPLLPVKKPGTNDYRPVQDLREVNKRVEDIHPTVPNPYNLLSGLPPSHRWYTVLDLKDAFFCLRLHPTSQPLFAFEWRDPGMGISGQLTWTRLPQGFKNSPTLFNEALHRDLADFRIQHPDLILLQYVDDILLAATSELDCQQGTRALLLTLGNLGYRASAKKAQLCQKQVKYLGYLLKEGQRWLTEARKETVMGQPTPKTPRQLREFLGTAGFCRLWIPGFAEMAAPLYPLTKPGTLFNWGPDQQKAYQEIKQALLTAPALGLPDLTKPFELFVDEKQGYAKGVLTQKLGPWRRPVAYLSKKLDPVAAGWPPCLRMVAAIAVLRKDAGKLTMGQPLVILAPHAVEALVKQPPDRWLSNARMTHYQAMLLDTDRVQFGPVVALNPATLLPLPEEGAPHDCLEILAETHGTRPDLTDQPIPDADHTWYTDGSSFLQEGQRKAGAAVTTETEVIWARALPAGTSAQRAELIALTQALKMAEGKRLNVYTDSRYAFATAHIHGEIYRRRGWLTSEGREIKNKSEILALLKALFLPKRLSIIHCLGHQKGDSAEARGNRLADQAAREAAIKTPPDTSTLLAGKRTADGSEFEKRTADGSEFESPKKKAKVE

SEQ ID NO: 1846 - protein, 2096 aa, synthetic construct
MPAAKRVKLDGGDKKYSIGLDIGTNSVGWAVITDEYKVPSKKFKVLGNTDRHSIKKNLIGALLFDSGETAEATRLKRTARRRYTRRKNRICYLQEIFSNEMAKVDDSFFHRLEESFLVEEDKKHERHPIFGNIVDEVAYHEKYPTIYHLRKKLVDSTDKADLRLIYLALAHMIKFRGHFLIEGDLNPDNSDVDKLFIQLVQTYNQLFEENPINASGVDAKAILSARLSKSRRLENLIAQLPGEKKNGLFGNLIALSLGLTPNFKSNFDLAEDAKLQLSKDTYDDDLDNLLAQIGDQYADLFLAAKNLSDAILLSDILRVNTEITKAPLSASMIKRYDEHHQDLTLLKALVRQQLPEKYKEIFFDQSKNGYAGYIDGGASQEEFYKFIKPILEKMDGTEELLVKLNREDLLRKQRTFDNGSIPHQIHLGELHAILRRQEDFYPFLKDNREKIEKILTFRIPYYVGPLARGNSRFAWMTRKSEETITPWNFEEVVDKGASAQSFIERMTNFDKNLPNEKVLPKHSLLYEYFTVYNELTKVKYVTEGMRKPAFLSGEQKKAIVDLLFKTNRKVTVKQLKEDYFKKIECFDSVEISGVEDRFNASLGTYHDLLKIIKDKDFLDNEENEDILEDIVLTLTLFEDREMIEERLKTYAHLFDDKVMKQLKRRRYTGWGRLSRKLINGIRDKQSGKTILDFLKSDGFANRNFMQLIHDDSLTFKEDIQKAQVSGQGDSLHEHIANLAGSPAIKKGILQTVKVVDELVKVMGRHKPENIVIEMARENQTTQKGQKNSRERMKRIEEGIKELGSQILKEHPVENTQLQNEKLYLYYLQNGRDMYVDQELDINRLSDYDVDHIVPQSFLKDDSIDNKVLTRSDKARGKSDNVPSEEVVKKMKNYWRQLLNAKLITQRKFDNLTKAERGGLSELDKAGFIKRQLVETRQITKHVAQILDSRMNTKYDENDKLIREVKVITLKSKLVSDFRKDFQFYKVREINNYHHAHDAYLNAVVGTALIKKYPKLESEFVYGDYKVYDVRKMIAKSEQEIGKATAKYFFYSNIMNFFKTEITLANGEIRKRPLIETNGETGEIVWDKGRDFATVRKVLSMPQVNIVKKTEVQTGGFSKESILPKRNSDKLIARKKDWDPKKYGGFDSPTVAYSVLVVAKVEKGKSKKLKSVKELLGITIMERSSFEKNPIDFLEAKGYKEVKKDLIIKLPKYSLFELENGRKRMLASAGELQKGNELALPSKYVNFLYLASHYEKLKGSPEDNEQKQLFVEQHKHYLDEIIEQISEFSKRVILADANLDKVLSAYNKHRDKPIREQAENIIHLFTLTNLGAPAAFKYFDTTIDRKRYTSTKEVLDATLIHQSITGLYETRIDLSQLGGDGGEAAAKGGGGSSGGTLNLEDEYRLYETSAEPEVSPGSTWLSDFPQAWAETGGMGLAVRQAPLIIPLKATSTPVSIKQYPMSQEAKLGIKPHIQRLLDQGILVPCQSPWNTPLLPVKKPGTNDYRPVQDLREVNKRVEDIHPTVPNPYNLLSGLPPSHRWYTVLDLKDAFFCLRLHPTSQPLFAFEWRDPGMGISGQLTWTRLPQGFKNSPTLFNEALHRDLADFRIQHPDLILLQYVDDILLAATSELDCQQGTRALLLTLGNLGYRASAKKAQLCQKQVKYLGYLLKEGQRWLTEARKETVMGQPTPKTPRQLREFLGTAGFCRLWIPGFAEMAAPLYPLTKPGTLFNWGPDQQKAYQEIKQALLTAPALGLPDLTKPFELFVDEKQGYAKGVLTQKLGPWRRPVAYLSKKLDPVAAGWPPCLRMVAAIAVLRKDAGKLTMGQPLVILAPHAVEALVKQPPDRWLSNARMTHYQAMLLDTDRVQFGPVVALNPATLLPLPEEGAPHDCLEILAETHGTRPDLTDQPIPDADHTWYTDGSSFLQEGQRKAGAAVTTETEVIWARALPAGTSAQRAELIALTQALKMAEGKRLNVYTDSRYAFATAHIHGEIYRRRGWLTSEGREIKNKSEILALLKALFLPKRLSIIHCLGHQKGDSAEARGNRLADQAAREAAIKTPPDTSTLLAGKRTADGSEFEKRTADGSEFESPKKKAKVE

SEQ ID NO: 1847 - protein, 2095 aa, synthetic construct
MPAAKRVKLDGGDKKYSIGLDIGTNSVGWAVITDEYKVPSKKFKVLGNTDRHSIKKNLIGALLFDSGETAEATRLKRTARRRYTRRKNRICYLQEIFSNEMAKVDDSFFHRLEESFLVEEDKKHERHPIFGNIVDEVAYHEKYPTIYHLRKKLVDSTDKADLRLIYLALAHMIKFRGHFLIEGDLNPDNSDVDKLFIQLVQTYNQLFEENPINASGVDAKAILSARLSKSRRLENLIAQLPGEKKNGLFGNLIALSLGLTPNFKSNFDLAEDAKLQLSKDTYDDDLDNLLAQIGDQYADLFLAAKNLSDAILLSDILRVNTEITKAPLSASMIKRYDEHHQDLTLLKALVRQQLPEKYKEIFFDQSKNGYAGYIDGGASQEEFYKFIKPILEKMDGTEELLVKLNREDLLRKQRTFDNGSIPHQIHLGELHAILRRQEDFYPFLKDNREKIEKILTFRIPYYVGPLARGNSRFAWMTRKSEETITPWNFEEVVDKGASAQSFIERMTNFDKNLPNEKVLPKHSLLYEYFTVYNELTKVKYVTEGMRKPAFLSGEQKKAIVDLLFKTNRKVTVKQLKEDYFKKIECFDSVEISGVEDRFNASLGTYHDLLKIIKDKDFLDNEENEDILEDIVLTLTLFEDREMIEERLKTYAHLFDDKVMKQLKRRRYTGWGRLSRKLINGIRDKQSGKTILDFLKSDGFANRNFMQLIHDDSLTFKEDIQKAQVSGQGDSLHEHIANLAGSPAIKKGILQTVKVVDELVKVMGRHKPENIVIEMARENQTTQKGQKNSRERMKRIEEGIKELGSQILKEHPVENTQLQNEKLYLYYLQNGRDMYVDQELDINRLSDYDVDHIVPQSFLKDDSIDNKVLTRSDKARGKSDNVPSEEVVKKMKNYWRQLLNAKLITQRKFDNLTKAERGGLSELDKAGFIKRQLVETRQITKHVAQILDSRMNTKYDENDKLIREVKVITLKSKLVSDFRKDFQFYKVREINNYHHAHDAYLNAVVGTALIKKYPKLESEFVYGDYKVYDVRKMIAKSEQEIGKATAKYFFYSNIMNFFKTEITLANGEIRKRPLIETNGETGEIVWDKGRDFATVRKVLSMPQVNIVKKTEVQTGGFSKESILPKRNSDKLIARKKDWDPKKYGGFDSPTVAYSVLVVAKVEKGKSKKLKSVKELLGITIMERSSFEKNPIDFLEAKGYKEVKKDLIIKLPKYSLFELENGRKRMLASAGELQKGNELALPSKYVNFLYLASHYEKLKGSPEDNEQKQLFVEQHKHYLDEIIEQISEFSKRVILADANLDKVLSAYNKHRDKPIREQAENIIHLFTLTNLGAPAAFKYFDTTIDRKRYTSTKEVLDATLIHQSITGLYETRIDLSQLGGDGGEAAAKEAAAKGGTLNLEDEYRLYETSAEPEVSPGSTWLSDFPQAWAETGGMGLAVRQAPLIIPLKATSTPVSIKQYPMSQEAKLGIKPHIQRLLDQGILVPCQSPWNTPLLPVKKPGTNDYRPVQDLREVNKRVEDIHPTVPNPYNLLSGLPPSHRWYTVLDLKDAFFCLRLHPTSQPLFAFEWRDPGMGISGQLTWTRLPQGFKNSPTLFNEALHRDLADFRIQHPDLILLQYVDDILLAATSELDCQQGTRALLLTLGNLGYRASAKKAQLCQKQVKYLGYLLKEGQRWLTEARKETVMGQPTPKTPRQLREFLGTAGFCRLWIPGFAEMAAPLYPLTKPGTLFNWGPDQQKAYQEIKQALLTAPALGLPDLTKPFELFVDEKQGYAKGVLTQKLGPWRRPVAYLSKKLDPVAAGWPPCLRMVAAIAVLRKDAGKLTMGQPLVILAPHAVEALVKQPPDRWLSNARMTHYQAMLLDTDRVQFGPVVALNPATLLPLPEEGAPHDCLEILAETHGTRPDLTDQPIPDADHTWYTDGSSFLQEGQRKAGAAVTTETEVIWARALPAGTSAQRAELIALTQALKMAEGKRLNVYTDSRYAFATAHIHGEIYRRRGWLTSEGREIKNKSEILALLKALFLPKRLSIIHCLGHQKGDSAEARGNRLADQAAREAAIKTPPDTSTLLAGKRTADGSEFEKRTADGSEFESPKKKAKVE

SEQ ID NO: 1848 - protein, 2091 aa, synthetic construct
MPAAKRVKLDGGDKKYSIGLDIGTNSVGWAVITDEYKVPSKKFKVLGNTDRHSIKKNLIGALLFDSGETAEATRLKRTARRRYTRRKNRICYLQEIFSNEMAKVDDSFFHRLEESFLVEEDKKHERHPIFGNIVDEVAYHEKYPTIYHLRKKLVDSTDKADLRLIYLALAHMIKFRGHFLIEGDLNPDNSDVDKLFIQLVQTYNQLFEENPINASGVDAKAILSARLSKSRRLENLIAQLPGEKKNGLFGNLIALSLGLTPNFKSNFDLAEDAKLQLSKDTYDDDLDNLLAQIGDQYADLFLAAKNLSDAILLSDILRVNTEITKAPLSASMIKRYDEHHQDLTLLKALVRQQLPEKYKEIFFDQSKNGYAGYIDGGASQEEFYKFIKPILEKMDGTEELLVKLNREDLLRKQRTFDNGSIPHQIHLGELHAILRRQEDFYPFLKDNREKIEKILTFRIPYYVGPLARGNSRFAWMTRKSEETITPWNFEEVVDKGASAQSFIERMTNFDKNLPNEKVLPKHSLLYEYFTVYNELTKVKYVTEGMRKPAFLSGEQKKAIVDLLFKTNRKVTVKQLKEDYFKKIECFDSVEISGVEDRFNASLGTYHDLLKIIKDKDFLDNEENEDILEDIVLTLTLFEDREMIEERLKTYAHLFDDKVMKQLKRRRYTGWGRLSRKLINGIRDKQSGKTILDFLKSDGFANRNFMQLIHDDSLTFKEDIQKAQVSGQGDSLHEHIANLAGSPAIKKGILQTVKVVDELVKVMGRHKPENIVIEMARENQTTQKGQKNSRERMKRIEEGIKELGSQILKEHPVENTQLQNEKLYLYYLQNGRDMYVDQELDINRLSDYDVDHIVPQSFLKDDSIDNKVLTRSDKARGKSDNVPSEEVVKKMKNYWRQLLNAKLITQRKFDNLTKAERGGLSELDKAGFIKRQLVETRQITKHVAQILDSRMNTKYDENDKLIREVKVITLKSKLVSDFRKDFQFYKVREINNYHHAHDAYLNAVVGTALIKKYPKLESEFVYGDYKVYDVRKMIAKSEQEIGKATAKYFFYSNIMNFFKTEITLANGEIRKRPLIETNGETGEIVWDKGRDFATVRKVLSMPQVNIVKKTEVQTGGFSKESILPKRNSDKLIARKKDWDPKKYGGFDSPTVAYSVLVVAKVEKGKSKKLKSVKELLGITIMERSSFEKNPIDFLEAKGYKEVKKDLIIKLPKYSLFELENGRKRMLASAGELQKGNELALPSKYVNFLYLASHYEKLKGSPEDNEQKQLFVEQHKHYLDEIIEQISEFSKRVILADANLDKVLSAYNKHRDKPIREQAENIIHLFTLTNLGAPAAFKYFDTTIDRKRYTSTKEVLDATLIHQSITGLYETRIDLSQLGGDGGPAPGGGGGTLNLEDEYRLYETSAEPEVSPGSTWLSDFPQAWAETGGMGLAVRQAPLIIPLKATSTPVSIKQYPMSQEAKLGIKPHIQRLLDQGILVPCQSPWNTPLLPVKKPGTNDYRPVQDLREVNKRVEDIHPTVPNPYNLLSGLPPSHRWYTVLDLKDAFFCLRLHPTSQPLFAFEWRDPGMGISGQLTWTRLPQGFKNSPTLFNEALHRDLADFRIQHPDLILLQYVDDILLAATSELDCQQGTRALLLTLGNLGYRASAKKAQLCQKQVKYLGYLLKEGQRWLTEARKETVMGQPTPKTPRQLREFLGTAGFCRLWIPGFAEMAAPLYPLTKPGTLFNWGPDQQKAYQEIKQALLTAPALGLPDLTKPFELFVDEKQGYAKGVLTQKLGPWRRPVAYLSKKLDPVAAGWPPCLRMVAAIAVLRKDAGKLTMGQPLVILAPHAVEALVKQPPDRWLSNARMTHYQAMLLDTDRVQFGPVVALNPATLLPLPEEGAPHDCLEILAETHGTRPDLTDQPIPDADHTWYTDGSSFLQEGQRKAGAAVTTETEVIWARALPAGTSAQRAELIALTQALKMAEGKRLNVYTDSRYAFATAHIHGEIYRRRGWLTSEGREIKNKSEILALLKALFLPKRLSIIHCLGHQKGDSAEARGNRLADQAAREAAIKTPPDTSTLLAGKRTADGSEFEKRTADGSEFESPKKKAKVE

SEQ ID NO: 1849 - protein, 2097 aa, synthetic construct
MPAAKRVKLDGGDKKYSIGLDIGTNSVGWAVITDEYKVPSKKFKVLGNTDRHSIKKNLIGALLFDSGETAEATRLKRTARRRYTRRKNRICYLQEIFSNEMAKVDDSFFHRLEESFLVEEDKKHERHPIFGNIVDEVAYHEKYPTIYHLRKKLVDSTDKADLRLIYLALAHMIKFRGHFLIEGDLNPDNSDVDKLFIQLVQTYNQLFEENPINASGVDAKAILSARLSKSRRLENLIAQLPGEKKNGLFGNLIALSLGLTPNFKSNFDLAEDAKLQLSKDTYDDDLDNLLAQIGDQYADLFLAAKNLSDAILLSDILRVNTEITKAPLSASMIKRYDEHHQDLTLLKALVRQQLPEKYKEIFFDQSKNGYAGYIDGGASQEEFYKFIKPILEKMDGTEELLVKLNREDLLRKQRTFDNGSIPHQIHLGELHAILRRQEDFYPFLKDNREKIEKILTFRIPYYVGPLARGNSRFAWMTRKSEETITPWNFEEVVDKGASAQSFIERMTNFDKNLPNEKVLPKHSLLYEYFTVYNELTKVKYVTEGMRKPAFLSGEQKKAIVDLLFKTNRKVTVKQLKEDYFKKIECFDSVEISGVEDRFNASLGTYHDLLKIIKDKDFLDNEENEDILEDIVLTLTLFEDREMIEERLKTYAHLFDDKVMKQLKRRRYTGWGRLSRKLINGIRDKQSGKTILDFLKSDGFANRNFMQLIHDDSLTFKEDIQKAQVSGQGDSLHEHIANLAGSPAIKKGILQTVKVVDELVKVMGRHKPENIVIEMARENQTTQKGQKNSRERMKRIEEGIKELGSQILKEHPVENTQLQNEKLYLYYLQNGRDMYVDQELDINRLSDYDVDHIVPQSFLKDDSIDNKVLTRSDKARGKSDNVPSEEVVKKMKNYWRQLLNAKLITQRKFDNLTKAERGGLSELDKAGFIKRQLVETRQITKHVAQILDSRMNTKYDENDKLIREVKVITLKSKLVSDFRKDFQFYKVREINNYHHAHDAYLNAVVGTALIKKYPKLESEFVYGDYKVYDVRKMIAKSEQEIGKATAKYFFYSNIMNFFKTEITLANGEIRKRPLIETNGETGEIVWDKGRDFATVRKVLSMPQVNIVKKTEVQTGGFSKESILPKRNSDKLIARKKDWDPKKYGGFDSPTVAYSVLVVAKVEKGKSKKLKSVKELLGITIMERSSFEKNPIDFLEAKGYKEVKKDLIIKLPKYSLFELENGRKRMLASAGELQKGNELALPSKYVNFLYLASHYEKLKGSPEDNEQKQLFVEQHKHYLDEIIEQISEFSKRVILADANLDKVLSAYNKHRDKPIREQAENIIHLFTLTNLGAPAAFKYFDTTIDRKRYTSTKEVLDATLIHQSITGLYETRIDLSQLGGDGGGGSGGSGGSGGSGGTLNLEDEYRLYETSAEPEVSPGSTWLSDFPQAWAETGGMGLAVRQAPLIIPLKATSTPVSIKQYPMSQEAKLGIKPHIQRLLDQGILVPCQSPWNTPLLPVKKPGTNDYRPVQDLREVNKRVEDIHPTVPNPYNLLSGLPPSHRWYTVLDLKDAFFCLRLHPTSQPLFAFEWRDPGMGISGQLTWTRLPQGFKNSPTLFNEALHRDLADFRIQHPDLILLQYVDDILLAATSELDCQQGTRALLLTLGNLGYRASAKKAQLCQKQVKYLGYLLKEGQRWLTEARKETVMGQPTPKTPRQLREFLGTAGFCRLWIPGFAEMAAPLYPLTKPGTLFNWGPDQQKAYQEIKQALLTAPALGLPDLTKPFELFVDEKQGYAKGVLTQKLGPWRRPVAYLSKKLDPVAAGWPPCLRMVAAIAVLRKDAGKLTMGQPLVILAPHAVEALVKQPPDRWLSNARMTHYQAMLLDTDRVQFGPVVALNPATLLPLPEEGAPHDCLEILAETHGTRPDLTDQPIPDADHTWYTDGSSFLQEGQRKAGAAVTTETEVIWARALPAGTSAQRAELIALTQALKMAEGKRLNVYTDSRYAFATAHIHGEIYRRRGWLTSEGREIKNKSEILALLKALFLPKRLSIIHCLGHQKGDSAEARGNRLADQAAREAAIKTPPDTSTLLAGKRTADGSEFEKRTADGSEFESPKKKAKVE

SEQ ID NO: 1850 - protein, 2096 aa, synthetic construct
MPAAKRVKLDGGDKKYSIGLDIGTNSVGWAVITDEYKVPSKKFKVLGNTDRHSIKKNLIGALLFDSGETAEATRLKRTARRRYTRRKNRICYLQEIFSNEMAKVDDSFFHRLEESFLVEEDKKHERHPIFGNIVDEVAYHEKYPTIYHLRKKLVDSTDKADLRLIYLALAHMIKFRGHFLIEGDLNPDNSDVDKLFIQLVQTYNQLFEENPINASGVDAKAILSARLSKSRRLENLIAQLPGEKKNGLFGNLIALSLGLTPNFKSNFDLAEDAKLQLSKDTYDDDLDNLLAQIGDQYADLFLAAKNLSDAILLSDILRVNTEITKAPLSASMIKRYDEHHQDLTLLKALVRQQLPEKYKEIFFDQSKNGYAGYIDGGASQEEFYKFIKPILEKMDGTEELLVKLNREDLLRKQRTFDNGSIPHQIHLGELHAILRRQEDFYPFLKDNREKIEKILTFRIPYYVGPLARGNSRFAWMTRKSEETITPWNFEEVVDKGASAQSFIERMTNFDKNLPNEKVLPKHSLLYEYFTVYNELTKVKYVTEGMRKPAFLSGEQKKAIVDLLFKTNRKVTVKQLKEDYFKKIECFDSVEISGVEDRFNASLGTYHDLLKIIKDKDFLDNEENEDILEDIVLTLTLFEDREMIEERLKTYAHLFDDKVMKQLKRRRYTGWGRLSRKLINGIRDKQSGKTILDFLKSDGFANRNFMQLIHDDSLTFKEDIQKAQVSGQGDSLHEHIANLAGSPAIKKGILQTVKVVDELVKVMGRHKPENIVIEMARENQTTQKGQKNSRERMKRIEEGIKELGSQILKEHPVENTQLQNEKLYLYYLQNGRDMYVDQELDINRLSDYDVDHIVPQSFLKDDSIDNKVLTRSDKARGKSDNVPSEEVVKKMKNYWRQLLNAKLITQRKFDNLTKAERGGLSELDKAGFIKRQLVETRQITKHVAQILDSRMNTKYDENDKLIREVKVITLKSKLVSDFRKDFQFYKVREINNYHHAHDAYLNAVVGTALIKKYPKLESEFVYGDYKVYDVRKMIAKSEQEIGKATAKYFFYSNIMNFFKTEITLANGEIRKRPLIETNGETGEIVWDKGRDFATVRKVLSMPQVNIVKKTEVQTGGFSKESILPKRNSDKLIARKKDWDPKKYGGFDSPTVAYSVLVVAKVEKGKSKKLKSVKELLGITIMERSSFEKNPIDFLEAKGYKEVKKDLIIKLPKYSLFELENGRKRMLASAGELQKGNELALPSKYVNFLYLASHYEKLKGSPEDNEQKQLFVEQHKHYLDEIIEQISEFSKRVILADANLDKVLSAYNKHRDKPIREQAENIIHLFTLTNLGAPAAFKYFDTTIDRKRYTSTKEVLDATLIHQSITGLYETRIDLSQLGGDGGGSSEAAAKGGGGGTLNLEDEYRLYETSAEPEVSPGSTWLSDFPQAWAETGGMGLAVRQAPLIIPLKATSTPVSIKQYPMSQEAKLGIKPHIQRLLDQGILVPCQSPWNTPLLPVKKPGTNDYRPVQDLREVNKRVEDIHPTVPNPYNLLSGLPPSHRWYTVLDLKDAFFCLRLHPTSQPLFAFEWRDPGMGISGQLTWTRLPQGFKNSPTLFNEALHRDLADFRIQHPDLILLQYVDDILLAATSELDCQQGTRALLLTLGNLGYRASAKKAQLCQKQVKYLGYLLKEGQRWLTEARKETVMGQPTPKTPRQLREFLGTAGFCRLWIPGFAEMAAPLYPLTKPGTLFNWGPDQQKAYQEIKQALLTAPALGLPDLTKPFELFVDEKQGYAKGVLTQKLGPWRRPVAYLSKKLDPVAAGWPPCLRMVAAIAVLRKDAGKLTMGQPLVILAPHAVEALVKQPPDRWLSNARMTHYQAMLLDTDRVQFGPVVALNPATLLPLPEEGAPHDCLEILAETHGTRPDLTDQPIPDADHTWYTDGSSFLQEGQRKAGAAVTTETEVIWARALPAGTSAQRAELIALTQALKMAEGKRLNVYTDSRYAFATAHIHGEIYRRRGWLTSEGREIKNKSEILALLKALFLPKRLSIIHCLGHQKGDSAEARGNRLADQAAREAAIKTPPDTSTLLAGKRTADGSEFEKRTADGSEFESPKKKAKVE

SEQ ID NO: 1851 - protein, 2096 aa, synthetic construct
MPAAKRVKLDGGDKKYSIGLDIGTNSVGWAVITDEYKVPSKKFKVLGNTDRHSIKKNLIGALLFDSGETAEATRLKRTARRRYTRRKNRICYLQEIFSNEMAKVDDSFFHRLEESFLVEEDKKHERHPIFGNIVDEVAYHEKYPTIYHLRKKLVDSTDKADLRLIYLALAHMIKFRGHFLIEGDLNPDNSDVDKLFIQLVQTYNQLFEENPINASGVDAKAILSARLSKSRRLENLIAQLPGEKKNGLFGNLIALSLGLTPNFKSNFDLAEDAKLQLSKDTYDDDLDNLLAQIGDQYADLFLAAKNLSDAILLSDILRVNTEITKAPLSASMIKRYDEHHQDLTLLKALVRQQLPEKYKEIFFDQSKNGYAGYIDGGASQEEFYKFIKPILEKMDGTEELLVKLNREDLLRKQRTFDNGSIPHQIHLGELHAILRRQEDFYPFLKDNREKIEKILTFRIPYYVGPLARGNSRFAWMTRKSEETITPWNFEEVVDKGASAQSFIERMTNFDKNLPNEKVLPKHSLLYEYFTVYNELTKVKYVTEGMRKPAFLSGEQKKAIVDLLFKTNRKVTVKQLKEDYFKKIECFDSVEISGVEDRFNASLGTYHDLLKIIKDKDFLDNEENEDILEDIVLTLTLFEDREMIEERLKTYAHLFDDKVMKQLKRRRYTGWGRLSRKLINGIRDKQSGKTILDFLKSDGFANRNFMQLIHDDSLTFKEDIQKAQVSGQGDSLHEHIANLAGSPAIKKGILQTVKVVDELVKVMGRHKPENIVIEMARENQTTQKGQKNSRERMKRIEEGIKELGSQILKEHPVENTQLQNEKLYLYYLQNGRDMYVDQELDINRLSDYDVDHIVPQSFLKDDSIDNKVLTRSDKARGKSDNVPSEEVVKKMKNYWRQLLNAKLITQRKFDNLTKAERGGLSELDKAGFIKRQLVETRQITKHVAQILDSRMNTKYDENDKLIREVKVITLKSKLVSDFRKDFQFYKVREINNYHHAHDAYLNAVVGTALIKKYPKLESEFVYGDYKVYDVRKMIAKSEQEIGKATAKYFFYSNIMNFFKTEITLANGEIRKRPLIETNGETGEIVWDKGRDFATVRKVLSMPQVNIVKKTEVQTGGFSKESILPKRNSDKLIARKKDWDPKKYGGFDSPTVAYSVLVVAKVEKGKSKKLKSVKELLGITIMERSSFEKNPIDFLEAKGYKEVKKDLIIKLPKYSLFELENGRKRMLASAGELQKGNELALPSKYVNFLYLASHYEKLKGSPEDNEQKQLFVEQHKHYLDEIIEQISEFSKRVILADANLDKVLSAYNKHRDKPIREQAENIIHLFTLTNLGAPAAFKYFDTTIDRKRYTSTKEVLDATLIHQSITGLYETRIDLSQLGGDGGEAAAKPAPGGSGGTLNLEDEYRLYETSAEPEVSPGSTWLSDFPQAWAETGGMGLAVRQAPLIIPLKATSTPVSIKQYPMSQEAKLGIKPHIQRLLDQGILVPCQSPWNTPLLPVKKPGTNDYRPVQDLREVNKRVEDIHPTVPNPYNLLSGLPPSHRWYTVLDLKDAFFCLRLHPTSQPLFAFEWRDPGMGISGQLTWTRLPQGFKNSPTLFNEALHRDLADFRIQHPDLILLQYVDDILLAATSELDCQQGTRALLLTLGNLGYRASAKKAQLCQKQVKYLGYLLKEGQRWLTEARKETVMGQPTPKTPRQLREFLGTAGFCRLWIPGFAEMAAPLYPLTKPGTLFNWGPDQQKAYQEIKQALLTAPALGLPDLTKPFELFVDEKQGYAKGVLTQKLGPWRRPVAYLSKKLDPVAAGWPPCLRMVAAIAVLRKDAGKLTMGQPLVILAPHAVEALVKQPPDRWLSNARMTHYQAMLLDTDRVQFGPVVALNPATLLPLPEEGAPHDCLEILAETHGTRPDLTDQPIPDADHTWYTDGSSFLQEGQRKAGAAVTTETEVIWARALPAGTSAQRAELIALTQALKMAEGKRLNVYTDSRYAFATAHIHGEIYRRRGWLTSEGREIKNKSEILALLKALFLPKRLSIIHCLGHQKGDSAEARGNRLADQAAREAAIKTPPDTSTLLAGKRTADGSEFEKRTADGSEFESPKKKAKVE

SEQ ID NO: 1852 - protein, 2094 aa, synthetic construct
MPAAKRVKLDGGDKKYSIGLDIGTNSVGWAVITDEYKVPSKKFKVLGNTDRHSIKKNLIGALLFDSGETAEATRLKRTARRRYTRRKNRICYLQEIFSNEMAKVDDSFFHRLEESFLVEEDKKHERHPIFGNIVDEVAYHEKYPTIYHLRKKLVDSTDKADLRLIYLALAHMIKFRGHFLIEGDLNPDNSDVDKLFIQLVQTYNQLFEENPINASGVDAKAILSARLSKSRRLENLIAQLPGEKKNGLFGNLIALSLGLTPNFKSNFDLAEDAKLQLSKDTYDDDLDNLLAQIGDQYADLFLAAKNLSDAILLSDILRVNTEITKAPLSASMIKRYDEHHQDLTLLKALVRQQLPEKYKEIFFDQSKNGYAGYIDGGASQEEFYKFIKPILEKMDGTEELLVKLNREDLLRKQRTFDNGSIPHQIHLGELHAILRRQEDFYPFLKDNREKIEKILTFRIPYYVGPLARGNSRFAWMTRKSEETITPWNFEEVVDKGASAQSFIERMTNFDKNLPNEKVLPKHSLLYEYFTVYNELTKVKYVTEGMRKPAFLSGEQKKAIVDLLFKTNRKVTVKQLKEDYFKKIECFDSVEISGVEDRFNASLGTYHDLLKIIKDKDFLDNEENEDILEDIVLTLTLFEDREMIEERLKTYAHLFDDKVMKQLKRRRYTGWGRLSRKLINGIRDKQSGKTILDFLKSDGFANRNFMQLIHDDSLTFKEDIQKAQVSGQGDSLHEHIANLAGSPAIKKGILQTVKVVDELVKVMGRHKPENIVIEMARENQTTQKGQKNSRERMKRIEEGIKELGSQILKEHPVENTQLQNEKLYLYYLQNGRDMYVDQELDINRLSDYDVDHIVPQSFLKDDSIDNKVLTRSDKARGKSDNVPSEEVVKKMKNYWRQLLNAKLITQRKFDNLTKAERGGLSELDKAGFIKRQLVETRQITKHVAQILDSRMNTKYDENDKLIREVKVITLKSKLVSDFRKDFQFYKVREINNYHHAHDAYLNAVVGTALIKKYPKLESEFVYGDYKVYDVRKMIAKSEQEIGKATAKYFFYSNIMNFFKTEITLANGEIRKRPLIETNGETGEIVWDKGRDFATVRKVLSMPQVNIVKKTEVQTGGFSKESILPKRNSDKLIARKKDWDPKKYGGFDSPTVAYSVLVVAKVEKGKSKKLKSVKELLGITIMERSSFEKNPIDFLEAKGYKEVKKDLIIKLPKYSLFELENGRKRMLASAGELQKGNELALPSKYVNFLYLASHYEKLKGSPEDNEQKQLFVEQHKHYLDEIIEQISEFSKRVILADANLDKVLSAYNKHRDKPIREQAENIIHLFTLTNLGAPAAFKYFDTTIDRKRYTSTKEVLDATLIHQSITGLYETRIDLSQLGGDGGPAPAPAPAPGGTLNLEDEYRLYETSAEPEVSPGSTWLSDFPQAWAETGGMGLAVRQAPLIIPLKATSTPVSIKQYPMSQEAKLGIKPHIQRLLDQGILVPCQSPWNTPLLPVKKPGTNDYRPVQDLREVNKRVEDIHPTVPNPYNLLSGLPPSHRWYTVLDLKDAFFCLRLHPTSQPLFAFEWRDPGMGISGQLTWTRLPQGFKNSPTLFNEALHRDLADFRIQHPDLILLQYVDDILLAATSELDCQQGTRALLLTLGNLGYRASAKKAQLCQKQVKYLGYLLKEGQRWLTEARKETVMGQPTPKTPRQLREFLGTAGFCRLWIPGFAEMAAPLYPLTKPGTLFNWGPDQQKAYQEIKQALLTAPALGLPDLTKPFELFVDEKQGYAKGVLTQKLGPWRRPVAYLSKKLDPVAAGWPPCLRMVAAIAVLRKDAGKLTMGQPLVILAPHAVEALVKQPPDRWLSNARMTHYQAMLLDTDRVQFGPVVALNPATLLPLPEEGAPHDCLEILAETHGTRPDLTDQPIPDADHTWYTDGSSFLQEGQRKAGAAVTTETEVIWARALPAGTSAQRAELIALTQALKMAEGKRLNVYTDSRYAFATAHIHGEIYRRRGWLTSEGREIKNKSEILALLKALFLPKRLSIIHCLGHQKGDSAEARGNRLADQAAREAAIKTPPDTSTLLAGKRTADGSEFEKRTADGSEFESPKKKAKVE

SEQ ID NO: 1853 - protein, 2091 aa, synthetic construct
MPAAKRVKLDGGDKKYSIGLDIGTNSVGWAVITDEYKVPSKKFKVLGNTDRHSIKKNLIGALLFDSGETAEATRLKRTARRRYTRRKNRICYLQEIFSNEMAKVDDSFFHRLEESFLVEEDKKHERHPIFGNIVDEVAYHEKYPTIYHLRKKLVDSTDKADLRLIYLALAHMIKFRGHFLIEGDLNPDNSDVDKLFIQLVQTYNQLFEENPINASGVDAKAILSARLSKSRRLENLIAQLPGEKKNGLFGNLIALSLGLTPNFKSNFDLAEDAKLQLSKDTYDDDLDNLLAQIGDQYADLFLAAKNLSDAILLSDILRVNTEITKAPLSASMIKRYDEHHQDLTLLKALVRQQLPEKYKEIFFDQSKNGYAGYIDGGASQEEFYKFIKPILEKMDGTEELLVKLNREDLLRKQRTFDNGSIPHQIHLGELHAILRRQEDFYPFLKDNREKIEKILTFRIPYYVGPLARGNSRFAWMTRKSEETITPWNFEEVVDKGASAQSFIERMTNFDKNLPNEKVLPKHSLLYEYFTVYNELTKVKYVTEGMRKPAFLSGEQKKAIVDLLFKTNRKVTVKQLKEDYFKKIECFDSVEISGVEDRFNASLGTYHDLLKIIKDKDFLDNEENEDILEDIVLTLTLFEDREMIEERLKTYAHLFDDKVMKQLKRRRYTGWGRLSRKLINGIRDKQSGKTILDFLKSDGFANRNFMQLIHDDSLTFKEDIQKAQVSGQGDSLHEHIANLAGSPAIKKGILQTVKVVDELVKVMGRHKPENIVIEMARENQTTQKGQKNSRERMKRIEEGIKELGSQILKEHPVENTQLQNEKLYLYYLQNGRDMYVDQELDINRLSDYDVDHIVPQSFLKDDSIDNKVLTRSDKARGKSDNVPSEEVVKKMKNYWRQLLNAKLITQRKFDNLTKAERGGLSELDKAGFIKRQLVETRQITKHVAQILDSRMNTKYDENDKLIREVKVITLKSKLVSDFRKDFQFYKVREINNYHHAHDAYLNAVVGTALIKKYPKLESEFVYGDYKVYDVRKMIAKSEQEIGKATAKYFFYSNIMNFFKTEITLANGEIRKRPLIETNGETGEIVWDKGRDFATVRKVLSMPQVNIVKKTEVQTGGFSKESILPKRNSDKLIARKKDWDPKKYGGFDSPTVAYSVLVVAKVEKGKSKKLKSVKELLGITIMERSSFEKNPIDFLEAKGYKEVKKDLIIKLPKYSLFELENGRKRMLASAGELQKGNELALPSKYVNFLYLASHYEKLKGSPEDNEQKQLFVEQHKHYLDEIIEQISEFSKRVILADANLDKVLSAYNKHRDKPIREQAENIIHLFTLTNLGAPAAFKYFDTTIDRKRYTSTKEVLDATLIHQSITGLYETRIDLSQLGGDGGGGGGSSGGTLNLEDEYRLYETSAEPEVSPGSTWLSDFPQAWAETGGMGLAVRQAPLIIPLKATSTPVSIKQYPMSQEAKLGIKPHIQRLLDQGILVPCQSPWNTPLLPVKKPGTNDYRPVQDLREVNKRVEDIHPTVPNPYNLLSGLPPSHRWYTVLDLKDAFFCLRLHPTSQPLFAFEWRDPGMGISGQLTWTRLPQGFKNSPTLFNEALHRDLADFRIQHPDLILLQYVDDILLAATSELDCQQGTRALLLTLGNLGYRASAKKAQLCQKQVKYLGYLLKEGQRWLTEARKETVMGQPTPKTPRQLREFLGTAGFCRLWIPGFAEMAAPLYPLTKPGTLFNWGPDQQKAYQEIKQALLTAPALGLPDLTKPFELFVDEKQGYAKGVLTQKLGPWRRPVAYLSKKLDPVAAGWPPCLRMVAAIAVLRKDAGKLTMGQPLVILAPHAVEALVKQPPDRWLSNARMTHYQAMLLDTDRVQFGPVVALNPATLLPLPEEGAPHDCLEILAETHGTRPDLTDQPIPDADHTWYTDGSSFLQEGQRKAGAAVTTETEVIWARALPAGTSAQRAELIALTQALKMAEGKRLNVYTDSRYAFATAHIHGEIYRRRGWLTSEGREIKNKSEILALLKALFLPKRLSIIHCLGHQKGDSAEARGNRLADQAAREAAIKTPPDTSTLLAGKRTADGSEFEKRTADGSEFESPKKKAKVE

SEQ ID NO: 1854 - protein, 2091 aa, synthetic construct
MPAAKRVKLDGGDKKYSIGLDIGTNSVGWAVITDEYKVPSKKFKVLGNTDRHSIKKNLIGALLFDSGETAEATRLKRTARRRYTRRKNRICYLQEIFSNEMAKVDDSFFHRLEESFLVEEDKKHERHPIFGNIVDEVAYHEKYPTIYHLRKKLVDSTDKADLRLIYLALAHMIKFRGHFLIEGDLNPDNSDVDKLFIQLVQTYNQLFEENPINASGVDAKAILSARLSKSRRLENLIAQLPGEKKNGLFGNLIALSLGLTPNFKSNFDLAEDAKLQLSKDTYDDDLDNLLAQIGDQYADLFLAAKNLSDAILLSDILRVNTEITKAPLSASMIKRYDEHHQDLTLLKALVRQQLPEKYKEIFFDQSKNGYAGYIDGGASQEEFYKFIKPILEKMDGTEELLVKLNREDLLRKQRTFDNGSIPHQIHLGELHAILRRQEDFYPFLKDNREKIEKILTFRIPYYVGPLARGNSRFAWMTRKSEETITPWNFEEVVDKGASAQSFIERMTNFDKNLPNEKVLPKHSLLYEYFTVYNELTKVKYVTEGMRKPAFLSGEQKKAIVDLLFKTNRKVTVKQLKEDYFKKIECFDSVEISGVEDRFNASLGTYHDLLKIIKDKDFLDNEENEDILEDIVLTLTLFEDREMIEERLKTYAHLFDDKVMKQLKRRRYTGWGRLSRKLINGIRDKQSGKTILDFLKSDGFANRNFMQLIHDDSLTFKEDIQKAQVSGQGDSLHEHIANLAGSPAIKKGILQTVKVVDELVKVMGRHKPENIVIEMARENQTTQKGQKNSRERMKRIEEGIKELGSQILKEHPVENTQLQNEKLYLYYLQNGRDMYVDQELDINRLSDYDVDHIVPQSFLKDDSIDNKVLTRSDKARGKSDNVPSEEVVKKMKNYWRQLLNAKLITQRKFDNLTKAERGGLSELDKAGFIKRQLVETRQITKHVAQILDSRMNTKYDENDKLIREVKVITLKSKLVSDFRKDFQFYKVREINNYHHAHDAYLNAVVGTALIKKYPKLESEFVYGDYKVYDVRKMIAKSEQEIGKATAKYFFYSNIMNFFKTEITLANGEIRKRPLIETNGETGEIVWDKGRDFATVRKVLSMPQVNIVKKTEVQTGGFSKESILPKRNSDKLIARKKDWDPKKYGGFDSPTVAYSVLVVAKVEKGKSKKLKSVKELLGITIMERSSFEKNPIDFLEAKGYKEVKKDLIIKLPKYSLFELENGRKRMLASAGELQKGNELALPSKYVNFLYLASHYEKLKGSPEDNEQKQLFVEQHKHYLDEIIEQISEFSKRVILADANLDKVLSAYNKHRDKPIREQAENIIHLFTLTNLGAPAAFKYFDTTIDRKRYTSTKEVLDATLIHQSITGLYETRIDLSQLGGDGGGGGPAPGGTLNLEDEYRLYETSAEPEVSPGSTWLSDFPQAWAETGGMGLAVRQAPLIIPLKATSTPVSIKQYPMSQEAKLGIKPHIQRLLDQGILVPCQSPWNTPLLPVKKPGTNDYRPVQDLREVNKRVEDIHPTVPNPYNLLSGLPPSHRWYTVLDLKDAFFCLRLHPTSQPLFAFEWRDPGMGISGQLTWTRLPQGFKNSPTLFNEALHRDLADFRIQHPDLILLQYVDDILLAATSELDCQQGTRALLLTLGNLGYRASAKKAQLCQKQVKYLGYLLKEGQRWLTEARKETVMGQPTPKTPRQLREFLGTAGFCRLWIPGFAEMAAPLYPLTKPGTLFNWGPDQQKAYQEIKQALLTAPALGLPDLTKPFELFVDEKQGYAKGVLTQKLGPWRRPVAYLSKKLDPVAAGWPPCLRMVAAIAVLRKDAGKLTMGQPLVILAPHAVEALVKQPPDRWLSNARMTHYQAMLLDTDRVQFGPVVALNPATLLPLPEEGAPHDCLEILAETHGTRPDLTDQPIPDADHTWYTDGSSFLQEGQRKAGAAVTTETEVIWARALPAGTSAQRAELIALTQALKMAEGKRLNVYTDSRYAFATAHIHGEIYRRRGWLTSEGREIKNKSEILALLKALFLPKRLSIIHCLGHQKGDSAEARGNRLADQAAREAAIKTPPDTSTLLAGKRTADGSEFEKRTADGSEFESPKKKAKVE

SEQ ID NO: 1855 - protein, 2090 aa, synthetic construct
MPAAKRVKLDGGDKKYSIGLDIGTNSVGWAVITDEYKVPSKKFKVLGNTDRHSIKKNLIGALLFDSGETAEATRLKRTARRRYTRRKNRICYLQEIFSNEMAKVDDSFFHRLEESFLVEEDKKHERHPIFGNIVDEVAYHEKYPTIYHLRKKLVDSTDKADLRLIYLALAHMIKFRGHFLIEGDLNPDNSDVDKLFIQLVQTYNQLFEENPINASGVDAKAILSARLSKSRRLENLIAQLPGEKKNGLFGNLIALSLGLTPNFKSNFDLAEDAKLQLSKDTYDDDLDNLLAQIGDQYADLFLAAKNLSDAILLSDILRVNTEITKAPLSASMIKRYDEHHQDLTLLKALVRQQLPEKYKEIFFDQSKNGYAGYIDGGASQEEFYKFIKPILEKMDGTEELLVKLNREDLLRKQRTFDNGSIPHQIHLGELHAILRRQEDFYPFLKDNREKIEKILTFRIPYYVGPLARGNSRFAWMTRKSEETITPWNFEEVVDKGASAQSFIERMTNFDKNLPNEKVLPKHSLLYEYFTVYNELTKVKYVTEGMRKPAFLSGEQKKAIVDLLFKTNRKVTVKQLKEDYFKKIECFDSVEISGVEDRFNASLGTYHDLLKIIKDKDFLDNEENEDILEDIVLTLTLFEDREMIEERLKTYAHLFDDKVMKQLKRRRYTGWGRLSRKLINGIRDKQSGKTILDFLKSDGFANRNFMQLIHDDSLTFKEDIQKAQVSGQGDSLHEHIANLAGSPAIKKGILQTVKVVDELVKVMGRHKPENIVIEMARENQTTQKGQKNSRERMKRIEEGIKELGSQILKEHPVENTQLQNEKLYLYYLQNGRDMYVDQELDINRLSDYDVDHIVPQSFLKDDSIDNKVLTRSDKARGKSDNVPSEEVVKKMKNYWRQLLNAKLITQRKFDNLTKAERGGLSELDKAGFIKRQLVETRQITKHVAQILDSRMNTKYDENDKLIREVKVITLKSKLVSDFRKDFQFYKVREINNYHHAHDAYLNAVVGTALIKKYPKLESEFVYGDYKVYDVRKMIAKSEQEIGKATAKYFFYSNIMNFFKTEITLANGEIRKRPLIETNGETGEIVWDKGRDFATVRKVLSMPQVNIVKKTEVQTGGFSKESILPKRNSDKLIARKKDWDPKKYGGFDSPTVAYSVLVVAKVEKGKSKKLKSVKELLGITIMERSSFEKNPIDFLEAKGYKEVKKDLIIKLPKYSLFELENGRKRMLASAGELQKGNELALPSKYVNFLYLASHYEKLKGSPEDNEQKQLFVEQHKHYLDEIIEQISEFSKRVILADANLDKVLSAYNKHRDKPIREQAENIIHLFTLTNLGAPAAFKYFDTTIDRKRYTSTKEVLDATLIHQSITGLYETRIDLSQLGGDGGPAPAPGGTLNLEDEYRLYETSAEPEVSPGSTWLSDFPQAWAETGGMGLAVRQAPLIIPLKATSTPVSIKQYPMSQEAKLGIKPHIQRLLDQGILVPCQSPWNTPLLPVKKPGTNDYRPVQDLREVNKRVEDIHPTVPNPYNLLSGLPPSHRWYTVLDLKDAFFCLRLHPTSQPLFAFEWRDPGMGISGQLTWTRLPQGFKNSPTLFNEALHRDLADFRIQHPDLILLQYVDDILLAATSELDCQQGTRALLLTLGNLGYRASAKKAQLCQKQVKYLGYLLKEGQRWLTEARKETVMGQPTPKTPRQLREFLGTAGFCRLWIPGFAEMAAPLYPLTKPGTLFNWGPDQQKAYQEIKQALLTAPALGLPDLTKPFELFVDEKQGYAKGVLTQKLGPWRRPVAYLSKKLDPVAAGWPPCLRMVAAIAVLRKDAGKLTMGQPLVILAPHAVEALVKQPPDRWLSNARMTHYQAMLLDTDRVQFGPVVALNPATLLPLPEEGAPHDCLEILAETHGTRPDLTDQPIPDADHTWYTDGSSFLQEGQRKAGAAVTTETEVIWARALPAGTSAQRAELIALTQALKMAEGKRLNVYTDSRYAFATAHIHGEIYRRRGWLTSEGREIKNKSEILALLKALFLPKRLSIIHCLGHQKGDSAEARGNRLADQAAREAAIKTPPDTSTLLAGKRTADGSEFEKRTADGSEFESPKKKAKVE

SEQ ID NO: 1856 - protein, 2096 aa, synthetic construct
MPAAKRVKLDGGDKKYSIGLDIGTNSVGWAVITDEYKVPSKKFKVLGNTDRHSIKKNLIGALLFDSGETAEATRLKRTARRRYTRRKNRICYLQEIFSNEMAKVDDSFFHRLEESFLVEEDKKHERHPIFGNIVDEVAYHEKYPTIYHLRKKLVDSTDKADLRLIYLALAHMIKFRGHFLIEGDLNPDNSDVDKLFIQLVQTYNQLFEENPINASGVDAKAILSARLSKSRRLENLIAQLPGEKKNGLFGNLIALSLGLTPNFKSNFDLAEDAKLQLSKDTYDDDLDNLLAQIGDQYADLFLAAKNLSDAILLSDILRVNTEITKAPLSASMIKRYDEHHQDLTLLKALVRQQLPEKYKEIFFDQSKNGYAGYIDGGASQEEFYKFIKPILEKMDGTEELLVKLNREDLLRKQRTFDNGSIPHQIHLGELHAILRRQEDFYPFLKDNREKIEKILTFRIPYYVGPLARGNSRFAWMTRKSEETITPWNFEEVVDKGASAQSFIERMTNFDKNLPNEKVLPKHSLLYEYFTVYNELTKVKYVTEGMRKPAFLSGEQKKAIVDLLFKTNRKVTVKQLKEDYFKKIECFDSVEISGVEDRFNASLGTYHDLLKIIKDKDFLDNEENEDILEDIVLTLTLFEDREMIEERLKTYAHLFDDKVMKQLKRRRYTGWGRLSRKLINGIRDKQSGKTILDFLKSDGFANRNFMQLIHDDSLTFKEDIQKAQVSGQGDSLHEHIANLAGSPAIKKGILQTVKVVDELVKVMGRHKPENIVIEMARENQTTQKGQKNSRERMKRIEEGIKELGSQILKEHPVENTQLQNEKLYLYYLQNGRDMYVDQELDINRLSDYDVDHIVPQSFLKDDSIDNKVLTRSDKARGKSDNVPSEEVVKKMKNYWRQLLNAKLITQRKFDNLTKAERGGLSELDKAGFIKRQLVETRQITKHVAQILDSRMNTKYDENDKLIREVKVITLKSKLVSDFRKDFQFYKVREINNYHHAHDAYLNAVVGTALIKKYPKLESEFVYGDYKVYDVRKMIAKSEQEIGKATAKYFFYSNIMNFFKTEITLANGEIRKRPLIETNGETGEIVWDKGRDFATVRKVLSMPQVNIVKKTEVQTGGFSKESILPKRNSDKLIARKKDWDPKKYGGFDSPTVAYSVLVVAKVEKGKSKKLKSVKELLGITIMERSSFEKNPIDFLEAKGYKEVKKDLIIKLPKYSLFELENGRKRMLASAGELQKGNELALPSKYVNFLYLASHYEKLKGSPEDNEQKQLFVEQHKHYLDEIIEQISEFSKRVILADANLDKVLSAYNKHRDKPIREQAENIIHLFTLTNLGAPAAFKYFDTTIDRKRYTSTKEVLDATLIHQSITGLYETRIDLSQLGGDGGPAPGGGEAAAKGGTLNLEDEYRLYETSAEPEVSPGSTWLSDFPQAWAETGGMGLAVRQAPLIIPLKATSTPVSIKQYPMSQEAKLGIKPHIQRLLDQGILVPCQSPWNTPLLPVKKPGTNDYRPVQDLREVNKRVEDIHPTVPNPYNLLSGLPPSHRWYTVLDLKDAFFCLRLHPTSQPLFAFEWRDPGMGISGQLTWTRLPQGFKNSPTLFNEALHRDLADFRIQHPDLILLQYVDDILLAATSELDCQQGTRALLLTLGNLGYRASAKKAQLCQKQVKYLGYLLKEGQRWLTEARKETVMGQPTPKTPRQLREFLGKAGFCRLFIPGFAEMAAPLYPLTKPGTLFNWGPDQQKAYQEIKQALLTAPALGLPDLTKPFELFVDEKQGYAKGVLTQKLGPWRRPVAYLSKKLDPVAAGWPPCLRMVAAIAVLRKDAGKLTMGQPLVILAPHAVEALVKQPPDRWLSNARMTHYQAMLLDTDRVQFGPVVALNPATLLPLPEEGAPHDCLEILAETHGTRPDLTDQPIPDADHTWYTDGSSFLQEGQRKAGAAVTTETEVIWARALPAGTSAQRAELIALTQALKMAEGKRLNVYTDSRYAFATAHIHGEIYRRRGWLTSEGREIKNKSEILALLKALFLPKRLSIIHCLGHQKGDSAEARGNRLADQAAREAAIKTPPDTSTLLAGKRTADGSEFEKRTADGSEFESPKKKAKVE

SEQ ID NO: 1857 - protein, 2094 aa, synthetic construct
MPAAKRVKLDGGDKKYSIGLDIGTNSVGWAVITDEYKVPSKKFKVLGNTDRHSIKKNLIGALLFDSGETAEATRLKRTARRRYTRRKNRICYLQEIFSNEMAKVDDSFFHRLEESFLVEEDKKHERHPIFGNIVDEVAYHEKYPTIYHLRKKLVDSTDKADLRLIYLALAHMIKFRGHFLIEGDLNPDNSDVDKLFIQLVQTYNQLFEENPINASGVDAKAILSARLSKSRRLENLIAQLPGEKKNGLFGNLIALSLGLTPNFKSNFDLAEDAKLQLSKDTYDDDLDNLLAQIGDQYADLFLAAKNLSDAILLSDILRVNTEITKAPLSASMIKRYDEHHQDLTLLKALVRQQLPEKYKEIFFDQSKNGYAGYIDGGASQEEFYKFIKPILEKMDGTEELLVKLNREDLLRKQRTFDNGSIPHQIHLGELHAILRRQEDFYPFLKDNREKIEKILTFRIPYYVGPLARGNSRFAWMTRKSEETITPWNFEEVVDKGASAQSFIERMTNFDKNLPNEKVLPKHSLLYEYFTVYNELTKVKYVTEGMRKPAFLSGEQKKAIVDLLFKTNRKVTVKQLKEDYFKKIECFDSVEISGVEDRFNASLGTYHDLLKIIKDKDFLDNEENEDILEDIVLTLTLFEDREMIEERLKTYAHLFDDKVMKQLKRRRYTGWGRLSRKLINGIRDKQSGKTILDFLKSDGFANRNFMQLIHDDSLTFKEDIQKAQVSGQGDSLHEHIANLAGSPAIKKGILQTVKVVDELVKVMGRHKPENIVIEMARENQTTQKGQKNSRERMKRIEEGIKELGSQILKEHPVENTQLQNEKLYLYYLQNGRDMYVDQELDINRLSDYDVDHIVPQSFLKDDSIDNKVLTRSDKARGKSDNVPSEEVVKKMKNYWRQLLNAKLITQRKFDNLTKAERGGLSELDKAGFIKRQLVETRQITKHVAQILDSRMNTKYDENDKLIREVKVITLKSKLVSDFRKDFQFYKVREINNYHHAHDAYLNAVVGTALIKKYPKLESEFVYGDYKVYDVRKMIAKSEQEIGKATAKYFFYSNIMNFFKTEITLANGEIRKRPLIETNGETGEIVWDKGRDFATVRKVLSMPQVNIVKKTEVQTGGFSKESILPKRNSDKLIARKKDWDPKKYGGFDSPTVAYSVLVVAKVEKGKSKKLKSVKELLGITIMERSSFEKNPIDFLEAKGYKEVKKDLIIKLPKYSLFELENGRKRMLASAGELQKGNELALPSKYVNFLYLASHYEKLKGSPEDNEQKQLFVEQHKHYLDEIIEQISEFSKRVILADANLDKVLSAYNKHRDKPIREQAENIIHLFTLTNLGAPAAFKYFDTTIDRKRYTSTKEVLDATLIHQSITGLYETRIDLSQLGGDGGGGGPAPGSSGGTLNLEDEYRLYETSAEPEVSPGSTWLSDFPQAWAETGGMGLAVRQAPLIIPLKATSTPVSIKQYPMSQEAKLGIKPHIQRLLDQGILVPCQSPWNTPLLPVKKPGTNDYRPVQDLREVNKRVEDIHPTVPNPYNLLSGLPPSHRWYTVLDLKDAFFCLRLHPTSQPLFAFEWRDPGMGISGQLTWTRLPQGFKNSPTLFNEALHRDLADFRIQHPDLILLQYVDDILLAATSELDCQQGTRALLLTLGNLGYRASAKKAQLCQKQVKYLGYLLKEGQRWLTEARKETVMGQPTPKTPRQLREFLGKAGFCRLFIPGFAEMAAPLYPLTKPGTLFNWGPDQQKAYQEIKQALLTAPALGLPDLTKPFELFVDEKQGYAKGVLTQKLGPWRRPVAYLSKKLDPVAAGWPPCLRMVAAIAVLRKDAGKLTMGQPLVILAPHAVEALVKQPPDRWLSNARMTHYQAMLLDTDRVQFGPVVALNPATLLPLPEEGAPHDCLEILAETHGTRPDLTDQPIPDADHTWYTDGSSFLQEGQRKAGAAVTTETEVIWARALPAGTSAQRAELIALTQALKMAEGKRLNVYTDSRYAFATAHIHGEIYRRRGWLTSEGREIKNKSEILALLKALFLPKRLSIIHCLGHQKGDSAEARGNRLADQAAREAAIKTPPDTSTLLAGKRTADGSEFEKRTADGSEFESPKKKAKVE

SEQ ID NO: 1858 - protein, 2093 aa, synthetic construct
MPAAKRVKLDGGDKKYSIGLDIGTNSVGWAVITDEYKVPSKKFKVLGNTDRHSIKKNLIGALLFDSGETAEATRLKRTARRRYTRRKNRICYLQEIFSNEMAKVDDSFFHRLEESFLVEEDKKHERHPIFGNIVDEVAYHEKYPTIYHLRKKLVDSTDKADLRLIYLALAHMIKFRGHFLIEGDLNPDNSDVDKLFIQLVQTYNQLFEENPINASGVDAKAILSARLSKSRRLENLIAQLPGEKKNGLFGNLIALSLGLTPNFKSNFDLAEDAKLQLSKDTYDDDLDNLLAQIGDQYADLFLAAKNLSDAILLSDILRVNTEITKAPLSASMIKRYDEHHQDLTLLKALVRQQLPEKYKEIFFDQSKNGYAGYIDGGASQEEFYKFIKPILEKMDGTEELLVKLNREDLLRKQRTFDNGSIPHQIHLGELHAILRRQEDFYPFLKDNREKIEKILTFRIPYYVGPLARGNSRFAWMTRKSEETITPWNFEEVVDKGASAQSFIERMTNFDKNLPNEKVLPKHSLLYEYFTVYNELTKVKYVTEGMRKPAFLSGEQKKAIVDLLFKTNRKVTVKQLKEDYFKKIECFDSVEISGVEDRFNASLGTYHDLLKIIKDKDFLDNEENEDILEDIVLTLTLFEDREMIEERLKTYAHLFDDKVMKQLKRRRYTGWGRLSRKLINGIRDKQSGKTILDFLKSDGFANRNFMQLIHDDSLTFKEDIQKAQVSGQGDSLHEHIANLAGSPAIKKGILQTVKVVDELVKVMGRHKPENIVIEMARENQTTQKGQKNSRERMKRIEEGIKELGSQILKEHPVENTQLQNEKLYLYYLQNGRDMYVDQELDINRLSDYDVDHIVPQSFLKDDSIDNKVLTRSDKARGKSDNVPSEEVVKKMKNYWRQLLNAKLITQRKFDNLTKAERGGLSELDKAGFIKRQLVETRQITKHVAQILDSRMNTKYDENDKLIREVKVITLKSKLVSDFRKDFQFYKVREINNYHHAHDAYLNAVVGTALIKKYPKLESEFVYGDYKVYDVRKMIAKSEQEIGKATAKYFFYSNIMNFFKTEITLANGEIRKRPLIETNGETGEIVWDKGRDFATVRKVLSMPQVNIVKKTEVQTGGFSKESILPKRNSDKLIARKKDWDPKKYGGFDSPTVAYSVLVVAKVEKGKSKKLKSVKELLGITIMERSSFEKNPIDFLEAKGYKEVKKDLIIKLPKYSLFELENGRKRMLASAGELQKGNELALPSKYVNFLYLASHYEKLKGSPEDNEQKQLFVEQHKHYLDEIIEQISEFSKRVILADANLDKVLSAYNKHRDKPIREQAENIIHLFTLTNLGAPAAFKYFDTTIDRKRYTSTKEVLDATLIHQSITGLYETRIDLSQLGGDGGPAPEAAAKGGTLNLEDEYRLYETSAEPEVSPGSTWLSDFPQAWAETGGMGLAVRQAPLIIPLKATSTPVSIKQYPMSQEAKLGIKPHIQRLLDQGILVPCQSPWNTPLLPVKKPGTNDYRPVQDLREVNKRVEDIHPTVPNPYNLLSGLPPSHRWYTVLDLKDAFFCLRLHPTSQPLFAFEWRDPGMGISGQLTWTRLPQGFKNSPTLFNEALHRDLADFRIQHPDLILLQYVDDILLAATSELDCQQGTRALLLTLGNLGYRASAKKAQLCQKQVKYLGYLLKEGQRWLTEARKETVMGQPTPKTPRQLREFLGKAGFCRLFIPGFAEMAAPLYPLTKPGTLFNWGPDQQKAYQEIKQALLTAPALGLPDLTKPFELFVDEKQGYAKGVLTQKLGPWRRPVAYLSKKLDPVAAGWPPCLRMVAAIAVLRKDAGKLTMGQPLVILAPHAVEALVKQPPDRWLSNARMTHYQAMLLDTDRVQFGPVVALNPATLLPLPEEGAPHDCLEILAETHGTRPDLTDQPIPDADHTWYTDGSSFLQEGQRKAGAAVTTETEVIWARALPAGTSAQRAELIALTQALKMAEGKRLNVYTDSRYAFATAHIHGEIYRRRGWLTSEGREIKNKSEILALLKALFLPKRLSIIHCLGHQKGDSAEARGNRLADQAAREAAIKTPPDTSTLLAGKRTADGSEFEKRTADGSEFESPKKKAKVE

SEQ ID NO: 1859 - protein, 2096 aa, synthetic construct
MPAAKRVKLDGGDKKYSIGLDIGTNSVGWAVITDEYKVPSKKFKVLGNTDRHSIKKNLIGALLFDSGETAEATRLKRTARRRYTRRKNRICYLQEIFSNEMAKVDDSFFHRLEESFLVEEDKKHERHPIFGNIVDEVAYHEKYPTIYHLRKKLVDSTDKADLRLIYLALAHMIKFRGHFLIEGDLNPDNSDVDKLFIQLVQTYNQLFEENPINASGVDAKAILSARLSKSRRLENLIAQLPGEKKNGLFGNLIALSLGLTPNFKSNFDLAEDAKLQLSKDTYDDDLDNLLAQIGDQYADLFLAAKNLSDAILLSDILRVNTEITKAPLSASMIKRYDEHHQDLTLLKALVRQQLPEKYKEIFFDQSKNGYAGYIDGGASQEEFYKFIKPILEKMDGTEELLVKLNREDLLRKQRTFDNGSIPHQIHLGELHAILRRQEDFYPFLKDNREKIEKILTFRIPYYVGPLARGNSRFAWMTRKSEETITPWNFEEVVDKGASAQSFIERMTNFDKNLPNEKVLPKHSLLYEYFTVYNELTKVKYVTEGMRKPAFLSGEQKKAIVDLLFKTNRKVTVKQLKEDYFKKIECFDSVEISGVEDRFNASLGTYHDLLKIIKDKDFLDNEENEDILEDIVLTLTLFEDREMIEERLKTYAHLFDDKVMKQLKRRRYTGWGRLSRKLINGIRDKQSGKTILDFLKSDGFANRNFMQLIHDDSLTFKEDIQKAQVSGQGDSLHEHIANLAGSPAIKKGILQTVKVVDELVKVMGRHKPENIVIEMARENQTTQKGQKNSRERMKRIEEGIKELGSQILKEHPVENTQLQNEKLYLYYLQNGRDMYVDQELDINRLSDYDVDHIVPQSFLKDDSIDNKVLTRSDKARGKSDNVPSEEVVKKMKNYWRQLLNAKLITQRKFDNLTKAERGGLSELDKAGFIKRQLVETRQITKHVAQILDSRMNTKYDENDKLIREVKVITLKSKLVSDFRKDFQFYKVREINNYHHAHDAYLNAVVGTALIKKYPKLESEFVYGDYKVYDVRKMIAKSEQEIGKATAKYFFYSNIMNFFKTEITLANGEIRKRPLIETNGETGEIVWDKGRDFATVRKVLSMPQVNIVKKTEVQTGGFSKESILPKRNSDKLIARKKDWDPKKYGGFDSPTVAYSVLVVAKVEKGKSKKLKSVKELLGITIMERSSFEKNPIDFLEAKGYKEVKKDLIIKLPKYSLFELENGRKRMLASAGELQKGNELALPSKYVNFLYLASHYEKLKGSPEDNEQKQLFVEQHKHYLDEIIEQISEFSKRVILADANLDKVLSAYNKHRDKPIREQAENIIHLFTLTNLGAPAAFKYFDTTIDRKRYTSTKEVLDATLIHQSITGLYETRIDLSQLGGDGGGGSEAAAKGSSGGTLNLEDEYRLYETSAEPEVSPGSTWLSDFPQAWAETGGMGLAVRQAPLIIPLKATSTPVSIKQYPMSQEAKLGIKPHIQRLLDQGILVPCQSPWNTPLLPVKKPGTNDYRPVQDLREVNKRVEDIHPTVPNPYNLLSGLPPSHRWYTVLDLKDAFFCLRLHPTSQPLFAFEWRDPGMGISGQLTWTRLPQGFKNSPTLFNEALHRDLADFRIQHPDLILLQYVDDILLAATSELDCQQGTRALLLTLGNLGYRASAKKAQLCQKQVKYLGYLLKEGQRWLTEARKETVMGQPTPKTPRQLREFLGKAGFCRLFIPGFAEMAAPLYPLTKPGTLFNWGPDQQKAYQEIKQALLTAPALGLPDLTKPFELFVDEKQGYAKGVLTQKLGPWRRPVAYLSKKLDPVAAGWPPCLRMVAAIAVLRKDAGKLTMGQPLVILAPHAVEALVKQPPDRWLSNARMTHYQAMLLDTDRVQFGPVVALNPATLLPLPEEGAPHDCLEILAETHGTRPDLTDQPIPDADHTWYTDGSSFLQEGQRKAGAAVTTETEVIWARALPAGTSAQRAELIALTQALKMAEGKRLNVYTDSRYAFATAHIHGEIYRRRGWLTSEGREIKNKSEILALLKALFLPKRLSIIHCLGHQKGDSAEARGNRLADQAAREAAIKTPPDTSTLLAGKRTADGSEFEKRTADGSEFESPKKKAKVE

SEQ ID NO: 1860 - protein, 2100 aa, synthetic construct
MPAAKRVKLDGGDKKYSIGLDIGTNSVGWAVITDEYKVPSKKFKVLGNTDRHSIKKNLIGALLFDSGETAEATRLKRTARRRYTRRKNRICYLQEIFSNEMAKVDDSFFHRLEESFLVEEDKKHERHPIFGNIVDEVAYHEKYPTIYHLRKKLVDSTDKADLRLIYLALAHMIKFRGHFLIEGDLNPDNSDVDKLFIQLVQTYNQLFEENPINASGVDAKAILSARLSKSRRLENLIAQLPGEKKNGLFGNLIALSLGLTPNFKSNFDLAEDAKLQLSKDTYDDDLDNLLAQIGDQYADLFLAAKNLSDAILLSDILRVNTEITKAPLSASMIKRYDEHHQDLTLLKALVRQQLPEKYKEIFFDQSKNGYAGYIDGGASQEEFYKFIKPILEKMDGTEELLVKLNREDLLRKQRTFDNGSIPHQIHLGELHAILRRQEDFYPFLKDNREKIEKILTFRIPYYVGPLARGNSRFAWMTRKSEETITPWNFEEVVDKGASAQSFIERMTNFDKNLPNEKVLPKHSLLYEYFTVYNELTKVKYVTEGMRKPAFLSGEQKKAIVDLLFKTNRKVTVKQLKEDYFKKIECFDSVEISGVEDRFNASLGTYHDLLKIIKDKDFLDNEENEDILEDIVLTLTLFEDREMIEERLKTYAHLFDDKVMKQLKRRRYTGWGRLSRKLINGIRDKQSGKTILDFLKSDGFANRNFMQLIHDDSLTFKEDIQKAQVSGQGDSLHEHIANLAGSPAIKKGILQTVKVVDELVKVMGRHKPENIVIEMARENQTTQKGQKNSRERMKRIEEGIKELGSQILKEHPVENTQLQNEKLYLYYLQNGRDMYVDQELDINRLSDYDVDHIVPQSFLKDDSIDNKVLTRSDKARGKSDNVPSEEVVKKMKNYWRQLLNAKLITQRKFDNLTKAERGGLSELDKAGFIKRQLVETRQITKHVAQILDSRMNTKYDENDKLIREVKVITLKSKLVSDFRKDFQFYKVREINNYHHAHDAYLNAVVGTALIKKYPKLESEFVYGDYKVYDVRKMIAKSEQEIGKATAKYFFYSNIMNFFKTEITLANGEIRKRPLIETNGETGEIVWDKGRDFATVRKVLSMPQVNIVKKTEVQTGGFSKESILPKRNSDKLIARKKDWDPKKYGGFDSPTVAYSVLVVAKVEKGKSKKLKSVKELLGITIMERSSFEKNPIDFLEAKGYKEVKKDLIIKLPKYSLFELENGRKRMLASAGELQKGNELALPSKYVNFLYLASHYEKLKGSPEDNEQKQLFVEQHKHYLDEIIEQISEFSKRVILADANLDKVLSAYNKHRDKPIREQAENIIHLFTLTNLGAPAAFKYFDTTIDRKRYTSTKEVLDATLIHQSITGLYETRIDLSQLGGDGGEAAAKGGGGSEAAAKGGTLNLEDEYRLYETSAEPEVSPGSTWLSDFPQAWAETGGMGLAVRQAPLIIPLKATSTPVSIKQYPMSQEAKLGIKPHIQRLLDQGILVPCQSPWNTPLLPVKKPGTNDYRPVQDLREVNKRVEDIHPTVPNPYNLLSGLPPSHRWYTVLDLKDAFFCLRLHPTSQPLFAFEWRDPGMGISGQLTWTRLPQGFKNSPTLFNEALHRDLADFRIQHPDLILLQYVDDILLAATSELDCQQGTRALLLTLGNLGYRASAKKAQLCQKQVKYLGYLLKEGQRWLTEARKETVMGQPTPKTPRQLREFLGKAGFCRLFIPGFAEMAAPLYPLTKPGTLFNWGPDQQKAYQEIKQALLTAPALGLPDLTKPFELFVDEKQGYAKGVLTQKLGPWRRPVAYLSKKLDPVAAGWPPCLRMVAAIAVLRKDAGKLTMGQPLVILAPHAVEALVKQPPDRWLSNARMTHYQAMLLDTDRVQFGPVVALNPATLLPLPEEGAPHDCLEILAETHGTRPDLTDQPIPDADHTWYTDGSSFLQEGQRKAGAAVTTETEVIWARALPAGTSAQRAELIALTQALKMAEGKRLNVYTDSRYAFATAHIHGEIYRRRGWLTSEGREIKNKSEILALLKALFLPKRLSIIHCLGHQKGDSAEARGNRLADQAAREAAIKTPPDTSTLLAGKRTADGSEFEKRTADGSEFESPKKKAKVE

SEQ ID NO: 1861 - protein, 2096 aa, synthetic construct
MPAAKRVKLDGGDKKYSIGLDIGTNSVGWAVITDEYKVPSKKFKVLGNTDRHSIKKNLIGALLFDSGETAEATRLKRTARRRYTRRKNRICYLQEIFSNEMAKVDDSFFHRLEESFLVEEDKKHERHPIFGNIVDEVAYHEKYPTIYHLRKKLVDSTDKADLRLIYLALAHMIKFRGHFLIEGDLNPDNSDVDKLFIQLVQTYNQLFEENPINASGVDAKAILSARLSKSRRLENLIAQLPGEKKNGLFGNLIALSLGLTPNFKSNFDLAEDAKLQLSKDTYDDDLDNLLAQIGDQYADLFLAAKNLSDAILLSDILRVNTEITKAPLSASMIKRYDEHHQDLTLLKALVRQQLPEKYKEIFFDQSKNGYAGYIDGGASQEEFYKFIKPILEKMDGTEELLVKLNREDLLRKQRTFDNGSIPHQIHLGELHAILRRQEDFYPFLKDNREKIEKILTFRIPYYVGPLARGNSRFAWMTRKSEETITPWNFEEVVDKGASAQSFIERMTNFDKNLPNEKVLPKHSLLYEYFTVYNELTKVKYVTEGMRKPAFLSGEQKKAIVDLLFKTNRKVTVKQLKEDYFKKIECFDSVEISGVEDRFNASLGTYHDLLKIIKDKDFLDNEENEDILEDIVLTLTLFEDREMIEERLKTYAHLFDDKVMKQLKRRRYTGWGRLSRKLINGIRDKQSGKTILDFLKSDGFANRNFMQLIHDDSLTFKEDIQKAQVSGQGDSLHEHIANLAGSPAIKKGILQTVKVVDELVKVMGRHKPENIVIEMARENQTTQKGQKNSRERMKRIEEGIKELGSQILKEHPVENTQLQNEKLYLYYLQNGRDMYVDQELDINRLSDYDVDHIVPQSFLKDDSIDNKVLTRSDKARGKSDNVPSEEVVKKMKNYWRQLLNAKLITQRKFDNLTKAERGGLSELDKAGFIKRQLVETRQITKHVAQILDSRMNTKYDENDKLIREVKVITLKSKLVSDFRKDFQFYKVREINNYHHAHDAYLNAVVGTALIKKYPKLESEFVYGDYKVYDVRKMIAKSEQEIGKATAKYFFYSNIMNFFKTEITLANGEIRKRPLIETNGETGEIVWDKGRDFATVRKVLSMPQVNIVKKTEVQTGGFSKESILPKRNSDKLIARKKDWDPKKYGGFDSPTVAYSVLVVAKVEKGKSKKLKSVKELLGITIMERSSFEKNPIDFLEAKGYKEVKKDLIIKLPKYSLFELENGRKRMLASAGELQKGNELALPSKYVNFLYLASHYEKLKGSPEDNEQKQLFVEQHKHYLDEIIEQISEFSKRVILADANLDKVLSAYNKHRDKPIREQAENIIHLFTLTNLGAPAAFKYFDTTIDRKRYTSTKEVLDATLIHQSITGLYETRIDLSQLGGDGGGSSEAAAKGGGGGTLNLEDEYRLYETSAEPEVSPGSTWLSDFPQAWAETGGMGLAVRQAPLIIPLKATSTPVSIKQYPMSQEAKLGIKPHIQRLLDQGILVPCQSPWNTPLLPVKKPGTNDYRPVQDLREVNKRVEDIHPTVPNPYNLLSGLPPSHRWYTVLDLKDAFFCLRLHPTSQPLFAFEWRDPGMGISGQLTWTRLPQGFKNSPTLFNEALHRDLADFRIQHPDLILLQYVDDILLAATSELDCQQGTRALLLTLGNLGYRASAKKAQLCQKQVKYLGYLLKEGQRWLTEARKETVMGQPTPKTPRQLREFLGKAGFCRLFIPGFAEMAAPLYPLTKPGTLFNWGPDQQKAYQEIKQALLTAPALGLPDLTKPFELFVDEKQGYAKGVLTQKLGPWRRPVAYLSKKLDPVAAGWPPCLRMVAAIAVLRKDAGKLTMGQPLVILAPHAVEALVKQPPDRWLSNARMTHYQAMLLDTDRVQFGPVVALNPATLLPLPEEGAPHDCLEILAETHGTRPDLTDQPIPDADHTWYTDGSSFLQEGQRKAGAAVTTETEVIWARALPAGTSAQRAELIALTQALKMAEGKRLNVYTDSRYAFATAHIHGEIYRRRGWLTSEGREIKNKSEILALLKALFLPKRLSIIHCLGHQKGDSAEARGNRLADQAAREAAIKTPPDTSTLLAGKRTADGSEFEKRTADGSEFESPKKKAKVE

SEQ ID NO: 1862 - protein, 2110 aa, synthetic construct
MPAAKRVKLDGGDKKYSIGLDIGTNSVGWAVITDEYKVPSKKFKVLGNTDRHSIKKNLIGALLFDSGETAEATRLKRTARRRYTRRKNRICYLQEIFSNEMAKVDDSFFHRLEESFLVEEDKKHERHPIFGNIVDEVAYHEKYPTIYHLRKKLVDSTDKADLRLIYLALAHMIKFRGHFLIEGDLNPDNSDVDKLFIQLVQTYNQLFEENPINASGVDAKAILSARLSKSRRLENLIAQLPGEKKNGLFGNLIALSLGLTPNFKSNFDLAEDAKLQLSKDTYDDDLDNLLAQIGDQYADLFLAAKNLSDAILLSDILRVNTEITKAPLSASMIKRYDEHHQDLTLLKALVRQQLPEKYKEIFFDQSKNGYAGYIDGGASQEEFYKFIKPILEKMDGTEELLVKLNREDLLRKQRTFDNGSIPHQIHLGELHAILRRQEDFYPFLKDNREKIEKILTFRIPYYVGPLARGNSRFAWMTRKSEETITPWNFEEVVDKGASAQSFIERMTNFDKNLPNEKVLPKHSLLYEYFTVYNELTKVKYVTEGMRKPAFLSGEQKKAIVDLLFKTNRKVTVKQLKEDYFKKIECFDSVEISGVEDRFNASLGTYHDLLKIIKDKDFLDNEENEDILEDIVLTLTLFEDREMIEERLKTYAHLFDDKVMKQLKRRRYTGWGRLSRKLINGIRDKQSGKTILDFLKSDGFANRNFMQLIHDDSLTFKEDIQKAQVSGQGDSLHEHIANLAGSPAIKKGILQTVKVVDELVKVMGRHKPENIVIEMARENQTTQKGQKNSRERMKRIEEGIKELGSQILKEHPVENTQLQNEKLYLYYLQNGRDMYVDQELDINRLSDYDVDHIVPQSFLKDDSIDNKVLTRSDKARGKSDNVPSEEVVKKMKNYWRQLLNAKLITQRKFDNLTKAERGGLSELDKAGFIKRQLVETRQITKHVAQILDSRMNTKYDENDKLIREVKVITLKSKLVSDFRKDFQFYKVREINNYHHAHDAYLNAVVGTALIKKYPKLESEFVYGDYKVYDVRKMIAKSEQEIGKATAKYFFYSNIMNFFKTEITLANGEIRKRPLIETNGETGEIVWDKGRDFATVRKVLSMPQVNIVKKTEVQTGGFSKESILPKRNSDKLIARKKDWDPKKYGGFDSPTVAYSVLVVAKVEKGKSKKLKSVKELLGITIMERSSFEKNPIDFLEAKGYKEVKKDLIIKLPKYSLFELENGRKRMLASAGELQKGNELALPSKYVNFLYLASHYEKLKGSPEDNEQKQLFVEQHKHYLDEIIEQISEFSKRVILADANLDKVLSAYNKHRDKPIREQAENIIHLFTLTNLGAPAAFKYFDTTIDRKRYTSTKEVLDATLIHQSITGLYETRIDLSQLGGDGGEAAAKEAAAKEAAAKEAAAKEAAAKGGTLNLEDEYRLYETSAEPEVSPGSTWLSDFPQAWAETGGMGLAVRQAPLIIPLKATSTPVSIKQYPMSQEAKLGIKPHIQRLLDQGILVPCQSPWNTPLLPVKKPGTNDYRPVQDLREVNKRVEDIHPTVPNPYNLLSGLPPSHRWYTVLDLKDAFFCLRLHPTSQPLFAFEWRDPGMGISGQLTWTRLPQGFKNSPTLFNEALHRDLADFRIQHPDLILLQYVDDILLAATSELDCQQGTRALLLTLGNLGYRASAKKAQLCQKQVKYLGYLLKEGQRWLTEARKETVMGQPTPKTPRQLREFLGKAGFCRLFIPGFAEMAAPLYPLTKPGTLFNWGPDQQKAYQEIKQALLTAPALGLPDLTKPFELFVDEKQGYAKGVLTQKLGPWRRPVAYLSKKLDPVAAGWPPCLRMVAAIAVLRKDAGKLTMGQPLVILAPHAVEALVKQPPDRWLSNARMTHYQAMLLDTDRVQFGPVVALNPATLLPLPEEGAPHDCLEILAETHGTRPDLTDQPIPDADHTWYTDGSSFLQEGQRKAGAAVTTETEVIWARALPAGTSAQRAELIALTQALKMAEGKRLNVYTDSRYAFATAHIHGEIYRRRGWLTSEGREIKNKSEILALLKALFLPKRLSIIHCLGHQKGDSAEARGNRLADQAAREAAIKTPPDTSTLLAGKRTADGSEFEKRTADGSEFESPKKKAKVE

SEQ ID NO: 1863 - protein, 2098 aa, synthetic construct
MPAAKRVKLDGGDKKYSIGLDIGTNSVGWAVITDEYKVPSKKFKVLGNTDRHSIKKNLIGALLFDSGETAEATRLKRTARRRYTRRKNRICYLQEIFSNEMAKVDDSFFHRLEESFLVEEDKKHERHPIFGNIVDEVAYHEKYPTIYHLRKKLVDSTDKADLRLIYLALAHMIKFRGHFLIEGDLNPDNSDVDKLFIQLVQTYNQLFEENPINASGVDAKAILSARLSKSRRLENLIAQLPGEKKNGLFGNLIALSLGLTPNFKSNFDLAEDAKLQLSKDTYDDDLDNLLAQIGDQYADLFLAAKNLSDAILLSDILRVNTEITKAPLSASMIKRYDEHHQDLTLLKALVRQQLPEKYKEIFFDQSKNGYAGYIDGGASQEEFYKFIKPILEKMDGTEELLVKLNREDLLRKQRTFDNGSIPHQIHLGELHAILRRQEDFYPFLKDNREKIEKILTFRIPYYVGPLARGNSRFAWMTRKSEETITPWNFEEVVDKGASAQSFIERMTNFDKNLPNEKVLPKHSLLYEYFTVYNELTKVKYVTEGMRKPAFLSGEQKKAIVDLLFKTNRKVTVKQLKEDYFKKIECFDSVEISGVEDRFNASLGTYHDLLKIIKDKDFLDNEENEDILEDIVLTLTLFEDREMIEERLKTYAHLFDDKVMKQLKRRRYTGWGRLSRKLINGIRDKQSGKTILDFLKSDGFANRNFMQLIHDDSLTFKEDIQKAQVSGQGDSLHEHIANLAGSPAIKKGILQTVKVVDELVKVMGRHKPENIVIEMARENQTTQKGQKNSRERMKRIEEGIKELGSQILKEHPVENTQLQNEKLYLYYLQNGRDMYVDQELDINRLSDYDVDHIVPQSFLKDDSIDNKVLTRSDKARGKSDNVPSEEVVKKMKNYWRQLLNAKLITQRKFDNLTKAERGGLSELDKAGFIKRQLVETRQITKHVAQILDSRMNTKYDENDKLIREVKVITLKSKLVSDFRKDFQFYKVREINNYHHAHDAYLNAVVGTALIKKYPKLESEFVYGDYKVYDVRKMIAKSEQEIGKATAKYFFYSNIMNFFKTEITLANGEIRKRPLIETNGETGEIVWDKGRDFATVRKVLSMPQVNIVKKTEVQTGGFSKESILPKRNSDKLIARKKDWDPKKYGGFDSPTVAYSVLVVAKVEKGKSKKLKSVKELLGITIMERSSFEKNPIDFLEAKGYKEVKKDLIIKLPKYSLFELENGRKRMLASAGELQKGNELALPSKYVNFLYLASHYEKLKGSPEDNEQKQLFVEQHKHYLDEIIEQISEFSKRVILADANLDKVLSAYNKHRDKPIREQAENIIHLFTLTNLGAPAAFKYFDTTIDRKRYTSTKEVLDATLIHQSITGLYETRIDLSQLGGDGGPAPAPAPAPAPAPGGTLNLEDEYRLYETSAEPEVSPGSTWLSDFPQAWAETGGMGLAVRQAPLIIPLKATSTPVSIKQYPMSQEAKLGIKPHIQRLLDQGILVPCQSPWNTPLLPVKKPGTNDYRPVQDLREVNKRVEDIHPTVPNPYNLLSGLPPSHRWYTVLDLKDAFFCLRLHPTSQPLFAFEWRDPGMGISGQLTWTRLPQGFKNSPTLFNEALHRDLADFRIQHPDLILLQYVDDILLAATSELDCQQGTRALLLTLGNLGYRASAKKAQLCQKQVKYLGYLLKEGQRWLTEARKETVMGQPTPKTPRQLREFLGKAGFCRLFIPGFAEMAAPLYPLTKPGTLFNWGPDQQKAYQEIKQALLTAPALGLPDLTKPFELFVDEKQGYAKGVLTQKLGPWRRPVAYLSKKLDPVAAGWPPCLRMVAAIAVLRKDAGKLTMGQPLVILAPHAVEALVKQPPDRWLSNARMTHYQAMLLDTDRVQFGPVVALNPATLLPLPEEGAPHDCLEILAETHGTRPDLTDQPIPDADHTWYTDGSSFLQEGQRKAGAAVTTETEVIWARALPAGTSAQRAELIALTQALKMAEGKRLNVYTDSRYAFATAHIHGEIYRRRGWLTSEGREIKNKSEILALLKALFLPKRLSIIHCLGHQKGDSAEARGNRLADQAAREAAIKTPPDTSTLLAGKRTADGSEFEKRTADGSEFESPKKKAKVE

SEQ ID NO: 1864 - protein, 2096 aa, synthetic construct
MPAAKRVKLDGGDKKYSIGLDIGTNSVGWAVITDEYKVPSKKFKVLGNTDRHSIKKNLIGALLFDSGETAEATRLKRTARRRYTRRKNRICYLQEIFSNEMAKVDDSFFHRLEESFLVEEDKKHERHPIFGNIVDEVAYHEKYPTIYHLRKKLVDSTDKADLRLIYLALAHMIKFRGHFLIEGDLNPDNSDVDKLFIQLVQTYNQLFEENPINASGVDAKAILSARLSKSRRLENLIAQLPGEKKNGLFGNLIALSLGLTPNFKSNFDLAEDAKLQLSKDTYDDDLDNLLAQIGDQYADLFLAAKNLSDAILLSDILRVNTEITKAPLSASMIKRYDEHHQDLTLLKALVRQQLPEKYKEIFFDQSKNGYAGYIDGGASQEEFYKFIKPILEKMDGTEELLVKLNREDLLRKQRTFDNGSIPHQIHLGELHAILRRQEDFYPFLKDNREKIEKILTFRIPYYVGPLARGNSRFAWMTRKSEETITPWNFEEVVDKGASAQSFIERMTNFDKNLPNEKVLPKHSLLYEYFTVYNELTKVKYVTEGMRKPAFLSGEQKKAIVDLLFKTNRKVTVKQLKEDYFKKIECFDSVEISGVEDRFNASLGTYHDLLKIIKDKDFLDNEENEDILEDIVLTLTLFEDREMIEERLKTYAHLFDDKVMKQLKRRRYTGWGRLSRKLINGIRDKQSGKTILDFLKSDGFANRNFMQLIHDDSLTFKEDIQKAQVSGQGDSLHEHIANLAGSPAIKKGILQTVKVVDELVKVMGRHKPENIVIEMARENQTTQKGQKNSRERMKRIEEGIKELGSQILKEHPVENTQLQNEKLYLYYLQNGRDMYVDQELDINRLSDYDVDHIVPQSFLKDDSIDNKVLTRSDKARGKSDNVPSEEVVKKMKNYWRQLLNAKLITQRKFDNLTKAERGGLSELDKAGFIKRQLVETRQITKHVAQILDSRMNTKYDENDKLIREVKVITLKSKLVSDFRKDFQFYKVREINNYHHAHDAYLNAVVGTALIKKYPKLESEFVYGDYKVYDVRKMIAKSEQEIGKATAKYFFYSNIMNFFKTEITLANGEIRKRPLIETNGETGEIVWDKGRDFATVRKVLSMPQVNIVKKTEVQTGGFSKESILPKRNSDKLIARKKDWDPKKYGGFDSPTVAYSVLVVAKVEKGKSKKLKSVKELLGITIMERSSFEKNPIDFLEAKGYKEVKKDLIIKLPKYSLFELENGRKRMLASAGELQKGNELALPSKYVNFLYLASHYEKLKGSPEDNEQKQLFVEQHKHYLDEIIEQISEFSKRVILADANLDKVLSAYNKHRDKPIREQAENIIHLFTLTNLGAPAAFKYFDTTIDRKRYTSTKEVLDATLIHQSITGLYETRIDLSQLGGDGGPAPEAAAKGGGGGTLNLEDEYRLYETSAEPEVSPGSTWLSDFPQAWAETGGMGLAVRQAPLIIPLKATSTPVSIKQYPMSQEAKLGIKPHIQRLLDQGILVPCQSPWNTPLLPVKKPGTNDYRPVQDLREVNKRVEDIHPTVPNPYNLLSGLPPSHRWYTVLDLKDAFFCLRLHPTSQPLFAFEWRDPGMGISGQLTWTRLPQGFKNSPTLFNEALHRDLADFRIQHPDLILLQYVDDILLAATSELDCQQGTRALLLTLGNLGYRASAKKAQLCQKQVKYLGYLLKEGQRWLTEARKETVMGQPTPKTPRQLREFLGKAGFCRLFIPGFAEMAAPLYPLTKPGTLFNWGPDQQKAYQEIKQALLTAPALGLPDLTKPFELFVDEKQGYAKGVLTQKLGPWRRPVAYLSKKLDPVAAGWPPCLRMVAAIAVLRKDAGKLTMGQPLVILAPHAVEALVKQPPDRWLSNARMTHYQAMLLDTDRVQFGPVVALNPATLLPLPEEGAPHDCLEILAETHGTRPDLTDQPIPDADHTWYTDGSSFLQEGQRKAGAAVTTETEVIWARALPAGTSAQRAELIALTQALKMAEGKRLNVYTDSRYAFATAHIHGEIYRRRGWLTSEGREIKNKSEILALLKALFLPKRLSIIHCLGHQKGDSAEARGNRLADQAAREAAIKTPPDTSTLLAGKRTADGSEFEKRTADGSEFESPKKKAKVE

SEQ ID NO: 1865 - protein, 2105 aa, synthetic construct
MPAAKRVKLDGGDKKYSIGLDIGTNSVGWAVITDEYKVPSKKFKVLGNTDRHSIKKNLIGALLFDSGETAEATRLKRTARRRYTRRKNRICYLQEIFSNEMAKVDDSFFHRLEESFLVEEDKKHERHPIFGNIVDEVAYHEKYPTIYHLRKKLVDSTDKADLRLIYLALAHMIKFRGHFLIEGDLNPDNSDVDKLFIQLVQTYNQLFEENPINASGVDAKAILSARLSKSRRLENLIAQLPGEKKNGLFGNLIALSLGLTPNFKSNFDLAEDAKLQLSKDTYDDDLDNLLAQIGDQYADLFLAAKNLSDAILLSDILRVNTEITKAPLSASMIKRYDEHHQDLTLLKALVRQQLPEKYKEIFFDQSKNGYAGYIDGGASQEEFYKFIKPILEKMDGTEELLVKLNREDLLRKQRTFDNGSIPHQIHLGELHAILRRQEDFYPFLKDNREKIEKILTFRIPYYVGPLARGNSRFAWMTRKSEETITPWNFEEVVDKGASAQSFIERMTNFDKNLPNEKVLPKHSLLYEYFTVYNELTKVKYVTEGMRKPAFLSGEQKKAIVDLLFKTNRKVTVKQLKEDYFKKIECFDSVEISGVEDRFNASLGTYHDLLKIIKDKDFLDNEENEDILEDIVLTLTLFEDREMIEERLKTYAHLFDDKVMKQLKRRRYTGWGRLSRKLINGIRDKQSGKTILDFLKSDGFANRNFMQLIHDDSLTFKEDIQKAQVSGQGDSLHEHIANLAGSPAIKKGILQTVKVVDELVKVMGRHKPENIVIEMARENQTTQKGQKNSRERMKRIEEGIKELGSQILKEHPVENTQLQNEKLYLYYLQNGRDMYVDQELDINRLSDYDVDHIVPQSFLKDDSIDNKVLTRSDKARGKSDNVPSEEVVKKMKNYWRQLLNAKLITQRKFDNLTKAERGGLSELDKAGFIKRQLVETRQITKHVAQILDSRMNTKYDENDKLIREVKVITLKSKLVSDFRKDFQFYKVREINNYHHAHDAYLNAVVGTALIKKYPKLESEFVYGDYKVYDVRKMIAKSEQEIGKATAKYFFYSNIMNFFKTEITLANGEIRKRPLIETNGETGEIVWDKGRDFATVRKVLSMPQVNIVKKTEVQTGGFSKESILPKRNSDKLIARKKDWDPKKYGGFDSPTVAYSVLVVAKVEKGKSKKLKSVKELLGITIMERSSFEKNPIDFLEAKGYKEVKKDLIIKLPKYSLFELENGRKRMLASAGELQKGNELALPSKYVNFLYLASHYEKLKGSPEDNEQKQLFVEQHKHYLDEIIEQISEFSKRVILADANLDKVLSAYNKHRDKPIREQAENIIHLFTLTNLGAPAAFKYFDTTIDRKRYTSTKEVLDATLIHQSITGLYETRIDLSQLGGDGGEAAAKEAAAKEAAAKEAAAKGGTLNLEDEYRLYETSAEPEVSPGSTWLSDFPQAWAETGGMGLAVRQAPLIIPLKATSTPVSIKQYPMSQEAKLGIKPHIQRLLDQGILVPCQSPWNTPLLPVKKPGTNDYRPVQDLREVNKRVEDIHPTVPNPYNLLSGLPPSHRWYTVLDLKDAFFCLRLHPTSQPLFAFEWRDPGMGISGQLTWTRLPQGFKNSPTLFNEALHRDLADFRIQHPDLILLQYVDDILLAATSELDCQQGTRALLLTLGNLGYRASAKKAQLCQKQVKYLGYLLKEGQRWLTEARKETVMGQPTPKTPRQLREFLGKAGFCRLFIPGFAEMAAPLYPLTKPGTLFNWGPDQQKAYQEIKQALLTAPALGLPDLTKPFELFVDEKQGYAKGVLTQKLGPWRRPVAYLSKKLDPVAAGWPPCLRMVAAIAVLRKDAGKLTMGQPLVILAPHAVEALVKQPPDRWLSNARMTHYQAMLLDTDRVQFGPVVALNPATLLPLPEEGAPHDCLEILAETHGTRPDLTDQPIPDADHTWYTDGSSFLQEGQRKAGAAVTTETEVIWARALPAGTSAQRAELIALTQALKMAEGKRLNVYTDSRYAFATAHIHGEIYRRRGWLTSEGREIKNKSEILALLKALFLPKRLSIIHCLGHQKGDSAEARGNRLADQAAREAAIKTPPDTSTLLAGKRTADGSEFEKRTADGSEFESPKKKAKVE

SEQ ID NO: 1866 - protein, 2096 aa, synthetic construct
MPAAKRVKLDGGDKKYSIGLDIGTNSVGWAVITDEYKVPSKKFKVLGNTDRHSIKKNLIGALLFDSGETAEATRLKRTARRRYTRRKNRICYLQEIFSNEMAKVDDSFFHRLEESFLVEEDKKHERHPIFGNIVDEVAYHEKYPTIYHLRKKLVDSTDKADLRLIYLALAHMIKFRGHFLIEGDLNPDNSDVDKLFIQLVQTYNQLFEENPINASGVDAKAILSARLSKSRRLENLIAQLPGEKKNGLFGNLIALSLGLTPNFKSNFDLAEDAKLQLSKDTYDDDLDNLLAQIGDQYADLFLAAKNLSDAILLSDILRVNTEITKAPLSASMIKRYDEHHQDLTLLKALVRQQLPEKYKEIFFDQSKNGYAGYIDGGASQEEFYKFIKPILEKMDGTEELLVKLNREDLLRKQRTFDNGSIPHQIHLGELHAILRRQEDFYPFLKDNREKIEKILTFRIPYYVGPLARGNSRFAWMTRKSEETITPWNFEEVVDKGASAQSFIERMTNFDKNLPNEKVLPKHSLLYEYFTVYNELTKVKYVTEGMRKPAFLSGEQKKAIVDLLFKTNRKVTVKQLKEDYFKKIECFDSVEISGVEDRFNASLGTYHDLLKIIKDKDFLDNEENEDILEDIVLTLTLFEDREMIEERLKTYAHLFDDKVMKQLKRRRYTGWGRLSRKLINGIRDKQSGKTILDFLKSDGFANRNFMQLIHDDSLTFKEDIQKAQVSGQGDSLHEHIANLAGSPAIKKGILQTVKVVDELVKVMGRHKPENIVIEMARENQTTQKGQKNSRERMKRIEEGIKELGSQILKEHPVENTQLQNEKLYLYYLQNGRDMYVDQELDINRLSDYDVDHIVPQSFLKDDSIDNKVLTRSDKARGKSDNVPSEEVVKKMKNYWRQLLNAKLITQRKFDNLTKAERGGLSELDKAGFIKRQLVETRQITKHVAQILDSRMNTKYDENDKLIREVKVITLKSKLVSDFRKDFQFYKVREINNYHHAHDAYLNAVVGTALIKKYPKLESEFVYGDYKVYDVRKMIAKSEQEIGKATAKYFFYSNIMNFFKTEITLANGEIRKRPLIETNGETGEIVWDKGRDFATVRKVLSMPQVNIVKKTEVQTGGFSKESILPKRNSDKLIARKKDWDPKKYGGFDSPTVAYSVLVVAKVEKGKSKKLKSVKELLGITIMERSSFEKNPIDFLEAKGYKEVKKDLIIKLPKYSLFELENGRKRMLASAGELQKGNELALPSKYVNFLYLASHYEKLKGSPEDNEQKQLFVEQHKHYLDEIIEQISEFSKRVILADANLDKVLSAYNKHRDKPIREQAENIIHLFTLTNLGAPAAFKYFDTTIDRKRYTSTKEVLDATLIHQSITGLYETRIDLSQLGGDGGPAPGGSEAAAKGGTLNLEDEYRLYETSAEPEVSPGSTWLSDFPQAWAETGGMGLAVRQAPLIIPLKATSTPVSIKQYPMSQEAKLGIKPHIQRLLDQGILVPCQSPWNTPLLPVKKPGTNDYRPVQDLREVNKRVEDIHPTVPNPYNLLSGLPPSHRWYTVLDLKDAFFCLRLHPTSQPLFAFEWRDPGMGISGQLTWTRLPQGFKNSPTLFNEALHRDLADFRIQHPDLILLQYVDDILLAATSELDCQQGTRALLLTLGNLGYRASAKKAQLCQKQVKYLGYLLKEGQRWLTEARKETVMGQPTPKTPRQLREFLGKAGFCRLFIPGFAEMAAPLYPLTKPGTLFNWGPDQQKAYQEIKQALLTAPALGLPDLTKPFELFVDEKQGYAKGVLTQKLGPWRRPVAYLSKKLDPVAAGWPPCLRMVAAIAVLRKDAGKLTMGQPLVILAPHAVEALVKQPPDRWLSNARMTHYQAMLLDTDRVQFGPVVALNPATLLPLPEEGAPHDCLEILAETHGTRPDLTDQPIPDADHTWYTDGSSFLQEGQRKAGAAVTTETEVIWARALPAGTSAQRAELIALTQALKMAEGKRLNVYTDSRYAFATAHIHGEIYRRRGWLTSEGREIKNKSEILALLKALFLPKRLSIIHCLGHQKGDSAEARGNRLADQAAREAAIKTPPDTSTLLAGKRTADGSEFEKRTADGSEFESPKKKAKVE

SEQ ID NO: 1867 - protein, 2096 aa, synthetic construct
MPAAKRVKLDGGDKKYSIGLDIGTNSVGWAVITDEYKVPSKKFKVLGNTDRHSIKKNLIGALLFDSGETAEATRLKRTARRRYTRRKNRICYLQEIFSNEMAKVDDSFFHRLEESFLVEEDKKHERHPIFGNIVDEVAYHEKYPTIYHLRKKLVDSTDKADLRLIYLALAHMIKFRGHFLIEGDLNPDNSDVDKLFIQLVQTYNQLFEENPINASGVDAKAILSARLSKSRRLENLIAQLPGEKKNGLFGNLIALSLGLTPNFKSNFDLAEDAKLQLSKDTYDDDLDNLLAQIGDQYADLFLAAKNLSDAILLSDILRVNTEITKAPLSASMIKRYDEHHQDLTLLKALVRQQLPEKYKEIFFDQSKNGYAGYIDGGASQEEFYKFIKPILEKMDGTEELLVKLNREDLLRKQRTFDNGSIPHQIHLGELHAILRRQEDFYPFLKDNREKIEKILTFRIPYYVGPLARGNSRFAWMTRKSEETITPWNFEEVVDKGASAQSFIERMTNFDKNLPNEKVLPKHSLLYEYFTVYNELTKVKYVTEGMRKPAFLSGEQKKAIVDLLFKTNRKVTVKQLKEDYFKKIECFDSVEISGVEDRFNASLGTYHDLLKIIKDKDFLDNEENEDILEDIVLTLTLFEDREMIEERLKTYAHLFDDKVMKQLKRRRYTGWGRLSRKLINGIRDKQSGKTILDFLKSDGFANRNFMQLIHDDSLTFKEDIQKAQVSGQGDSLHEHIANLAGSPAIKKGILQTVKVVDELVKVMGRHKPENIVIEMARENQTTQKGQKNSRERMKRIEEGIKELGSQILKEHPVENTQLQNEKLYLYYLQNGRDMYVDQELDINRLSDYDVDHIVPQSFLKDDSIDNKVLTRSDKARGKSDNVPSEEVVKKMKNYWRQLLNAKLITQRKFDNLTKAERGGLSELDKAGFIKRQLVETRQITKHVAQILDSRMNTKYDENDKLIREVKVITLKSKLVSDFRKDFQFYKVREINNYHHAHDAYLNAVVGTALIKKYPKLESEFVYGDYKVYDVRKMIAKSEQEIGKATAKYFFYSNIMNFFKTEITLANGEIRKRPLIETNGETGEIVWDKGRDFATVRKVLSMPQVNIVKKTEVQTGGFSKESILPKRNSDKLIARKKDWDPKKYGGFDSPTVAYSVLVVAKVEKGKSKKLKSVKELLGITIMERSSFEKNPIDFLEAKGYKEVKKDLIIKLPKYSLFELENGRKRMLASAGELQKGNELALPSKYVNFLYLASHYEKLKGSPEDNEQKQLFVEQHKHYLDEIIEQISEFSKRVILADANLDKVLSAYNKHRDKPIREQAENIIHLFTLTNLGAPAAFKYFDTTIDRKRYTSTKEVLDATLIHQSITGLYETRIDLSQLGGDGGEAAAKGGGPAPGGTLNLEDEYRLYETSAEPEVSPGSTWLSDFPQAWAETGGMGLAVRQAPLIIPLKATSTPVSIKQYPMSQEAKLGIKPHIQRLLDQGILVPCQSPWNTPLLPVKKPGTNDYRPVQDLREVNKRVEDIHPTVPNPYNLLSGLPPSHRWYTVLDLKDAFFCLRLHPTSQPLFAFEWRDPGMGISGQLTWTRLPQGFKNSPTLFNEALHRDLADFRIQHPDLILLQYVDDILLAATSELDCQQGTRALLLTLGNLGYRASAKKAQLCQKQVKYLGYLLKEGQRWLTEARKETVMGQPTPKTPRQLREFLGKAGFCRLFIPGFAEMAAPLYPLTKPGTLFNWGPDQQKAYQEIKQALLTAPALGLPDLTKPFELFVDEKQGYAKGVLTQKLGPWRRPVAYLSKKLDPVAAGWPPCLRMVAAIAVLRKDAGKLTMGQPLVILAPHAVEALVKQPPDRWLSNARMTHYQAMLLDTDRVQFGPVVALNPATLLPLPEEGAPHDCLEILAETHGTRPDLTDQPIPDADHTWYTDGSSFLQEGQRKAGAAVTTETEVIWARALPAGTSAQRAELIALTQALKMAEGKRLNVYTDSRYAFATAHIHGEIYRRRGWLTSEGREIKNKSEILALLKALFLPKRLSIIHCLGHQKGDSAEARGNRLADQAAREAAIKTPPDTSTLLAGKRTADGSEFEKRTADGSEFESPKKKAKVE

SEQ ID NO: 1868 - protein, 2090 aa, synthetic construct
MPAAKRVKLDGGDKKYSIGLDIGTNSVGWAVITDEYKVPSKKFKVLGNTDRHSIKKNLIGALLFDSGETAEATRLKRTARRRYTRRKNRICYLQEIFSNEMAKVDDSFFHRLEESFLVEEDKKHERHPIFGNIVDEVAYHEKYPTIYHLRKKLVDSTDKADLRLIYLALAHMIKFRGHFLIEGDLNPDNSDVDKLFIQLVQTYNQLFEENPINASGVDAKAILSARLSKSRRLENLIAQLPGEKKNGLFGNLIALSLGLTPNFKSNFDLAEDAKLQLSKDTYDDDLDNLLAQIGDQYADLFLAAKNLSDAILLSDILRVNTEITKAPLSASMIKRYDEHHQDLTLLKALVRQQLPEKYKEIFFDQSKNGYAGYIDGGASQEEFYKFIKPILEKMDGTEELLVKLNREDLLRKQRTFDNGSIPHQIHLGELHAILRRQEDFYPFLKDNREKIEKILTFRIPYYVGPLARGNSRFAWMTRKSEETITPWNFEEVVDKGASAQSFIERMTNFDKNLPNEKVLPKHSLLYEYFTVYNELTKVKYVTEGMRKPAFLSGEQKKAIVDLLFKTNRKVTVKQLKEDYFKKIECFDSVEISGVEDRFNASLGTYHDLLKIIKDKDFLDNEENEDILEDIVLTLTLFEDREMIEERLKTYAHLFDDKVMKQLKRRRYTGWGRLSRKLINGIRDKQSGKTILDFLKSDGFANRNFMQLIHDDSLTFKEDIQKAQVSGQGDSLHEHIANLAGSPAIKKGILQTVKVVDELVKVMGRHKPENIVIEMARENQTTQKGQKNSRERMKRIEEGIKELGSQILKEHPVENTQLQNEKLYLYYLQNGRDMYVDQELDINRLSDYDVDHIVPQSFLKDDSIDNKVLTRSDKARGKSDNVPSEEVVKKMKNYWRQLLNAKLITQRKFDNLTKAERGGLSELDKAGFIKRQLVETRQITKHVAQILDSRMNTKYDENDKLIREVKVITLKSKLVSDFRKDFQFYKVREINNYHHAHDAYLNAVVGTALIKKYPKLESEFVYGDYKVYDVRKMIAKSEQEIGKATAKYFFYSNIMNFFKTEITLANGEIRKRPLIETNGETGEIVWDKGRDFATVRKVLSMPQVNIVKKTEVQTGGFSKESILPKRNSDKLIARKKDWDPKKYGGFDSPTVAYSVLVVAKVEKGKSKKLKSVKELLGITIMERSSFEKNPIDFLEAKGYKEVKKDLIIKLPKYSLFELENGRKRMLASAGELQKGNELALPSKYVNFLYLASHYEKLKGSPEDNEQKQLFVEQHKHYLDEIIEQISEFSKRVILADANLDKVLSAYNKHRDKPIREQAENIIHLFTLTNLGAPAAFKYFDTTIDRKRYTSTKEVLDATLIHQSITGLYETRIDLSQLGGDGGEAAAKGGTLNLEDEYRLYETSAEPEVSPGSTWLSDFPQAWAETGGMGLAVRQAPLIIPLKATSTPVSIKQYPMSQEAKLGIKPHIQRLLDQGILVPCQSPWNTPLLPVKKPGTNDYRPVQDLREVNKRVEDIHPTVPNPYNLLSGLPPSHRWYTVLDLKDAFFCLRLHPTSQPLFAFEWRDPGMGISGQLTWTRLPQGFKNSPTLFNEALHRDLADFRIQHPDLILLQYVDDILLAATSELDCQQGTRALLLTLGNLGYRASAKKAQLCQKQVKYLGYLLKEGQRWLTEARKETVMGQPTPKTPRQLREFLGKAGFCRLFIPGFAEMAAPLYPLTKPGTLFNWGPDQQKAYQEIKQALLTAPALGLPDLTKPFELFVDEKQGYAKGVLTQKLGPWRRPVAYLSKKLDPVAAGWPPCLRMVAAIAVLRKDAGKLTMGQPLVILAPHAVEALVKQPPDRWLSNARMTHYQAMLLDTDRVQFGPVVALNPATLLPLPEEGAPHDCLEILAETHGTRPDLTDQPIPDADHTWYTDGSSFLQEGQRKAGAAVTTETEVIWARALPAGTSAQRAELIALTQALKMAEGKRLNVYTDSRYAFATAHIHGEIYRRRGWLTSEGREIKNKSEILALLKALFLPKRLSIIHCLGHQKGDSAEARGNRLADQAAREAAIKTPPDTSTLLAGKRTADGSEFEKRTADGSEFESPKKKAKVE

SEQ ID NO: 1869 - protein, 2096 aa, synthetic construct
MPAAKRVKLDGGDKKYSIGLDIGTNSVGWAVITDEYKVPSKKFKVLGNTDRHSIKKNLIGALLFDSGETAEATRLKRTARRRYTRRKNRICYLQEIFSNEMAKVDDSFFHRLEESFLVEEDKKHERHPIFGNIVDEVAYHEKYPTIYHLRKKLVDSTDKADLRLIYLALAHMIKFRGHFLIEGDLNPDNSDVDKLFIQLVQTYNQLFEENPINASGVDAKAILSARLSKSRRLENLIAQLPGEKKNGLFGNLIALSLGLTPNFKSNFDLAEDAKLQLSKDTYDDDLDNLLAQIGDQYADLFLAAKNLSDAILLSDILRVNTEITKAPLSASMIKRYDEHHQDLTLLKALVRQQLPEKYKEIFFDQSKNGYAGYIDGGASQEEFYKFIKPILEKMDGTEELLVKLNREDLLRKQRTFDNGSIPHQIHLGELHAILRRQEDFYPFLKDNREKIEKILTFRIPYYVGPLARGNSRFAWMTRKSEETITPWNFEEVVDKGASAQSFIERMTNFDKNLPNEKVLPKHSLLYEYFTVYNELTKVKYVTEGMRKPAFLSGEQKKAIVDLLFKTNRKVTVKQLKEDYFKKIECFDSVEISGVEDRFNASLGTYHDLLKIIKDKDFLDNEENEDILEDIVLTLTLFEDREMIEERLKTYAHLFDDKVMKQLKRRRYTGWGRLSRKLINGIRDKQSGKTILDFLKSDGFANRNFMQLIHDDSLTFKEDIQKAQVSGQGDSLHEHIANLAGSPAIKKGILQTVKVVDELVKVMGRHKPENIVIEMARENQTTQKGQKNSRERMKRIEEGIKELGSQILKEHPVENTQLQNEKLYLYYLQNGRDMYVDQELDINRLSDYDVDHIVPQSFLKDDSIDNKVLTRSDKARGKSDNVPSEEVVKKMKNYWRQLLNAKLITQRKFDNLTKAERGGLSELDKAGFIKRQLVETRQITKHVAQILDSRMNTKYDENDKLIREVKVITLKSKLVSDFRKDFQFYKVREINNYHHAHDAYLNAVVGTALIKKYPKLESEFVYGDYKVYDVRKMIAKSEQEIGKATAKYFFYSNIMNFFKTEITLANGEIRKRPLIETNGETGEIVWDKGRDFATVRKVLSMPQVNIVKKTEVQTGGFSKESILPKRNSDKLIARKKDWDPKKYGGFDSPTVAYSVLVVAKVEKGKSKKLKSVKELLGITIMERSSFEKNPIDFLEAKGYKEVKKDLIIKLPKYSLFELENGRKRMLASAGELQKGNELALPSKYVNFLYLASHYEKLKGSPEDNEQKQLFVEQHKHYLDEIIEQISEFSKRVILADANLDKVLSAYNKHRDKPIREQAENIIHLFTLTNLGAPAAFKYFDTTIDRKRYTSTKEVLDATLIHQSITGLYETRIDLSQLGGDGGEAAAKGGGGSSGGTLNLEDEYRLYETSAEPEVSPGSTWLSDFPQAWAETGGMGLAVRQAPLIIPLKATSTPVSIKQYPMSQEAKLGIKPHIQRLLDQGILVPCQSPWNTPLLPVKKPGTNDYRPVQDLREVNKRVEDIHPTVPNPYNLLSGLPPSHRWYTVLDLKDAFFCLRLHPTSQPLFAFEWRDPGMGISGQLTWTRLPQGFKNSPTLFNEALHRDLADFRIQHPDLILLQYVDDILLAATSELDCQQGTRALLLTLGNLGYRASAKKAQLCQKQVKYLGYLLKEGQRWLTEARKETVMGQPTPKTPRQLREFLGKAGFCRLFIPGFAEMAAPLYPLTKPGTLFNWGPDQQKAYQEIKQALLTAPALGLPDLTKPFELFVDEKQGYAKGVLTQKLGPWRRPVAYLSKKLDPVAAGWPPCLRMVAAIAVLRKDAGKLTMGQPLVILAPHAVEALVKQPPDRWLSNARMTHYQAMLLDTDRVQFGPVVALNPATLLPLPEEGAPHDCLEILAETHGTRPDLTDQPIPDADHTWYTDGSSFLQEGQRKAGAAVTTETEVIWARALPAGTSAQRAELIALTQALKMAEGKRLNVYTDSRYAFATAHIHGEIYRRRGWLTSEGREIKNKSEILALLKALFLPKRLSIIHCLGHQKGDSAEARGNRLADQAAREAAIKTPPDTSTLLAGKRTADGSEFEKRTADGSEFESPKKKAKVE

SEQ ID NO: 1870 - protein, 2097 aa, synthetic construct
MPAAKRVKLDGGDKKYSIGLDIGTNSVGWAVITDEYKVPSKKFKVLGNTDRHSIKKNLIGALLFDSGETAEATRLKRTARRRYTRRKNRICYLQEIFSNEMAKVDDSFFHRLEESFLVEEDKKHERHPIFGNIVDEVAYHEKYPTIYHLRKKLVDSTDKADLRLIYLALAHMIKFRGHFLIEGDLNPDNSDVDKLFIQLVQTYNQLFEENPINASGVDAKAILSARLSKSRRLENLIAQLPGEKKNGLFGNLIALSLGLTPNFKSNFDLAEDAKLQLSKDTYDDDLDNLLAQIGDQYADLFLAAKNLSDAILLSDILRVNTEITKAPLSASMIKRYDEHHQDLTLLKALVRQQLPEKYKEIFFDQSKNGYAGYIDGGASQEEFYKFIKPILEKMDGTEELLVKLNREDLLRKQRTFDNGSIPHQIHLGELHAILRRQEDFYPFLKDNREKIEKILTFRIPYYVGPLARGNSRFAWMTRKSEETITPWNFEEVVDKGASAQSFIERMTNFDKNLPNEKVLPKHSLLYEYFTVYNELTKVKYVTEGMRKPAFLSGEQKKAIVDLLFKTNRKVTVKQLKEDYFKKIECFDSVEISGVEDRFNASLGTYHDLLKIIKDKDFLDNEENEDILEDIVLTLTLFEDREMIEERLKTYAHLFDDKVMKQLKRRRYTGWGRLSRKLINGIRDKQSGKTILDFLKSDGFANRNFMQLIHDDSLTFKEDIQKAQVSGQGDSLHEHIANLAGSPAIKKGILQTVKVVDELVKVMGRHKPENIVIEMARENQTTQKGQKNSRERMKRIEEGIKELGSQILKEHPVENTQLQNEKLYLYYLQNGRDMYVDQELDINRLSDYDVDHIVPQSFLKDDSIDNKVLTRSDKARGKSDNVPSEEVVKKMKNYWRQLLNAKLITQRKFDNLTKAERGGLSELDKAGFIKRQLVETRQITKHVAQILDSRMNTKYDENDKLIREVKVITLKSKLVSDFRKDFQFYKVREINNYHHAHDAYLNAVVGTALIKKYPKLESEFVYGDYKVYDVRKMIAKSEQEIGKATAKYFFYSNIMNFFKTEITLANGEIRKRPLIETNGETGEIVWDKGRDFATVRKVLSMPQVNIVKKTEVQTGGFSKESILPKRNSDKLIARKKDWDPKKYGGFDSPTVAYSVLVVAKVEKGKSKKLKSVKELLGITIMERSSFEKNPIDFLEAKGYKEVKKDLIIKLPKYSLFELENGRKRMLASAGELQKGNELALPSKYVNFLYLASHYEKLKGSPEDNEQKQLFVEQHKHYLDEIIEQISEFSKRVILADANLDKVLSAYNKHRDKPIREQAENIIHLFTLTNLGAPAAFKYFDTTIDRKRYTSTKEVLDATLIHQSITGLYETRIDLSQLGGDGGGSAGSAAGSGEFGGTLNLEDEYRLYETSAEPEVSPGSTWLSDFPQAWAETGGMGLAVRQAPLIIPLKATSTPVSIKQYPMSQEAKLGIKPHIQRLLDQGILVPCQSPWNTPLLPVKKPGTNDYRPVQDLREVNKRVEDIHPTVPNPYNLLSGLPPSHRWYTVLDLKDAFFCLRLHPTSQPLFAFEWRDPGMGISGQLTWTRLPQGFKNSPTLFNEALHRDLADFRIQHPDLILLQYVDDILLAATSELDCQQGTRALLLTLGNLGYRASAKKAQLCQKQVKYLGYLLKEGQRWLTEARKETVMGQPTPKTPRQLREFLGKAGFCRLFIPGFAEMAAPLYPLTKPGTLFNWGPDQQKAYQEIKQALLTAPALGLPDLTKPFELFVDEKQGYAKGVLTQKLGPWRRPVAYLSKKLDPVAAGWPPCLRMVAAIAVLRKDAGKLTMGQPLVILAPHAVEALVKQPPDRWLSNARMTHYQAMLLDTDRVQFGPVVALNPATLLPLPEEGAPHDCLEILAETHGTRPDLTDQPIPDADHTWYTDGSSFLQEGQRKAGAAVTTETEVIWARALPAGTSAQRAELIALTQALKMAEGKRLNVYTDSRYAFATAHIHGEIYRRRGWLTSEGREIKNKSEILALLKALFLPKRLSIIHCLGHQKGDSAEARGNRLADQAAREAAIKTPPDTSTLLAGKRTADGSEFEKRTADGSEFESPKKKAKVE

SEQ ID NO: 1871 - protein, 2096 aa, synthetic construct
MPAAKRVKLDGGDKKYSIGLDIGTNSVGWAVITDEYKVPSKKFKVLGNTDRHSIKKNLIGALLFDSGETAEATRLKRTARRRYTRRKNRICYLQEIFSNEMAKVDDSFFHRLEESFLVEEDKKHERHPIFGNIVDEVAYHEKYPTIYHLRKKLVDSTDKADLRLIYLALAHMIKFRGHFLIEGDLNPDNSDVDKLFIQLVQTYNQLFEENPINASGVDAKAILSARLSKSRRLENLIAQLPGEKKNGLFGNLIALSLGLTPNFKSNFDLAEDAKLQLSKDTYDDDLDNLLAQIGDQYADLFLAAKNLSDAILLSDILRVNTEITKAPLSASMIKRYDEHHQDLTLLKALVRQQLPEKYKEIFFDQSKNGYAGYIDGGASQEEFYKFIKPILEKMDGTEELLVKLNREDLLRKQRTFDNGSIPHQIHLGELHAILRRQEDFYPFLKDNREKIEKILTFRIPYYVGPLARGNSRFAWMTRKSEETITPWNFEEVVDKGASAQSFIERMTNFDKNLPNEKVLPKHSLLYEYFTVYNELTKVKYVTEGMRKPAFLSGEQKKAIVDLLFKTNRKVTVKQLKEDYFKKIECFDSVEISGVEDRFNASLGTYHDLLKIIKDKDFLDNEENEDILEDIVLTLTLFEDREMIEERLKTYAHLFDDKVMKQLKRRRYTGWGRLSRKLINGIRDKQSGKTILDFLKSDGFANRNFMQLIHDDSLTFKEDIQKAQVSGQGDSLHEHIANLAGSPAIKKGILQTVKVVDELVKVMGRHKPENIVIEMARENQTTQKGQKNSRERMKRIEEGIKELGSQILKEHPVENTQLQNEKLYLYYLQNGRDMYVDQELDINRLSDYDVDHIVPQSFLKDDSIDNKVLTRSDKARGKSDNVPSEEVVKKMKNYWRQLLNAKLITQRKFDNLTKAERGGLSELDKAGFIKRQLVETRQITKHVAQILDSRMNTKYDENDKLIREVKVITLKSKLVSDFRKDFQFYKVREINNYHHAHDAYLNAVVGTALIKKYPKLESEFVYGDYKVYDVRKMIAKSEQEIGKATAKYFFYSNIMNFFKTEITLANGEIRKRPLIETNGETGEIVWDKGRDFATVRKVLSMPQVNIVKKTEVQTGGFSKESILPKRNSDKLIARKKDWDPKKYGGFDSPTVAYSVLVVAKVEKGKSKKLKSVKELLGITIMERSSFEKNPIDFLEAKGYKEVKKDLIIKLPKYSLFELENGRKRMLASAGELQKGNELALPSKYVNFLYLASHYEKLKGSPEDNEQKQLFVEQHKHYLDEIIEQISEFSKRVILADANLDKVLSAYNKHRDKPIREQAENIIHLFTLTNLGAPAAFKYFDTTIDRKRYTSTKEVLDATLIHQSITGLYETRIDLSQLGGDGGEAAAKPAPGGSGGTLNLEDEYRLYETSAEPEVSPGSTWLSDFPQAWAETGGMGLAVRQAPLIIPLKATSTPVSIKQYPMSQEAKLGIKPHIQRLLDQGILVPCQSPWNTPLLPVKKPGTNDYRPVQDLREVNKRVEDIHPTVPNPYNLLSGLPPSHRWYTVLDLKDAFFCLRLHPTSQPLFAFEWRDPGMGISGQLTWTRLPQGFKNSPTLFNEALHRDLADFRIQHPDLILLQYVDDILLAATSELDCQQGTRALLLTLGNLGYRASAKKAQLCQKQVKYLGYLLKEGQRWLTEARKETVMGQPTPKTPRQLREFLGKAGFCRLFIPGFAEMAAPLYPLTKPGTLFNWGPDQQKAYQEIKQALLTAPALGLPDLTKPFELFVDEKQGYAKGVLTQKLGPWRRPVAYLSKKLDPVAAGWPPCLRMVAAIAVLRKDAGKLTMGQPLVILAPHAVEALVKQPPDRWLSNARMTHYQAMLLDTDRVQFGPVVALNPATLLPLPEEGAPHDCLEILAETHGTRPDLTDQPIPDADHTWYTDGSSFLQEGQRKAGAAVTTETEVIWARALPAGTSAQRAELIALTQALKMAEGKRLNVYTDSRYAFATAHIHGEIYRRRGWLTSEGREIKNKSEILALLKALFLPKRLSIIHCLGHQKGDSAEARGNRLADQAAREAAIKTPPDTSTLLAGKRTADGSEFEKRTADGSEFESPKKKAKVE

SEQ ID NO: 1872 - protein, 2096 aa, synthetic construct
MPAAKRVKLDGGDKKYSIGLDIGTNSVGWAVITDEYKVPSKKFKVLGNTDRHSIKKNLIGALLFDSGETAEATRLKRTARRRYTRRKNRICYLQEIFSNEMAKVDDSFFHRLEESFLVEEDKKHERHPIFGNIVDEVAYHEKYPTIYHLRKKLVDSTDKADLRLIYLALAHMIKFRGHFLIEGDLNPDNSDVDKLFIQLVQTYNQLFEENPINASGVDAKAILSARLSKSRRLENLIAQLPGEKKNGLFGNLIALSLGLTPNFKSNFDLAEDAKLQLSKDTYDDDLDNLLAQIGDQYADLFLAAKNLSDAILLSDILRVNTEITKAPLSASMIKRYDEHHQDLTLLKALVRQQLPEKYKEIFFDQSKNGYAGYIDGGASQEEFYKFIKPILEKMDGTEELLVKLNREDLLRKQRTFDNGSIPHQIHLGELHAILRRQEDFYPFLKDNREKIEKILTFRIPYYVGPLARGNSRFAWMTRKSEETITPWNFEEVVDKGASAQSFIERMTNFDKNLPNEKVLPKHSLLYEYFTVYNELTKVKYVTEGMRKPAFLSGEQKKAIVDLLFKTNRKVTVKQLKEDYFKKIECFDSVEISGVEDRFNASLGTYHDLLKIIKDKDFLDNEENEDILEDIVLTLTLFEDREMIEERLKTYAHLFDDKVMKQLKRRRYTGWGRLSRKLINGIRDKQSGKTILDFLKSDGFANRNFMQLIHDDSLTFKEDIQKAQVSGQGDSLHEHIANLAGSPAIKKGILQTVKVVDELVKVMGRHKPENIVIEMARENQTTQKGQKNSRERMKRIEEGIKELGSQILKEHPVENTQLQNEKLYLYYLQNGRDMYVDQELDINRLSDYDVDHIVPQSFLKDDSIDNKVLTRSDKARGKSDNVPSEEVVKKMKNYWRQLLNAKLITQRKFDNLTKAERGGLSELDKAGFIKRQLVETRQITKHVAQILDSRMNTKYDENDKLIREVKVITLKSKLVSDFRKDFQFYKVREINNYHHAHDAYLNAVVGTALIKKYPKLESEFVYGDYKVYDVRKMIAKSEQEIGKATAKYFFYSNIMNFFKTEITLANGEIRKRPLIETNGETGEIVWDKGRDFATVRKVLSMPQVNIVKKTEVQTGGFSKESILPKRNSDKLIARKKDWDPKKYGGFDSPTVAYSVLVVAKVEKGKSKKLKSVKELLGITIMERSSFEKNPIDFLEAKGYKEVKKDLIIKLPKYSLFELENGRKRMLASAGELQKGNELALPSKYVNFLYLASHYEKLKGSPEDNEQKQLFVEQHKHYLDEIIEQISEFSKRVILADANLDKVLSAYNKHRDKPIREQAENIIHLFTLTNLGAPAAFKYFDTTIDRKRYTSTKEVLDATLIHQSITGLYETRIDLSQLGGDGGEAAAKGSSPAPGGTLNLEDEYRLYETSAEPEVSPGSTWLSDFPQAWAETGGMGLAVRQAPLIIPLKATSTPVSIKQYPMSQEAKLGIKPHIQRLLDQGILVPCQSPWNTPLLPVKKPGTNDYRPVQDLREVNKRVEDIHPTVPNPYNLLSGLPPSHRWYTVLDLKDAFFCLRLHPTSQPLFAFEWRDPGMGISGQLTWTRLPQGFKNSPTLFNEALHRDLADFRIQHPDLILLQYVDDILLAATSELDCQQGTRALLLTLGNLGYRASAKKAQLCQKQVKYLGYLLKEGQRWLTEARKETVMGQPTPKTPRQLREFLGKAGFCRLFIPGFAEMAAPLYPLTKPGTLFNWGPDQQKAYQEIKQALLTAPALGLPDLTKPFELFVDEKQGYAKGVLTQKLGPWRRPVAYLSKKLDPVAAGWPPCLRMVAAIAVLRKDAGKLTMGQPLVILAPHAVEALVKQPPDRWLSNARMTHYQAMLLDTDRVQFGPVVALNPATLLPLPEEGAPHDCLEILAETHGTRPDLTDQPIPDADHTWYTDGSSFLQEGQRKAGAAVTTETEVIWARALPAGTSAQRAELIALTQALKMAEGKRLNVYTDSRYAFATAHIHGEIYRRRGWLTSEGREIKNKSEILALLKALFLPKRLSIIHCLGHQKGDSAEARGNRLADQAAREAAIKTPPDTSTLLAGKRTADGSEFEKRTADGSEFESPKKKAKVE

SEQ ID NO: 1873 - protein, 2091 aa, synthetic construct
MPAAKRVKLDGGDKKYSIGLDIGTNSVGWAVITDEYKVPSKKFKVLGNTDRHSIKKNLIGALLFDSGETAEATRLKRTARRRYTRRKNRICYLQEIFSNEMAKVDDSFFHRLEESFLVEEDKKHERHPIFGNIVDEVAYHEKYPTIYHLRKKLVDSTDKADLRLIYLALAHMIKFRGHFLIEGDLNPDNSDVDKLFIQLVQTYNQLFEENPINASGVDAKAILSARLSKSRRLENLIAQLPGEKKNGLFGNLIALSLGLTPNFKSNFDLAEDAKLQLSKDTYDDDLDNLLAQIGDQYADLFLAAKNLSDAILLSDILRVNTEITKAPLSASMIKRYDEHHQDLTLLKALVRQQLPEKYKEIFFDQSKNGYAGYIDGGASQEEFYKFIKPILEKMDGTEELLVKLNREDLLRKQRTFDNGSIPHQIHLGELHAILRRQEDFYPFLKDNREKIEKILTFRIPYYVGPLARGNSRFAWMTRKSEETITPWNFEEVVDKGASAQSFIERMTNFDKNLPNEKVLPKHSLLYEYFTVYNELTKVKYVTEGMRKPAFLSGEQKKAIVDLLFKTNRKVTVKQLKEDYFKKIECFDSVEISGVEDRFNASLGTYHDLLKIIKDKDFLDNEENEDILEDIVLTLTLFEDREMIEERLKTYAHLFDDKVMKQLKRRRYTGWGRLSRKLINGIRDKQSGKTILDFLKSDGFANRNFMQLIHDDSLTFKEDIQKAQVSGQGDSLHEHIANLAGSPAIKKGILQTVKVVDELVKVMGRHKPENIVIEMARENQTTQKGQKNSRERMKRIEEGIKELGSQILKEHPVENTQLQNEKLYLYYLQNGRDMYVDQELDINRLSDYDVDHIVPQSFLKDDSIDNKVLTRSDKARGKSDNVPSEEVVKKMKNYWRQLLNAKLITQRKFDNLTKAERGGLSELDKAGFIKRQLVETRQITKHVAQILDSRMNTKYDENDKLIREVKVITLKSKLVSDFRKDFQFYKVREINNYHHAHDAYLNAVVGTALIKKYPKLESEFVYGDYKVYDVRKMIAKSEQEIGKATAKYFFYSNIMNFFKTEITLANGEIRKRPLIETNGETGEIVWDKGRDFATVRKVLSMPQVNIVKKTEVQTGGFSKESILPKRNSDKLIARKKDWDPKKYGGFDSPTVAYSVLVVAKVEKGKSKKLKSVKELLGITIMERSSFEKNPIDFLEAKGYKEVKKDLIIKLPKYSLFELENGRKRMLASAGELQKGNELALPSKYVNFLYLASHYEKLKGSPEDNEQKQLFVEQHKHYLDEIIEQISEFSKRVILADANLDKVLSAYNKHRDKPIREQAENIIHLFTLTNLGAPAAFKYFDTTIDRKRYTSTKEVLDATLIHQSITGLYETRIDLSQLGGDGGGGGGGGGGTLNLEDEYRLYETSAEPEVSPGSTWLSDFPQAWAETGGMGLAVRQAPLIIPLKATSTPVSIKQYPMSQEAKLGIKPHIQRLLDQGILVPCQSPWNTPLLPVKKPGTNDYRPVQDLREVNKRVEDIHPTVPNPYNLLSGLPPSHRWYTVLDLKDAFFCLRLHPTSQPLFAFEWRDPGMGISGQLTWTRLPQGFKNSPTLFNEALHRDLADFRIQHPDLILLQYVDDILLAATSELDCQQGTRALLLTLGNLGYRASAKKAQLCQKQVKYLGYLLKEGQRWLTEARKETVMGQPTPKTPRQLREFLGKAGFCRLFIPGFAEMAAPLYPLTKPGTLFNWGPDQQKAYQEIKQALLTAPALGLPDLTKPFELFVDEKQGYAKGVLTQKLGPWRRPVAYLSKKLDPVAAGWPPCLRMVAAIAVLRKDAGKLTMGQPLVILAPHAVEALVKQPPDRWLSNARMTHYQAMLLDTDRVQFGPVVALNPATLLPLPEEGAPHDCLEILAETHGTRPDLTDQPIPDADHTWYTDGSSFLQEGQRKAGAAVTTETEVIWARALPAGTSAQRAELIALTQALKMAEGKRLNVYTDSRYAFATAHIHGEIYRRRGWLTSEGREIKNKSEILALLKALFLPKRLSIIHCLGHQKGDSAEARGNRLADQAAREAAIKTPPDTSTLLAGKRTADGSEFEKRTADGSEFESPKKKAKVE

SEQ ID NO: 1874 - protein, 2094 aa, synthetic construct
MPAAKRVKLDGGDKKYSIGLDIGTNSVGWAVITDEYKVPSKKFKVLGNTDRHSIKKNLIGALLFDSGETAEATRLKRTARRRYTRRKNRICYLQEIFSNEMAKVDDSFFHRLEESFLVEEDKKHERHPIFGNIVDEVAYHEKYPTIYHLRKKLVDSTDKADLRLIYLALAHMIKFRGHFLIEGDLNPDNSDVDKLFIQLVQTYNQLFEENPINASGVDAKAILSARLSKSRRLENLIAQLPGEKKNGLFGNLIALSLGLTPNFKSNFDLAEDAKLQLSKDTYDDDLDNLLAQIGDQYADLFLAAKNLSDAILLSDILRVNTEITKAPLSASMIKRYDEHHQDLTLLKALVRQQLPEKYKEIFFDQSKNGYAGYIDGGASQEEFYKFIKPILEKMDGTEELLVKLNREDLLRKQRTFDNGSIPHQIHLGELHAILRRQEDFYPFLKDNREKIEKILTFRIPYYVGPLARGNSRFAWMTRKSEETITPWNFEEVVDKGASAQSFIERMTNFDKNLPNEKVLPKHSLLYEYFTVYNELTKVKYVTEGMRKPAFLSGEQKKAIVDLLFKTNRKVTVKQLKEDYFKKIECFDSVEISGVEDRFNASLGTYHDLLKIIKDKDFLDNEENEDILEDIVLTLTLFEDREMIEERLKTYAHLFDDKVMKQLKRRRYTGWGRLSRKLINGIRDKQSGKTILDFLKSDGFANRNFMQLIHDDSLTFKEDIQKAQVSGQGDSLHEHIANLAGSPAIKKGILQTVKVVDELVKVMGRHKPENIVIEMARENQTTQKGQKNSRERMKRIEEGIKELGSQILKEHPVENTQLQNEKLYLYYLQNGRDMYVDQELDINRLSDYDVDHIVPQSFLKDDSIDNKVLTRSDKARGKSDNVPSEEVVKKMKNYWRQLLNAKLITQRKFDNLTKAERGGLSELDKAGFIKRQLVETRQITKHVAQILDSRMNTKYDENDKLIREVKVITLKSKLVSDFRKDFQFYKVREINNYHHAHDAYLNAVVGTALIKKYPKLESEFVYGDYKVYDVRKMIAKSEQEIGKATAKYFFYSNIMNFFKTEITLANGEIRKRPLIETNGETGEIVWDKGRDFATVRKVLSMPQVNIVKKTEVQTGGFSKESILPKRNSDKLIARKKDWDPKKYGGFDSPTVAYSVLVVAKVEKGKSKKLKSVKELLGITIMERSSFEKNPIDFLEAKGYKEVKKDLIIKLPKYSLFELENGRKRMLASAGELQKGNELALPSKYVNFLYLASHYEKLKGSPEDNEQKQLFVEQHKHYLDEIIEQISEFSKRVILADANLDKVLSAYNKHRDKPIREQAENIIHLFTLTNLGAPAAFKYFDTTIDRKRYTSTKEVLDATLIHQSITGLYETRIDLSQLGGDGGGSSPAPGGGGGTLNLEDEYRLYETSAEPEVSPGSTWLSDFPQAWAETGGMGLAVRQAPLIIPLKATSTPVSIKQYPMSQEAKLGIKPHIQRLLDQGILVPCQSPWNTPLLPVKKPGTNDYRPVQDLREVNKRVEDIHPTVPNPYNLLSGLPPSHRWYTVLDLKDAFFCLRLHPTSQPLFAFEWRDPGMGISGQLTWTRLPQGFKNSPTLFNEALHRDLADFRIQHPDLILLQYVDDILLAATSELDCQQGTRALLLTLGNLGYRASAKKAQLCQKQVKYLGYLLKEGQRWLTEARKETVMGQPTPKTPRQLREFLGKAGFCRLFIPGFAEMAAPLYPLTKPGTLFNWGPDQQKAYQEIKQALLTAPALGLPDLTKPFELFVDEKQGYAKGVLTQKLGPWRRPVAYLSKKLDPVAAGWPPCLRMVAAIAVLRKDAGKLTMGQPLVILAPHAVEALVKQPPDRWLSNARMTHYQAMLLDTDRVQFGPVVALNPATLLPLPEEGAPHDCLEILAETHGTRPDLTDQPIPDADHTWYTDGSSFLQEGQRKAGAAVTTETEVIWARALPAGTSAQRAELIALTQALKMAEGKRLNVYTDSRYAFATAHIHGEIYRRRGWLTSEGREIKNKSEILALLKALFLPKRLSIIHCLGHQKGDSAEARGNRLADQAAREAAIKTPPDTSTLLAGKRTADGSEFEKRTADGSEFESPKKKAKVE

SEQ ID NO: 1875 - protein, 2096 aa, synthetic construct
MPAAKRVKLDGGDKKYSIGLDIGTNSVGWAVITDEYKVPSKKFKVLGNTDRHSIKKNLIGALLFDSGETAEATRLKRTARRRYTRRKNRICYLQEIFSNEMAKVDDSFFHRLEESFLVEEDKKHERHPIFGNIVDEVAYHEKYPTIYHLRKKLVDSTDKADLRLIYLALAHMIKFRGHFLIEGDLNPDNSDVDKLFIQLVQTYNQLFEENPINASGVDAKAILSARLSKSRRLENLIAQLPGEKKNGLFGNLIALSLGLTPNFKSNFDLAEDAKLQLSKDTYDDDLDNLLAQIGDQYADLFLAAKNLSDAILLSDILRVNTEITKAPLSASMIKRYDEHHQDLTLLKALVRQQLPEKYKEIFFDQSKNGYAGYIDGGASQEEFYKFIKPILEKMDGTEELLVKLNREDLLRKQRTFDNGSIPHQIHLGELHAILRRQEDFYPFLKDNREKIEKILTFRIPYYVGPLARGNSRFAWMTRKSEETITPWNFEEVVDKGASAQSFIERMTNFDKNLPNEKVLPKHSLLYEYFTVYNELTKVKYVTEGMRKPAFLSGEQKKAIVDLLFKTNRKVTVKQLKEDYFKKIECFDSVEISGVEDRFNASLGTYHDLLKIIKDKDFLDNEENEDILEDIVLTLTLFEDREMIEERLKTYAHLFDDKVMKQLKRRRYTGWGRLSRKLINGIRDKQSGKTILDFLKSDGFANRNFMQLIHDDSLTFKEDIQKAQVSGQGDSLHEHIANLAGSPAIKKGILQTVKVVDELVKVMGRHKPENIVIEMARENQTTQKGQKNSRERMKRIEEGIKELGSQILKEHPVENTQLQNEKLYLYYLQNGRDMYVDQELDINRLSDYDVDHIVPQSFLKDDSIDNKVLTRSDKARGKSDNVPSEEVVKKMKNYWRQLLNAKLITQRKFDNLTKAERGGLSELDKAGFIKRQLVETRQITKHVAQILDSRMNTKYDENDKLIREVKVITLKSKLVSDFRKDFQFYKVREINNYHHAHDAYLNAVVGTALIKKYPKLESEFVYGDYKVYDVRKMIAKSEQEIGKATAKYFFYSNIMNFFKTEITLANGEIRKRPLIETNGETGEIVWDKGRDFATVRKVLSMPQVNIVKKTEVQTGGFSKESILPKRNSDKLIARKKDWDPKKYGGFDSPTVAYSVLVVAKVEKGKSKKLKSVKELLGITIMERSSFEKNPIDFLEAKGYKEVKKDLIIKLPKYSLFELENGRKRMLASAGELQKGNELALPSKYVNFLYLASHYEKLKGSPEDNEQKQLFVEQHKHYLDEIIEQISEFSKRVILADANLDKVLSAYNKHRDKPIREQAENIIHLFTLTNLGAPAAFKYFDTTIDRKRYTSTKEVLDATLIHQSITGLYETRIDLSQLGGDGGGSSGGGEAAAKGGTLNLEDEYRLYETSAEPEVSPGSTWLSDFPQAWAETGGMGLAVRQAPLIIPLKATSTPVSIKQYPMSQEAKLGIKPHIQRLLDQGILVPCQSPWNTPLLPVKKPGTNDYRPVQDLREVNKRVEDIHPTVPNPYNLLSGLPPSHRWYTVLDLKDAFFCLRLHPTSQPLFAFEWRDPGMGISGQLTWTRLPQGFKNSPTLFNEALHRDLADFRIQHPDLILLQYVDDILLAATSELDCQQGTRALLLTLGNLGYRASAKKAQLCQKQVKYLGYLLKEGQRWLTEARKETVMGQPTPKTPRQLREFLGKAGFCRLFIPGFAEMAAPLYPLTKPGTLFNWGPDQQKAYQEIKQALLTAPALGLPDLTKPFELFVDEKQGYAKGVLTQKLGPWRRPVAYLSKKLDPVAAGWPPCLRMVAAIAVLRKDAGKLTMGQPLVILAPHAVEALVKQPPDRWLSNARMTHYQAMLLDTDRVQFGPVVALNPATLLPLPEEGAPHDCLEILAETHGTRPDLTDQPIPDADHTWYTDGSSFLQEGQRKAGAAVTTETEVIWARALPAGTSAQRAELIALTQALKMAEGKRLNVYTDSRYAFATAHIHGEIYRRRGWLTSEGREIKNKSEILALLKALFLPKRLSIIHCLGHQKGDSAEARGNRLADQAAREAAIKTPPDTSTLLAGKRTADGSEFEKRTADGSEFESPKKKAKVE

SEQ ID NO: 1876 - protein, 2105 aa, synthetic construct
MPAAKRVKLDGGDKKYSIGLDIGTNSVGWAVITDEYKVPSKKFKVLGNTDRHSIKKNLIGALLFDSGETAEATRLKRTARRRYTRRKNRICYLQEIFSNEMAKVDDSFFHRLEESFLVEEDKKHERHPIFGNIVDEVAYHEKYPTIYHLRKKLVDSTDKADLRLIYLALAHMIKFRGHFLIEGDLNPDNSDVDKLFIQLVQTYNQLFEENPINASGVDAKAILSARLSKSRRLENLIAQLPGEKKNGLFGNLIALSLGLTPNFKSNFDLAEDAKLQLSKDTYDDDLDNLLAQIGDQYADLFLAAKNLSDAILLSDILRVNTEITKAPLSASMIKRYDEHHQDLTLLKALVRQQLPEKYKEIFFDQSKNGYAGYIDGGASQEEFYKFIKPILEKMDGTEELLVKLNREDLLRKQRTFDNGSIPHQIHLGELHAILRRQEDFYPFLKDNREKIEKILTFRIPYYVGPLARGNSRFAWMTRKSEETITPWNFEEVVDKGASAQSFIERMTNFDKNLPNEKVLPKHSLLYEYFTVYNELTKVKYVTEGMRKPAFLSGEQKKAIVDLLFKTNRKVTVKQLKEDYFKKIECFDSVEISGVEDRFNASLGTYHDLLKIIKDKDFLDNEENEDILEDIVLTLTLFEDREMIEERLKTYAHLFDDKVMKQLKRRRYTGWGRLSRKLINGIRDKQSGKTILDFLKSDGFANRNFMQLIHDDSLTFKEDIQKAQVSGQGDSLHEHIANLAGSPAIKKGILQTVKVVDELVKVMGRHKPENIVIEMARENQTTQKGQKNSRERMKRIEEGIKELGSQILKEHPVENTQLQNEKLYLYYLQNGRDMYVDQELDINRLSDYDVDHIVPQSFLKDDSIDNKVLTRSDKARGKSDNVPSEEVVKKMKNYWRQLLNAKLITQRKFDNLTKAERGGLSELDKAGFIKRQLVETRQITKHVAQILDSRMNTKYDENDKLIREVKVITLKSKLVSDFRKDFQFYKVREINNYHHAHDAYLNAVVGTALIKKYPKLESEFVYGDYKVYDVRKMIAKSEQEIGKATAKYFFYSNIMNFFKTEITLANGEIRKRPLIETNGETGEIVWDKGRDFATVRKVLSMPQVNIVKKTEVQTGGFSKESILPKRNSDKLIARKKDWDPKKYGGFDSPTVAYSVLVVAKVEKGKSKKLKSVKELLGITIMERSSFEKNPIDFLEAKGYKEVKKDLIIKLPKYSLFELENGRKRMLASAGELQKGNELALPSKYVNFLYLASHYEKLKGSPEDNEQKQLFVEQHKHYLDEIIEQISEFSKRVILADANLDKVLSAYNKHRDKPIREQAENIIHLFTLTNLGAPAAFKYFDTTIDRKRYTSTKEVLDATLIHQSITGLYETRIDLSQLGGDGGGGGGSGGGGSGGGGSGGGGSGGTLNLEDEYRLYETSAEPEVSPGSTWLSDFPQAWAETGGMGLAVRQAPLIIPLKATSTPVSIKQYPMSQEAKLGIKPHIQRLLDQGILVPCQSPWNTPLLPVKKPGTNDYRPVQDLREVNKRVEDIHPTVPNPYNLLSGLPPSHRWYTVLDLKDAFFCLRLHPTSQPLFAFEWRDPGMGISGQLTWTRLPQGFKNSPTLFNEALHRDLADFRIQHPDLILLQYVDDILLAATSELDCQQGTRALLLTLGNLGYRASAKKAQLCQKQVKYLGYLLKEGQRWLTEARKETVMGQPTPKTPRQLREFLGKAGFCRLFIPGFAEMAAPLYPLTKPGTLFNWGPDQQKAYQEIKQALLTAPALGLPDLTKPFELFVDEKQGYAKGVLTQKLGPWRRPVAYLSKKLDPVAAGWPPCLRMVAAIAVLRKDAGKLTMGQPLVILAPHAVEALVKQPPDRWLSNARMTHYQAMLLDTDRVQFGPVVALNPATLLPLPEEGAPHDCLEILAETHGTRPDLTDQPIPDADHTWYTDGSSFLQEGQRKAGAAVTTETEVIWARALPAGTSAQRAELIALTQALKMAEGKRLNVYTDSRYAFATAHIHGEIYRRRGWLTSEGREIKNKSEILALLKALFLPKRLSIIHCLGHQKGDSAEARGNRLADQAAREAAIKTPPDTSTLLAGKRTADGSEFEKRTADGSEFESPKKKAKVE

SEQ ID NO: 1877 - protein, 2097 aa, synthetic construct
MPAAKRVKLDGGDKKYSIGLDIGTNSVGWAVITDEYKVPSKKFKVLGNTDRHSIKKNLIGALLFDSGETAEATRLKRTARRRYTRRKNRICYLQEIFSNEMAKVDDSFFHRLEESFLVEEDKKHERHPIFGNIVDEVAYHEKYPTIYHLRKKLVDSTDKADLRLIYLALAHMIKFRGHFLIEGDLNPDNSDVDKLFIQLVQTYNQLFEENPINASGVDAKAILSARLSKSRRLENLIAQLPGEKKNGLFGNLIALSLGLTPNFKSNFDLAEDAKLQLSKDTYDDDLDNLLAQIGDQYADLFLAAKNLSDAILLSDILRVNTEITKAPLSASMIKRYDEHHQDLTLLKALVRQQLPEKYKEIFFDQSKNGYAGYIDGGASQEEFYKFIKPILEKMDGTEELLVKLNREDLLRKQRTFDNGSIPHQIHLGELHAILRRQEDFYPFLKDNREKIEKILTFRIPYYVGPLARGNSRFAWMTRKSEETITPWNFEEVVDKGASAQSFIERMTNFDKNLPNEKVLPKHSLLYEYFTVYNELTKVKYVTEGMRKPAFLSGEQKKAIVDLLFKTNRKVTVKQLKEDYFKKIECFDSVEISGVEDRFNASLGTYHDLLKIIKDKDFLDNEENEDILEDIVLTLTLFEDREMIEERLKTYAHLFDDKVMKQLKRRRYTGWGRLSRKLINGIRDKQSGKTILDFLKSDGFANRNFMQLIHDDSLTFKEDIQKAQVSGQGDSLHEHIANLAGSPAIKKGILQTVKVVDELVKVMGRHKPENIVIEMARENQTTQKGQKNSRERMKRIEEGIKELGSQILKEHPVENTQLQNEKLYLYYLQNGRDMYVDQELDINRLSDYDVDHIVPQSFLKDDSIDNKVLTRSDKARGKSDNVPSEEVVKKMKNYWRQLLNAKLITQRKFDNLTKAERGGLSELDKAGFIKRQLVETRQITKHVAQILDSRMNTKYDENDKLIREVKVITLKSKLVSDFRKDFQFYKVREINNYHHAHDAYLNAVVGTALIKKYPKLESEFVYGDYKVYDVRKMIAKSEQEIGKATAKYFFYSNIMNFFKTEITLANGEIRKRPLIETNGETGEIVWDKGRDFATVRKVLSMPQVNIVKKTEVQTGGFSKESILPKRNSDKLIARKKDWDPKKYGGFDSPTVAYSVLVVAKVEKGKSKKLKSVKELLGITIMERSSFEKNPIDFLEAKGYKEVKKDLIIKLPKYSLFELENGRKRMLASAGELQKGNELALPSKYVNFLYLASHYEKLKGSPEDNEQKQLFVEQHKHYLDEIIEQISEFSKRVILADANLDKVLSAYNKHRDKPIREQAENIIHLFTLTNLGAPAAFKYFDTTIDRKRYTSTKEVLDATLIHQSITGLYETRIDLSQLGGDGGGSSGSSGSSGSSGGTLNLEDEYRLYETSAEPEVSPGSTWLSDFPQAWAETGGMGLAVRQAPLIIPLKATSTPVSIKQYPMSQEAKLGIKPHIQRLLDQGILVPCQSPWNTPLLPVKKPGTNDYRPVQDLREVNKRVEDIHPTVPNPYNLLSGLPPSHRWYTVLDLKDAFFCLRLHPTSQPLFAFEWRDPGMGISGQLTWTRLPQGFKNSPTLFNEALHRDLADFRIQHPDLILLQYVDDILLAATSELDCQQGTRALLLTLGNLGYRASAKKAQLCQKQVKYLGYLLKEGQRWLTEARKETVMGQPTPKTPRQLREFLGKAGFCRLFIPGFAEMAAPLYPLTKPGTLFNWGPDQQKAYQEIKQALLTAPALGLPDLTKPFELFVDEKQGYAKGVLTQKLGPWRRPVAYLSKKLDPVAAGWPPCLRMVAAIAVLRKDAGKLTMGQPLVILAPHAVEALVKQPPDRWLSNARMTHYQAMLLDTDRVQFGPVVALNPATLLPLPEEGAPHDCLEILAETHGTRPDLTDQPIPDADHTWYTDGSSFLQEGQRKAGAAVTTETEVIWARALPAGTSAQRAELIALTQALKMAEGKRLNVYTDSRYAFATAHIHGEIYRRRGWLTSEGREIKNKSEILALLKALFLPKRLSIIHCLGHQKGDSAEARGNRLADQAAREAAIKTPPDTSTLLAGKRTADGSEFEKRTADGSEFESPKKKAKVE

SEQ ID NO: 1878 - protein, 2096 aa, synthetic construct
MPAAKRVKLDGGDKKYSIGLDIGTNSVGWAVITDEYKVPSKKFKVLGNTDRHSIKKNLIGALLFDSGETAEATRLKRTARRRYTRRKNRICYLQEIFSNEMAKVDDSFFHRLEESFLVEEDKKHERHPIFGNIVDEVAYHEKYPTIYHLRKKLVDSTDKADLRLIYLALAHMIKFRGHFLIEGDLNPDNSDVDKLFIQLVQTYNQLFEENPINASGVDAKAILSARLSKSRRLENLIAQLPGEKKNGLFGNLIALSLGLTPNFKSNFDLAEDAKLQLSKDTYDDDLDNLLAQIGDQYADLFLAAKNLSDAILLSDILRVNTEITKAPLSASMIKRYDEHHQDLTLLKALVRQQLPEKYKEIFFDQSKNGYAGYIDGGASQEEFYKFIKPILEKMDGTEELLVKLNREDLLRKQRTFDNGSIPHQIHLGELHAILRRQEDFYPFLKDNREKIEKILTFRIPYYVGPLARGNSRFAWMTRKSEETITPWNFEEVVDKGASAQSFIERMTNFDKNLPNEKVLPKHSLLYEYFTVYNELTKVKYVTEGMRKPAFLSGEQKKAIVDLLFKTNRKVTVKQLKEDYFKKIECFDSVEISGVEDRFNASLGTYHDLLKIIKDKDFLDNEENEDILEDIVLTLTLFEDREMIEERLKTYAHLFDDKVMKQLKRRRYTGWGRLSRKLINGIRDKQSGKTILDFLKSDGFANRNFMQLIHDDSLTFKEDIQKAQVSGQGDSLHEHIANLAGSPAIKKGILQTVKVVDELVKVMGRHKPENIVIEMARENQTTQKGQKNSRERMKRIEEGIKELGSQILKEHPVENTQLQNEKLYLYYLQNGRDMYVDQELDINRLSDYDVDHIVPQSFLKDDSIDNKVLTRSDKARGKSDNVPSEEVVKKMKNYWRQLLNAKLITQRKFDNLTKAERGGLSELDKAGFIKRQLVETRQITKHVAQILDSRMNTKYDENDKLIREVKVITLKSKLVSDFRKDFQFYKVREINNYHHAHDAYLNAVVGTALIKKYPKLESEFVYGDYKVYDVRKMIAKSEQEIGKATAKYFFYSNIMNFFKTEITLANGEIRKRPLIETNGETGEIVWDKGRDFATVRKVLSMPQVNIVKKTEVQTGGFSKESILPKRNSDKLIARKKDWDPKKYGGFDSPTVAYSVLVVAKVEKGKSKKLKSVKELLGITIMERSSFEKNPIDFLEAKGYKEVKKDLIIKLPKYSLFELENGRKRMLASAGELQKGNELALPSKYVNFLYLASHYEKLKGSPEDNEQKQLFVEQHKHYLDEIIEQISEFSKRVILADANLDKVLSAYNKHRDKPIREQAENIIHLFTLTNLGAPAAFKYFDTTIDRKRYTSTKEVLDATLIHQSITGLYETRIDLSQLGGDGGGGGEAAAKGSSGGTLNLEDEYRLYETSAEPEVSPGSTWLSDFPQAWAETGGMGLAVRQAPLIIPLKATSTPVSIKQYPMSQEAKLGIKPHIQRLLDQGILVPCQSPWNTPLLPVKKPGTNDYRPVQDLREVNKRVEDIHPTVPNPYNLLSGLPPSHRWYTVLDLKDAFFCLRLHPTSQPLFAFEWRDPGMGISGQLTWTRLPQGFKNSPTLFNEALHRDLADFRIQHPDLILLQYVDDILLAATSELDCQQGTRALLLTLGNLGYRASAKKAQLCQKQVKYLGYLLKEGQRWLTEARKETVMGQPTPKTPRQLREFLGKAGFCRLFIPGFAEMAAPLYPLTKPGTLFNWGPDQQKAYQEIKQALLTAPALGLPDLTKPFELFVDEKQGYAKGVLTQKLGPWRRPVAYLSKKLDPVAAGWPPCLRMVAAIAVLRKDAGKLTMGQPLVILAPHAVEALVKQPPDRWLSNARMTHYQAMLLDTDRVQFGPVVALNPATLLPLPEEGAPHDCLEILAETHGTRPDLTDQPIPDADHTWYTDGSSFLQEGQRKAGAAVTTETEVIWARALPAGTSAQRAELIALTQALKMAEGKRLNVYTDSRYAFATAHIHGEIYRRRGWLTSEGREIKNKSEILALLKALFLPKRLSIIHCLGHQKGDSAEARGNRLADQAAREAAIKTPPDTSTLLAGKRTADGSEFEKRTADGSEFESPKKKAKVE

SEQ ID NO: 1879 - protein, 2100 aa, synthetic construct
MPAAKRVKLDGGDKKYSIGLDIGTNSVGWAVITDEYKVPSKKFKVLGNTDRHSIKKNLIGALLFDSGETAEATRLKRTARRRYTRRKNRICYLQEIFSNEMAKVDDSFFHRLEESFLVEEDKKHERHPIFGNIVDEVAYHEKYPTIYHLRKKLVDSTDKADLRLIYLALAHMIKFRGHFLIEGDLNPDNSDVDKLFIQLVQTYNQLFEENPINASGVDAKAILSARLSKSRRLENLIAQLPGEKKNGLFGNLIALSLGLTPNFKSNFDLAEDAKLQLSKDTYDDDLDNLLAQIGDQYADLFLAAKNLSDAILLSDILRVNTEITKAPLSASMIKRYDEHHQDLTLLKALVRQQLPEKYKEIFFDQSKNGYAGYIDGGASQEEFYKFIKPILEKMDGTEELLVKLNREDLLRKQRTFDNGSIPHQIHLGELHAILRRQEDFYPFLKDNREKIEKILTFRIPYYVGPLARGNSRFAWMTRKSEETITPWNFEEVVDKGASAQSFIERMTNFDKNLPNEKVLPKHSLLYEYFTVYNELTKVKYVTEGMRKPAFLSGEQKKAIVDLLFKTNRKVTVKQLKEDYFKKIECFDSVEISGVEDRFNASLGTYHDLLKIIKDKDFLDNEENEDILEDIVLTLTLFEDREMIEERLKTYAHLFDDKVMKQLKRRRYTGWGRLSRKLINGIRDKQSGKTILDFLKSDGFANRNFMQLIHDDSLTFKEDIQKAQVSGQGDSLHEHIANLAGSPAIKKGILQTVKVVDELVKVMGRHKPENIVIEMARENQTTQKGQKNSRERMKRIEEGIKELGSQILKEHPVENTQLQNEKLYLYYLQNGRDMYVDQELDINRLSDYDVDHIVPQSFLKDDSIDNKVLTRSDKARGKSDNVPSEEVVKKMKNYWRQLLNAKLITQRKFDNLTKAERGGLSELDKAGFIKRQLVETRQITKHVAQILDSRMNTKYDENDKLIREVKVITLKSKLVSDFRKDFQFYKVREINNYHHAHDAYLNAVVGTALIKKYPKLESEFVYGDYKVYDVRKMIAKSEQEIGKATAKYFFYSNIMNFFKTEITLANGEIRKRPLIETNGETGEIVWDKGRDFATVRKVLSMPQVNIVKKTEVQTGGFSKESILPKRNSDKLIARKKDWDPKKYGGFDSPTVAYSVLVVAKVEKGKSKKLKSVKELLGITIMERSSFEKNPIDFLEAKGYKEVKKDLIIKLPKYSLFELENGRKRMLASAGELQKGNELALPSKYVNFLYLASHYEKLKGSPEDNEQKQLFVEQHKHYLDEIIEQISEFSKRVILADANLDKVLSAYNKHRDKPIREQAENIIHLFTLTNLGAPAAFKYFDTTIDRKRYTSTKEVLDATLIHQSITGLYETRIDLSQLGGDGGEAAAKEAAAKEAAAKGGTLNLEDEYRLYETSAEPEVSPGSTWLSDFPQAWAETGGMGLAVRQAPLIIPLKATSTPVSIKQYPMSQEAKLGIKPHIQRLLDQGILVPCQSPWNTPLLPVKKPGTNDYRPVQDLREVNKRVEDIHPTVPNPYNLLSGLPPSHRWYTVLDLKDAFFCLRLHPTSQPLFAFEWRDPGMGISGQLTWTRLPQGFKNSPTLFNEALHRDLADFRIQHPDLILLQYVDDILLAATSELDCQQGTRALLLTLGNLGYRASAKKAQLCQKQVKYLGYLLKEGQRWLTEARKETVMGQPTPKTPRQLREFLGKAGFCRLFIPGFAEMAAPLYPLTKPGTLFNWGPDQQKAYQEIKQALLTAPALGLPDLTKPFELFVDEKQGYAKGVLTQKLGPWRRPVAYLSKKLDPVAAGWPPCLRMVAAIAVLRKDAGKLTMGQPLVILAPHAVEALVKQPPDRWLSNARMTHYQAMLLDTDRVQFGPVVALNPATLLPLPEEGAPHDCLEILAETHGTRPDLTDQPIPDADHTWYTDGSSFLQEGQRKAGAAVTTETEVIWARALPAGTSAQRAELIALTQALKMAEGKRLNVYTDSRYAFATAHIHGEIYRRRGWLTSEGREIKNKSEILALLKALFLPKRLSIIHCLGHQKGDSAEARGNRLADQAAREAAIKTPPDTSTLLAGKRTADGSEFEKRTADGSEFESPKKKAKVE

SEQ ID NO: 1880 - protein, 2103 aa, synthetic construct
MPAAKRVKLDGGDKKYSIGLDIGTNSVGWAVITDEYKVPSKKFKVLGNTDRHSIKKNLIGALLFDSGETAEATRLKRTARRRYTRRKNRICYLQEIFSNEMAKVDDSFFHRLEESFLVEEDKKHERHPIFGNIVDEVAYHEKYPTIYHLRKKLVDSTDKADLRLIYLALAHMIKFRGHFLIEGDLNPDNSDVDKLFIQLVQTYNQLFEENPINASGVDAKAILSARLSKSRRLENLIAQLPGEKKNGLFGNLIALSLGLTPNFKSNFDLAEDAKLQLSKDTYDDDLDNLLAQIGDQYADLFLAAKNLSDAILLSDILRVNTEITKAPLSASMIKRYDEHHQDLTLLKALVRQQLPEKYKEIFFDQSKNGYAGYIDGGASQEEFYKFIKPILEKMDGTEELLVKLNREDLLRKQRTFDNGSIPHQIHLGELHAILRRQEDFYPFLKDNREKIEKILTFRIPYYVGPLARGNSRFAWMTRKSEETITPWNFEEVVDKGASAQSFIERMTNFDKNLPNEKVLPKHSLLYEYFTVYNELTKVKYVTEGMRKPAFLSGEQKKAIVDLLFKTNRKVTVKQLKEDYFKKIECFDSVEISGVEDRFNASLGTYHDLLKIIKDKDFLDNEENEDILEDIVLTLTLFEDREMIEERLKTYAHLFDDKVMKQLKRRRYTGWGRLSRKLINGIRDKQSGKTILDFLKSDGFANRNFMQLIHDDSLTFKEDIQKAQVSGQGDSLHEHIANLAGSPAIKKGILQTVKVVDELVKVMGRHKPENIVIEMARENQTTQKGQKNSRERMKRIEEGIKELGSQILKEHPVENTQLQNEKLYLYYLQNGRDMYVDQELDINRLSDYDVDHIVPQSFLKDDSIDNKVLTRSDKARGKSDNVPSEEVVKKMKNYWRQLLNAKLITQRKFDNLTKAERGGLSELDKAGFIKRQLVETRQITKHVAQILDSRMNTKYDENDKLIREVKVITLKSKLVSDFRKDFQFYKVREINNYHHAHDAYLNAVVGTALIKKYPKLESEFVYGDYKVYDVRKMIAKSEQEIGKATAKYFFYSNIMNFFKTEITLANGEIRKRPLIETNGETGEIVWDKGRDFATVRKVLSMPQVNIVKKTEVQTGGFSKESILPKRNSDKLIARKKDWDPKKYGGFDSPTVAYSVLVVAKVEKGKSKKLKSVKELLGITIMERSSFEKNPIDFLEAKGYKEVKKDLIIKLPKYSLFELENGRKRMLASAGELQKGNELALPSKYVNFLYLASHYEKLKGSPEDNEQKQLFVEQHKHYLDEIIEQISEFSKRVILADANLDKVLSAYNKHRDKPIREQAENIIHLFTLTNLGAPAAFKYFDTTIDRKRYTSTKEVLDATLIHQSITGLYETRIDLSQLGGDGGGGSGGSGGSGGSGGSGGSGGTLNLEDEYRLYETSAEPEVSPGSTWLSDFPQAWAETGGMGLAVRQAPLIIPLKATSTPVSIKQYPMSQEAKLGIKPHIQRLLDQGILVPCQSPWNTPLLPVKKPGTNDYRPVQDLREVNKRVEDIHPTVPNPYNLLSGLPPSHRWYTVLDLKDAFFCLRLHPTSQPLFAFEWRDPGMGISGQLTWTRLPQGFKNSPTLFNEALHRDLADFRIQHPDLILLQYVDDILLAATSELDCQQGTRALLLTLGNLGYRASAKKAQLCQKQVKYLGYLLKEGQRWLTEARKETVMGQPTPKTPRQLREFLGKAGFCRLFIPGFAEMAAPLYPLTKPGTLFNWGPDQQKAYQEIKQALLTAPALGLPDLTKPFELFVDEKQGYAKGVLTQKLGPWRRPVAYLSKKLDPVAAGWPPCLRMVAAIAVLRKDAGKLTMGQPLVILAPHAVEALVKQPPDRWLSNARMTHYQAMLLDTDRVQFGPVVALNPATLLPLPEEGAPHDCLEILAETHGTRPDLTDQPIPDADHTWYTDGSSFLQEGQRKAGAAVTTETEVIWARALPAGTSAQRAELIALTQALKMAEGKRLNVYTDSRYAFATAHIHGEIYRRRGWLTSEGREIKNKSEILALLKALFLPKRLSIIHCLGHQKGDSAEARGNRLADQAAREAAIKTPPDTSTLLAGKRTADGSEFEKRTADGSEFESPKKKAKVE

SEQ ID NO: 1881 - protein, 2094 aa, synthetic construct
MPAAKRVKLDGGDKKYSIGLDIGTNSVGWAVITDEYKVPSKKFKVLGNTDRHSIKKNLIGALLFDSGETAEATRLKRTARRRYTRRKNRICYLQEIFSNEMAKVDDSFFHRLEESFLVEEDKKHERHPIFGNIVDEVAYHEKYPTIYHLRKKLVDSTDKADLRLIYLALAHMIKFRGHFLIEGDLNPDNSDVDKLFIQLVQTYNQLFEENPINASGVDAKAILSARLSKSRRLENLIAQLPGEKKNGLFGNLIALSLGLTPNFKSNFDLAEDAKLQLSKDTYDDDLDNLLAQIGDQYADLFLAAKNLSDAILLSDILRVNTEITKAPLSASMIKRYDEHHQDLTLLKALVRQQLPEKYKEIFFDQSKNGYAGYIDGGASQEEFYKFIKPILEKMDGTEELLVKLNREDLLRKQRTFDNGSIPHQIHLGELHAILRRQEDFYPFLKDNREKIEKILTFRIPYYVGPLARGNSRFAWMTRKSEETITPWNFEEVVDKGASAQSFIERMTNFDKNLPNEKVLPKHSLLYEYFTVYNELTKVKYVTEGMRKPAFLSGEQKKAIVDLLFKTNRKVTVKQLKEDYFKKIECFDSVEISGVEDRFNASLGTYHDLLKIIKDKDFLDNEENEDILEDIVLTLTLFEDREMIEERLKTYAHLFDDKVMKQLKRRRYTGWGRLSRKLINGIRDKQSGKTILDFLKSDGFANRNFMQLIHDDSLTFKEDIQKAQVSGQGDSLHEHIANLAGSPAIKKGILQTVKVVDELVKVMGRHKPENIVIEMARENQTTQKGQKNSRERMKRIEEGIKELGSQILKEHPVENTQLQNEKLYLYYLQNGRDMYVDQELDINRLSDYDVDHIVPQSFLKDDSIDNKVLTRSDKARGKSDNVPSEEVVKKMKNYWRQLLNAKLITQRKFDNLTKAERGGLSELDKAGFIKRQLVETRQITKHVAQILDSRMNTKYDENDKLIREVKVITLKSKLVSDFRKDFQFYKVREINNYHHAHDAYLNAVVGTALIKKYPKLESEFVYGDYKVYDVRKMIAKSEQEIGKATAKYFFYSNIMNFFKTEITLANGEIRKRPLIETNGETGEIVWDKGRDFATVRKVLSMPQVNIVKKTEVQTGGFSKESILPKRNSDKLIARKKDWDPKKYGGFDSPTVAYSVLVVAKVEKGKSKKLKSVKELLGITIMERSSFEKNPIDFLEAKGYKEVKKDLIIKLPKYSLFELENGRKRMLASAGELQKGNELALPSKYVNFLYLASHYEKLKGSPEDNEQKQLFVEQHKHYLDEIIEQISEFSKRVILADANLDKVLSAYNKHRDKPIREQAENIIHLFTLTNLGAPAAFKYFDTTIDRKRYTSTKEVLDATLIHQSITGLYETRIDLSQLGGDGGPAPAPAPAPGGTLNLEDEYRLYETSAEPEVSPGSTWLSDFPQAWAETGGMGLAVRQAPLIIPLKATSTPVSIKQYPMSQEAKLGIKPHIQRLLDQGILVPCQSPWNTPLLPVKKPGTNDYRPVQDLREVNKRVEDIHPTVPNPYNLLSGLPPSHRWYTVLDLKDAFFCLRLHPTSQPLFAFEWRDPGMGISGQLTWTRLPQGFKNSPTLFNEALHRDLADFRIQHPDLILLQYVDDILLAATSELDCQQGTRALLLTLGNLGYRASAKKAQLCQKQVKYLGYLLKEGQRWLTEARKETVMGQPTPKTPRQLREFLGKAGFCRLFIPGFAEMAAPLYPLTKPGTLFNWGPDQQKAYQEIKQALLTAPALGLPDLTKPFELFVDEKQGYAKGVLTQKLGPWRRPVAYLSKKLDPVAAGWPPCLRMVAAIAVLRKDAGKLTMGQPLVILAPHAVEALVKQPPDRWLSNARMTHYQAMLLDTDRVQFGPVVALNPATLLPLPEEGAPHDCLEILAETHGTRPDLTDQPIPDADHTWYTDGSSFLQEGQRKAGAAVTTETEVIWARALPAGTSAQRAELIALTQALKMAEGKRLNVYTDSRYAFATAHIHGEIYRRRGWLTSEGREIKNKSEILALLKALFLPKRLSIIHCLGHQKGDSAEARGNRLADQAAREAAIKTPPDTSTLLAGKRTADGSEFEKRTADGSEFESPKKKAKVE

SEQ ID NO: 1882 - protein, 2093 aa, synthetic construct
MPAAKRVKLDGGDKKYSIGLDIGTNSVGWAVITDEYKVPSKKFKVLGNTDRHSIKKNLIGALLFDSGETAEATRLKRTARRRYTRRKNRICYLQEIFSNEMAKVDDSFFHRLEESFLVEEDKKHERHPIFGNIVDEVAYHEKYPTIYHLRKKLVDSTDKADLRLIYLALAHMIKFRGHFLIEGDLNPDNSDVDKLFIQLVQTYNQLFEENPINASGVDAKAILSARLSKSRRLENLIAQLPGEKKNGLFGNLIALSLGLTPNFKSNFDLAEDAKLQLSKDTYDDDLDNLLAQIGDQYADLFLAAKNLSDAILLSDILRVNTEITKAPLSASMIKRYDEHHQDLTLLKALVRQQLPEKYKEIFFDQSKNGYAGYIDGGASQEEFYKFIKPILEKMDGTEELLVKLNREDLLRKQRTFDNGSIPHQIHLGELHAILRRQEDFYPFLKDNREKIEKILTFRIPYYVGPLARGNSRFAWMTRKSEETITPWNFEEVVDKGASAQSFIERMTNFDKNLPNEKVLPKHSLLYEYFTVYNELTKVKYVTEGMRKPAFLSGEQKKAIVDLLFKTNRKVTVKQLKEDYFKKIECFDSVEISGVEDRFNASLGTYHDLLKIIKDKDFLDNEENEDILEDIVLTLTLFEDREMIEERLKTYAHLFDDKVMKQLKRRRYTGWGRLSRKLINGIRDKQSGKTILDFLKSDGFANRNFMQLIHDDSLTFKEDIQKAQVSGQGDSLHEHIANLAGSPAIKKGILQTVKVVDELVKVMGRHKPENIVIEMARENQTTQKGQKNSRERMKRIEEGIKELGSQILKEHPVENTQLQNEKLYLYYLQNGRDMYVDQELDINRLSDYDVDHIVPQSFLKDDSIDNKVLTRSDKARGKSDNVPSEEVVKKMKNYWRQLLNAKLITQRKFDNLTKAERGGLSELDKAGFIKRQLVETRQITKHVAQILDSRMNTKYDENDKLIREVKVITLKSKLVSDFRKDFQFYKVREINNYHHAHDAYLNAVVGTALIKKYPKLESEFVYGDYKVYDVRKMIAKSEQEIGKATAKYFFYSNIMNFFKTEITLANGEIRKRPLIETNGETGEIVWDKGRDFATVRKVLSMPQVNIVKKTEVQTGGFSKESILPKRNSDKLIARKKDWDPKKYGGFDSPTVAYSVLVVAKVEKGKSKKLKSVKELLGITIMERSSFEKNPIDFLEAKGYKEVKKDLIIKLPKYSLFELENGRKRMLASAGELQKGNELALPSKYVNFLYLASHYEKLKGSPEDNEQKQLFVEQHKHYLDEIIEQISEFSKRVILADANLDKVLSAYNKHRDKPIREQAENIIHLFTLTNLGAPAAFKYFDTTIDRKRYTSTKEVLDATLIHQSITGLYETRIDLSQLGGDGGEAAAKGGSGGTLNLEDEYRLYETSAEPEVSPGSTWLSDFPQAWAETGGMGLAVRQAPLIIPLKATSTPVSIKQYPMSQEAKLGIKPHIQRLLDQGILVPCQSPWNTPLLPVKKPGTNDYRPVQDLREVNKRVEDIHPTVPNPYNLLSGLPPSHRWYTVLDLKDAFFCLRLHPTSQPLFAFEWRDPGMGISGQLTWTRLPQGFKNSPTLFNEALHRDLADFRIQHPDLILLQYVDDILLAATSELDCQQGTRALLLTLGNLGYRASAKKAQLCQKQVKYLGYLLKEGQRWLTEARKETVMGQPTPKTPRQLREFLGKAGFCRLFIPGFAEMAAPLYPLTKPGTLFNWGPDQQKAYQEIKQALLTAPALGLPDLTKPFELFVDEKQGYAKGVLTQKLGPWRRPVAYLSKKLDPVAAGWPPCLRMVAAIAVLRKDAGKLTMGQPLVILAPHAVEALVKQPPDRWLSNARMTHYQAMLLDTDRVQFGPVVALNPATLLPLPEEGAPHDCLEILAETHGTRPDLTDQPIPDADHTWYTDGSSFLQEGQRKAGAAVTTETEVIWARALPAGTSAQRAELIALTQALKMAEGKRLNVYTDSRYAFATAHIHGEIYRRRGWLTSEGREIKNKSEILALLKALFLPKRLSIIHCLGHQKGDSAEARGNRLADQAAREAAIKTPPDTSTLLAGKRTADGSEFEKRTADGSEFESPKKKAKVE

SEQ ID NO: 1883 - protein, 2094 aa, synthetic construct
MPAAKRVKLDGGDKKYSIGLDIGTNSVGWAVITDEYKVPSKKFKVLGNTDRHSIKKNLIGALLFDSGETAEATRLKRTARRRYTRRKNRICYLQEIFSNEMAKVDDSFFHRLEESFLVEEDKKHERHPIFGNIVDEVAYHEKYPTIYHLRKKLVDSTDKADLRLIYLALAHMIKFRGHFLIEGDLNPDNSDVDKLFIQLVQTYNQLFEENPINASGVDAKAILSARLSKSRRLENLIAQLPGEKKNGLFGNLIALSLGLTPNFKSNFDLAEDAKLQLSKDTYDDDLDNLLAQIGDQYADLFLAAKNLSDAILLSDILRVNTEITKAPLSASMIKRYDEHHQDLTLLKALVRQQLPEKYKEIFFDQSKNGYAGYIDGGASQEEFYKFIKPILEKMDGTEELLVKLNREDLLRKQRTFDNGSIPHQIHLGELHAILRRQEDFYPFLKDNREKIEKILTFRIPYYVGPLARGNSRFAWMTRKSEETITPWNFEEVVDKGASAQSFIERMTNFDKNLPNEKVLPKHSLLYEYFTVYNELTKVKYVTEGMRKPAFLSGEQKKAIVDLLFKTNRKVTVKQLKEDYFKKIECFDSVEISGVEDRFNASLGTYHDLLKIIKDKDFLDNEENEDILEDIVLTLTLFEDREMIEERLKTYAHLFDDKVMKQLKRRRYTGWGRLSRKLINGIRDKQSGKTILDFLKSDGFANRNFMQLIHDDSLTFKEDIQKAQVSGQGDSLHEHIANLAGSPAIKKGILQTVKVVDELVKVMGRHKPENIVIEMARENQTTQKGQKNSRERMKRIEEGIKELGSQILKEHPVENTQLQNEKLYLYYLQNGRDMYVDQELDINRLSDYDVDHIVPQSFLKDDSIDNKVLTRSDKARGKSDNVPSEEVVKKMKNYWRQLLNAKLITQRKFDNLTKAERGGLSELDKAGFIKRQLVETRQITKHVAQILDSRMNTKYDENDKLIREVKVITLKSKLVSDFRKDFQFYKVREINNYHHAHDAYLNAVVGTALIKKYPKLESEFVYGDYKVYDVRKMIAKSEQEIGKATAKYFFYSNIMNFFKTEITLANGEIRKRPLIETNGETGEIVWDKGRDFATVRKVLSMPQVNIVKKTEVQTGGFSKESILPKRNSDKLIARKKDWDPKKYGGFDSPTVAYSVLVVAKVEKGKSKKLKSVKELLGITIMERSSFEKNPIDFLEAKGYKEVKKDLIIKLPKYSLFELENGRKRMLASAGELQKGNELALPSKYVNFLYLASHYEKLKGSPEDNEQKQLFVEQHKHYLDEIIEQISEFSKRVILADANLDKVLSAYNKHRDKPIREQAENIIHLFTLTNLGAPAAFKYFDTTIDRKRYTSTKEVLDATLIHQSITGLYETRIDLSQLGGDGGPAPGSSGGSGGTLNLEDEYRLYETSAEPEVSPGSTWLSDFPQAWAETGGMGLAVRQAPLIIPLKATSTPVSIKQYPMSQEAKLGIKPHIQRLLDQGILVPCQSPWNTPLLPVKKPGTNDYRPVQDLREVNKRVEDIHPTVPNPYNLLSGLPPSHRWYTVLDLKDAFFCLRLHPTSQPLFAFEWRDPGMGISGQLTWTRLPQGFKNSPTLFNEALHRDLADFRIQHPDLILLQYVDDILLAATSELDCQQGTRALLLTLGNLGYRASAKKAQLCQKQVKYLGYLLKEGQRWLTEARKETVMGQPTPKTPRQLREFLGKAGFCRLFIPGFAEMAAPLYPLTKPGTLFNWGPDQQKAYQEIKQALLTAPALGLPDLTKPFELFVDEKQGYAKGVLTQKLGPWRRPVAYLSKKLDPVAAGWPPCLRMVAAIAVLRKDAGKLTMGQPLVILAPHAVEALVKQPPDRWLSNARMTHYQAMLLDTDRVQFGPVVALNPATLLPLPEEGAPHDCLEILAETHGTRPDLTDQPIPDADHTWYTDGSSFLQEGQRKAGAAVTTETEVIWARALPAGTSAQRAELIALTQALKMAEGKRLNVYTDSRYAFATAHIHGEIYRRRGWLTSEGREIKNKSEILALLKALFLPKRLSIIHCLGHQKGDSAEARGNRLADQAAREAAIKTPPDTSTLLAGKRTADGSEFEKRTADGSEFESPKKKAKVE

SEQ ID NO: 1884 - protein, 2094 aa, synthetic construct
MPAAKRVKLDGGDKKYSIGLDIGTNSVGWAVITDEYKVPSKKFKVLGNTDRHSIKKNLIGALLFDSGETAEATRLKRTARRRYTRRKNRICYLQEIFSNEMAKVDDSFFHRLEESFLVEEDKKHERHPIFGNIVDEVAYHEKYPTIYHLRKKLVDSTDKADLRLIYLALAHMIKFRGHFLIEGDLNPDNSDVDKLFIQLVQTYNQLFEENPINASGVDAKAILSARLSKSRRLENLIAQLPGEKKNGLFGNLIALSLGLTPNFKSNFDLAEDAKLQLSKDTYDDDLDNLLAQIGDQYADLFLAAKNLSDAILLSDILRVNTEITKAPLSASMIKRYDEHHQDLTLLKALVRQQLPEKYKEIFFDQSKNGYAGYIDGGASQEEFYKFIKPILEKMDGTEELLVKLNREDLLRKQRTFDNGSIPHQIHLGELHAILRRQEDFYPFLKDNREKIEKILTFRIPYYVGPLARGNSRFAWMTRKSEETITPWNFEEVVDKGASAQSFIERMTNFDKNLPNEKVLPKHSLLYEYFTVYNELTKVKYVTEGMRKPAFLSGEQKKAIVDLLFKTNRKVTVKQLKEDYFKKIECFDSVEISGVEDRFNASLGTYHDLLKIIKDKDFLDNEENEDILEDIVLTLTLFEDREMIEERLKTYAHLFDDKVMKQLKRRRYTGWGRLSRKLINGIRDKQSGKTILDFLKSDGFANRNFMQLIHDDSLTFKEDIQKAQVSGQGDSLHEHIANLAGSPAIKKGILQTVKVVDELVKVMGRHKPENIVIEMARENQTTQKGQKNSRERMKRIEEGIKELGSQILKEHPVENTQLQNEKLYLYYLQNGRDMYVDQELDINRLSDYDVDHIVPQSFLKDDSIDNKVLTRSDKARGKSDNVPSEEVVKKMKNYWRQLLNAKLITQRKFDNLTKAERGGLSELDKAGFIKRQLVETRQITKHVAQILDSRMNTKYDENDKLIREVKVITLKSKLVSDFRKDFQFYKVREINNYHHAHDAYLNAVVGTALIKKYPKLESEFVYGDYKVYDVRKMIAKSEQEIGKATAKYFFYSNIMNFFKTEITLANGEIRKRPLIETNGETGEIVWDKGRDFATVRKVLSMPQVNIVKKTEVQTGGFSKESILPKRNSDKLIARKKDWDPKKYGGFDSPTVAYSVLVVAKVEKGKSKKLKSVKELLGITIMERSSFEKNPIDFLEAKGYKEVKKDLIIKLPKYSLFELENGRKRMLASAGELQKGNELALPSKYVNFLYLASHYEKLKGSPEDNEQKQLFVEQHKHYLDEIIEQISEFSKRVILADANLDKVLSAYNKHRDKPIREQAENIIHLFTLTNLGAPAAFKYFDTTIDRKRYTSTKEVLDATLIHQSITGLYETRIDLSQLGGDGGGGGGSSGGSGGTLNLEDEYRLYETSAEPEVSPGSTWLSDFPQAWAETGGMGLAVRQAPLIIPLKATSTPVSIKQYPMSQEAKLGIKPHIQRLLDQGILVPCQSPWNTPLLPVKKPGTNDYRPVQDLREVNKRVEDIHPTVPNPYNLLSGLPPSHRWYTVLDLKDAFFCLRLHPTSQPLFAFEWRDPGMGISGQLTWTRLPQGFKNSPTLFNEALHRDLADFRIQHPDLILLQYVDDILLAATSELDCQQGTRALLLTLGNLGYRASAKKAQLCQKQVKYLGYLLKEGQRWLTEARKETVMGQPTPKTPRQLREFLGKAGFCRLFIPGFAEMAAPLYPLTKPGTLFNWGPDQQKAYQEIKQALLTAPALGLPDLTKPFELFVDEKQGYAKGVLTQKLGPWRRPVAYLSKKLDPVAAGWPPCLRMVAAIAVLRKDAGKLTMGQPLVILAPHAVEALVKQPPDRWLSNARMTHYQAMLLDTDRVQFGPVVALNPATLLPLPEEGAPHDCLEILAETHGTRPDLTDQPIPDADHTWYTDGSSFLQEGQRKAGAAVTTETEVIWARALPAGTSAQRAELIALTQALKMAEGKRLNVYTDSRYAFATAHIHGEIYRRRGWLTSEGREIKNKSEILALLKALFLPKRLSIIHCLGHQKGDSAEARGNRLADQAAREAAIKTPPDTSTLLAGKRTADGSEFEKRTADGSEFESPKKKAKVE

SEQ ID NO: 1885 - protein, 2090 aa, synthetic construct
MPAAKRVKLDGGDKKYSIGLDIGTNSVGWAVITDEYKVPSKKFKVLGNTDRHSIKKNLIGALLFDSGETAEATRLKRTARRRYTRRKNRICYLQEIFSNEMAKVDDSFFHRLEESFLVEEDKKHERHPIFGNIVDEVAYHEKYPTIYHLRKKLVDSTDKADLRLIYLALAHMIKFRGHFLIEGDLNPDNSDVDKLFIQLVQTYNQLFEENPINASGVDAKAILSARLSKSRRLENLIAQLPGEKKNGLFGNLIALSLGLTPNFKSNFDLAEDAKLQLSKDTYDDDLDNLLAQIGDQYADLFLAAKNLSDAILLSDILRVNTEITKAPLSASMIKRYDEHHQDLTLLKALVRQQLPEKYKEIFFDQSKNGYAGYIDGGASQEEFYKFIKPILEKMDGTEELLVKLNREDLLRKQRTFDNGSIPHQIHLGELHAILRRQEDFYPFLKDNREKIEKILTFRIPYYVGPLARGNSRFAWMTRKSEETITPWNFEEVVDKGASAQSFIERMTNFDKNLPNEKVLPKHSLLYEYFTVYNELTKVKYVTEGMRKPAFLSGEQKKAIVDLLFKTNRKVTVKQLKEDYFKKIECFDSVEISGVEDRFNASLGTYHDLLKIIKDKDFLDNEENEDILEDIVLTLTLFEDREMIEERLKTYAHLFDDKVMKQLKRRRYTGWGRLSRKLINGIRDKQSGKTILDFLKSDGFANRNFMQLIHDDSLTFKEDIQKAQVSGQGDSLHEHIANLAGSPAIKKGILQTVKVVDELVKVMGRHKPENIVIEMARENQTTQKGQKNSRERMKRIEEGIKELGSQILKEHPVENTQLQNEKLYLYYLQNGRDMYVDQELDINRLSDYDVDHIVPQSFLKDDSIDNKVLTRSDKARGKSDNVPSEEVVKKMKNYWRQLLNAKLITQRKFDNLTKAERGGLSELDKAGFIKRQLVETRQITKHVAQILDSRMNTKYDENDKLIREVKVITLKSKLVSDFRKDFQFYKVREINNYHHAHDAYLNAVVGTALIKKYPKLESEFVYGDYKVYDVRKMIAKSEQEIGKATAKYFFYSNIMNFFKTEITLANGEIRKRPLIETNGETGEIVWDKGRDFATVRKVLSMPQVNIVKKTEVQTGGFSKESILPKRNSDKLIARKKDWDPKKYGGFDSPTVAYSVLVVAKVEKGKSKKLKSVKELLGITIMERSSFEKNPIDFLEAKGYKEVKKDLIIKLPKYSLFELENGRKRMLASAGELQKGNELALPSKYVNFLYLASHYEKLKGSPEDNEQKQLFVEQHKHYLDEIIEQISEFSKRVILADANLDKVLSAYNKHRDKPIREQAENIIHLFTLTNLGAPAAFKYFDTTIDRKRYTSTKEVLDATLIHQSITGLYETRIDLSQLGGDGGGGGGSGGTLNLEDEYRLYETSAEPEVSPGSTWLSDFPQAWAETGGMGLAVRQAPLIIPLKATSTPVSIKQYPMSQEAKLGIKPHIQRLLDQGILVPCQSPWNTPLLPVKKPGTNDYRPVQDLREVNKRVEDIHPTVPNPYNLLSGLPPSHRWYTVLDLKDAFFCLRLHPTSQPLFAFEWRDPGMGISGQLTWTRLPQGFKNSPTLFNEALHRDLADFRIQHPDLILLQYVDDILLAATSELDCQQGTRALLLTLGNLGYRASAKKAQLCQKQVKYLGYLLKEGQRWLTEARKETVMGQPTPKTPRQLREFLGKAGFCRLFIPGFAEMAAPLYPLTKPGTLFNWGPDQQKAYQEIKQALLTAPALGLPDLTKPFELFVDEKQGYAKGVLTQKLGPWRRPVAYLSKKLDPVAAGWPPCLRMVAAIAVLRKDAGKLTMGQPLVILAPHAVEALVKQPPDRWLSNARMTHYQAMLLDTDRVQFGPVVALNPATLLPLPEEGAPHDCLEILAETHGTRPDLTDQPIPDADHTWYTDGSSFLQEGQRKAGAAVTTETEVIWARALPAGTSAQRAELIALTQALKMAEGKRLNVYTDSRYAFATAHIHGEIYRRRGWLTSEGREIKNKSEILALLKALFLPKRLSIIHCLGHQKGDSAEARGNRLADQAAREAAIKTPPDTSTLLAGKRTADGSEFEKRTADGSEFESPKKKAKVE

SEQ ID NO: 1886 - protein, 2096 aa, synthetic construct
MPAAKRVKLDGGDKKYSIGLDIGTNSVGWAVITDEYKVPSKKFKVLGNTDRHSIKKNLIGALLFDSGETAEATRLKRTARRRYTRRKNRICYLQEIFSNEMAKVDDSFFHRLEESFLVEEDKKHERHPIFGNIVDEVAYHEKYPTIYHLRKKLVDSTDKADLRLIYLALAHMIKFRGHFLIEGDLNPDNSDVDKLFIQLVQTYNQLFEENPINASGVDAKAILSARLSKSRRLENLIAQLPGEKKNGLFGNLIALSLGLTPNFKSNFDLAEDAKLQLSKDTYDDDLDNLLAQIGDQYADLFLAAKNLSDAILLSDILRVNTEITKAPLSASMIKRYDEHHQDLTLLKALVRQQLPEKYKEIFFDQSKNGYAGYIDGGASQEEFYKFIKPILEKMDGTEELLVKLNREDLLRKQRTFDNGSIPHQIHLGELHAILRRQEDFYPFLKDNREKIEKILTFRIPYYVGPLARGNSRFAWMTRKSEETITPWNFEEVVDKGASAQSFIERMTNFDKNLPNEKVLPKHSLLYEYFTVYNELTKVKYVTEGMRKPAFLSGEQKKAIVDLLFKTNRKVTVKQLKEDYFKKIECFDSVEISGVEDRFNASLGTYHDLLKIIKDKDFLDNEENEDILEDIVLTLTLFEDREMIEERLKTYAHLFDDKVMKQLKRRRYTGWGRLSRKLINGIRDKQSGKTILDFLKSDGFANRNFMQLIHDDSLTFKEDIQKAQVSGQGDSLHEHIANLAGSPAIKKGILQTVKVVDELVKVMGRHKPENIVIEMARENQTTQKGQKNSRERMKRIEEGIKELGSQILKEHPVENTQLQNEKLYLYYLQNGRDMYVDQELDINRLSDYDVDHIVPQSFLKDDSIDNKVLTRSDKARGKSDNVPSEEVVKKMKNYWRQLLNAKLITQRKFDNLTKAERGGLSELDKAGFIKRQLVETRQITKHVAQILDSRMNTKYDENDKLIREVKVITLKSKLVSDFRKDFQFYKVREINNYHHAHDAYLNAVVGTALIKKYPKLESEFVYGDYKVYDVRKMIAKSEQEIGKATAKYFFYSNIMNFFKTEITLANGEIRKRPLIETNGETGEIVWDKGRDFATVRKVLSMPQVNIVKKTEVQTGGFSKESILPKRNSDKLIARKKDWDPKKYGGFDSPTVAYSVLVVAKVEKGKSKKLKSVKELLGITIMERSSFEKNPIDFLEAKGYKEVKKDLIIKLPKYSLFELENGRKRMLASAGELQKGNELALPSKYVNFLYLASHYEKLKGSPEDNEQKQLFVEQHKHYLDEIIEQISEFSKRVILADANLDKVLSAYNKHRDKPIREQAENIIHLFTLTNLGAPAAFKYFDTTIDRKRYTSTKEVLDATLIHQSITGLYETRIDLSQLGGDGGGGGEAAAKPAPGGTLNLEDEYRLYETSAEPEVSPGSTWLSDFPQAWAETGGMGLAVRQAPLIIPLKATSTPVSIKQYPMSQEAKLGIKPHIQRLLDQGILVPCQSPWNTPLLPVKKPGTNDYRPVQDLREVNKRVEDIHPTVPNPYNLLSGLPPSHRWYTVLDLKDAFFCLRLHPTSQPLFAFEWRDPGMGISGQLTWTRLPQGFKNSPTLFNEALHRDLADFRIQHPDLILLQYVDDILLAATSELDCQQGTRALLLTLGNLGYRASAKKAQLCQKQVKYLGYLLKEGQRWLTEARKETVMGQPTPKTPRQLREFLGKAGFCRLFIPGFAEMAAPLYPLTKPGTLFNWGPDQQKAYQEIKQALLTAPALGLPDLTKPFELFVDEKQGYAKGVLTQKLGPWRRPVAYLSKKLDPVAAGWPPCLRMVAAIAVLRKDAGKLTMGQPLVILAPHAVEALVKQPPDRWLSNARMTHYQAMLLDTDRVQFGPVVALNPATLLPLPEEGAPHDCLEILAETHGTRPDLTDQPIPDADHTWYTDGSSFLQEGQRKAGAAVTTETEVIWARALPAGTSAQRAELIALTQALKMAEGKRLNVYTDSRYAFATAHIHGEIYRRRGWLTSEGREIKNKSEILALLKALFLPKRLSIIHCLGHQKGDSAEARGNRLADQAAREAAIKTPPDTSTLLAGKRTADGSEFEKRTADGSEFESPKKKAKVE

SEQ ID NO: 1887 - protein, 2091 aa, synthetic construct
MPAAKRVKLDGGDKKYSIGLDIGTNSVGWAVITDEYKVPSKKFKVLGNTDRHSIKKNLIGALLFDSGETAEATRLKRTARRRYTRRKNRICYLQEIFSNEMAKVDDSFFHRLEESFLVEEDKKHERHPIFGNIVDEVAYHEKYPTIYHLRKKLVDSTDKADLRLIYLALAHMIKFRGHFLIEGDLNPDNSDVDKLFIQLVQTYNQLFEENPINASGVDAKAILSARLSKSRRLENLIAQLPGEKKNGLFGNLIALSLGLTPNFKSNFDLAEDAKLQLSKDTYDDDLDNLLAQIGDQYADLFLAAKNLSDAILLSDILRVNTEITKAPLSASMIKRYDEHHQDLTLLKALVRQQLPEKYKEIFFDQSKNGYAGYIDGGASQEEFYKFIKPILEKMDGTEELLVKLNREDLLRKQRTFDNGSIPHQIHLGELHAILRRQEDFYPFLKDNREKIEKILTFRIPYYVGPLARGNSRFAWMTRKSEETITPWNFEEVVDKGASAQSFIERMTNFDKNLPNEKVLPKHSLLYEYFTVYNELTKVKYVTEGMRKPAFLSGEQKKAIVDLLFKTNRKVTVKQLKEDYFKKIECFDSVEISGVEDRFNASLGTYHDLLKIIKDKDFLDNEENEDILEDIVLTLTLFEDREMIEERLKTYAHLFDDKVMKQLKRRRYTGWGRLSRKLINGIRDKQSGKTILDFLKSDGFANRNFMQLIHDDSLTFKEDIQKAQVSGQGDSLHEHIANLAGSPAIKKGILQTVKVVDELVKVMGRHKPENIVIEMARENQTTQKGQKNSRERMKRIEEGIKELGSQILKEHPVENTQLQNEKLYLYYLQNGRDMYVDQELDINRLSDYDVDHIVPQSFLKDDSIDNKVLTRSDKARGKSDNVPSEEVVKKMKNYWRQLLNAKLITQRKFDNLTKAERGGLSELDKAGFIKRQLVETRQITKHVAQILDSRMNTKYDENDKLIREVKVITLKSKLVSDFRKDFQFYKVREINNYHHAHDAYLNAVVGTALIKKYPKLESEFVYGDYKVYDVRKMIAKSEQEIGKATAKYFFYSNIMNFFKTEITLANGEIRKRPLIETNGETGEIVWDKGRDFATVRKVLSMPQVNIVKKTEVQTGGFSKESILPKRNSDKLIARKKDWDPKKYGGFDSPTVAYSVLVVAKVEKGKSKKLKSVKELLGITIMERSSFEKNPIDFLEAKGYKEVKKDLIIKLPKYSLFELENGRKRMLASAGELQKGNELALPSKYVNFLYLASHYEKLKGSPEDNEQKQLFVEQHKHYLDEIIEQISEFSKRVILADANLDKVLSAYNKHRDKPIREQAENIIHLFTLTNLGAPAAFKYFDTTIDRKRYTSTKEVLDATLIHQSITGLYETRIDLSQLGGDGGGSSPAPGGTLNLEDEYRLYETSAEPEVSPGSTWLSDFPQAWAETGGMGLAVRQAPLIIPLKATSTPVSIKQYPMSQEAKLGIKPHIQRLLDQGILVPCQSPWNTPLLPVKKPGTNDYRPVQDLREVNKRVEDIHPTVPNPYNLLSGLPPSHRWYTVLDLKDAFFCLRLHPTSQPLFAFEWRDPGMGISGQLTWTRLPQGFKNSPTLFNEALHRDLADFRIQHPDLILLQYVDDILLAATSELDCQQGTRALLLTLGNLGYRASAKKAQLCQKQVKYLGYLLKEGQRWLTEARKETVMGQPTPKTPRQLREFLGKAGFCRLFIPGFAEMAAPLYPLTKPGTLFNWGPDQQKAYQEIKQALLTAPALGLPDLTKPFELFVDEKQGYAKGVLTQKLGPWRRPVAYLSKKLDPVAAGWPPCLRMVAAIAVLRKDAGKLTMGQPLVILAPHAVEALVKQPPDRWLSNARMTHYQAMLLDTDRVQFGPVVALNPATLLPLPEEGAPHDCLEILAETHGTRPDLTDQPIPDADHTWYTDGSSFLQEGQRKAGAAVTTETEVIWARALPAGTSAQRAELIALTQALKMAEGKRLNVYTDSRYAFATAHIHGEIYRRRGWLTSEGREIKNKSEILALLKALFLPKRLSIIHCLGHQKGDSAEARGNRLADQAAREAAIKTPPDTSTLLAGKRTADGSEFEKRTADGSEFESPKKKAKVE

SEQ ID NO: 1888 - protein, 2093 aa, synthetic construct
MPAAKRVKLDGGDKKYSIGLDIGTNSVGWAVITDEYKVPSKKFKVLGNTDRHSIKKNLIGALLFDSGETAEATRLKRTARRRYTRRKNRICYLQEIFSNEMAKVDDSFFHRLEESFLVEEDKKHERHPIFGNIVDEVAYHEKYPTIYHLRKKLVDSTDKADLRLIYLALAHMIKFRGHFLIEGDLNPDNSDVDKLFIQLVQTYNQLFEENPINASGVDAKAILSARLSKSRRLENLIAQLPGEKKNGLFGNLIALSLGLTPNFKSNFDLAEDAKLQLSKDTYDDDLDNLLAQIGDQYADLFLAAKNLSDAILLSDILRVNTEITKAPLSASMIKRYDEHHQDLTLLKALVRQQLPEKYKEIFFDQSKNGYAGYIDGGASQEEFYKFIKPILEKMDGTEELLVKLNREDLLRKQRTFDNGSIPHQIHLGELHAILRRQEDFYPFLKDNREKIEKILTFRIPYYVGPLARGNSRFAWMTRKSEETITPWNFEEVVDKGASAQSFIERMTNFDKNLPNEKVLPKHSLLYEYFTVYNELTKVKYVTEGMRKPAFLSGEQKKAIVDLLFKTNRKVTVKQLKEDYFKKIECFDSVEISGVEDRFNASLGTYHDLLKIIKDKDFLDNEENEDILEDIVLTLTLFEDREMIEERLKTYAHLFDDKVMKQLKRRRYTGWGRLSRKLINGIRDKQSGKTILDFLKSDGFANRNFMQLIHDDSLTFKEDIQKAQVSGQGDSLHEHIANLAGSPAIKKGILQTVKVVDELVKVMGRHKPENIVIEMARENQTTQKGQKNSRERMKRIEEGIKELGSQILKEHPVENTQLQNEKLYLYYLQNGRDMYVDQELDINRLSDYDVDHIVPQSFLKDDSIDNKVLTRSDKARGKSDNVPSEEVVKKMKNYWRQLLNAKLITQRKFDNLTKAERGGLSELDKAGFIKRQLVETRQITKHVAQILDSRMNTKYDENDKLIREVKVITLKSKLVSDFRKDFQFYKVREINNYHHAHDAYLNAVVGTALIKKYPKLESEFVYGDYKVYDVRKMIAKSEQEIGKATAKYFFYSNIMNFFKTEITLANGEIRKRPLIETNGETGEIVWDKGRDFATVRKVLSMPQVNIVKKTEVQTGGFSKESILPKRNSDKLIARKKDWDPKKYGGFDSPTVAYSVLVVAKVEKGKSKKLKSVKELLGITIMERSSFEKNPIDFLEAKGYKEVKKDLIIKLPKYSLFELENGRKRMLASAGELQKGNELALPSKYVNFLYLASHYEKLKGSPEDNEQKQLFVEQHKHYLDEIIEQISEFSKRVILADANLDKVLSAYNKHRDKPIREQAENIIHLFTLTNLGAPAAFKYFDTTIDRKRYTSTKEVLDATLIHQSITGLYETRIDLSQLGGDGGEAAAKGGGGGTLNLEDEYRLYETSAEPEVSPGSTWLSDFPQAWAETGGMGLAVRQAPLIIPLKATSTPVSIKQYPMSQEAKLGIKPHIQRLLDQGILVPCQSPWNTPLLPVKKPGTNDYRPVQDLREVNKRVEDIHPTVPNPYNLLSGLPPSHRWYTVLDLKDAFFCLRLHPTSQPLFAFEWRDPGMGISGQLTWTRLPQGFKNSPTLFNEALHRDLADFRIQHPDLILLQYVDDILLAATSELDCQQGTRALLLTLGNLGYRASAKKAQLCQKQVKYLGYLLKEGQRWLTEARKETVMGQPTPKTPRQLREFLGKAGFCRLFIPGFAEMAAPLYPLTKPGTLFNWGPDQQKAYQEIKQALLTAPALGLPDLTKPFELFVDEKQGYAKGVLTQKLGPWRRPVAYLSKKLDPVAAGWPPCLRMVAAIAVLRKDAGKLTMGQPLVILAPHAVEALVKQPPDRWLSNARMTHYQAMLLDTDRVQFGPVVALNPATLLPLPEEGAPHDCLEILAETHGTRPDLTDQPIPDADHTWYTDGSSFLQEGQRKAGAAVTTETEVIWARALPAGTSAQRAELIALTQALKMAEGKRLNVYTDSRYAFATAHIHGEIYRRRGWLTSEGREIKNKSEILALLKALFLPKRLSIIHCLGHQKGDSAEARGNRLADQAAREAAIKTPPDTSTLLAGKRTADGSEFEKRTADGSEFESPKKKAKVE

SEQ ID NO: 1889 - protein, 2096 aa, synthetic construct
MPAAKRVKLDGGDKKYSIGLDIGTNSVGWAVITDEYKVPSKKFKVLGNTDRHSIKKNLIGALLFDSGETAEATRLKRTARRRYTRRKNRICYLQEIFSNEMAKVDDSFFHRLEESFLVEEDKKHERHPIFGNIVDEVAYHEKYPTIYHLRKKLVDSTDKADLRLIYLALAHMIKFRGHFLIEGDLNPDNSDVDKLFIQLVQTYNQLFEENPINASGVDAKAILSARLSKSRRLENLIAQLPGEKKNGLFGNLIALSLGLTPNFKSNFDLAEDAKLQLSKDTYDDDLDNLLAQIGDQYADLFLAAKNLSDAILLSDILRVNTEITKAPLSASMIKRYDEHHQDLTLLKALVRQQLPEKYKEIFFDQSKNGYAGYIDGGASQEEFYKFIKPILEKMDGTEELLVKLNREDLLRKQRTFDNGSIPHQIHLGELHAILRRQEDFYPFLKDNREKIEKILTFRIPYYVGPLARGNSRFAWMTRKSEETITPWNFEEVVDKGASAQSFIERMTNFDKNLPNEKVLPKHSLLYEYFTVYNELTKVKYVTEGMRKPAFLSGEQKKAIVDLLFKTNRKVTVKQLKEDYFKKIECFDSVEISGVEDRFNASLGTYHDLLKIIKDKDFLDNEENEDILEDIVLTLTLFEDREMIEERLKTYAHLFDDKVMKQLKRRRYTGWGRLSRKLINGIRDKQSGKTILDFLKSDGFANRNFMQLIHDDSLTFKEDIQKAQVSGQGDSLHEHIANLAGSPAIKKGILQTVKVVDELVKVMGRHKPENIVIEMARENQTTQKGQKNSRERMKRIEEGIKELGSQILKEHPVENTQLQNEKLYLYYLQNGRDMYVDQELDINRLSDYDVDHIVPQSFLKDDSIDNKVLTRSDKARGKSDNVPSEEVVKKMKNYWRQLLNAKLITQRKFDNLTKAERGGLSELDKAGFIKRQLVETRQITKHVAQILDSRMNTKYDENDKLIREVKVITLKSKLVSDFRKDFQFYKVREINNYHHAHDAYLNAVVGTALIKKYPKLESEFVYGDYKVYDVRKMIAKSEQEIGKATAKYFFYSNIMNFFKTEITLANGEIRKRPLIETNGETGEIVWDKGRDFATVRKVLSMPQVNIVKKTEVQTGGFSKESILPKRNSDKLIARKKDWDPKKYGGFDSPTVAYSVLVVAKVEKGKSKKLKSVKELLGITIMERSSFEKNPIDFLEAKGYKEVKKDLIIKLPKYSLFELENGRKRMLASAGELQKGNELALPSKYVNFLYLASHYEKLKGSPEDNEQKQLFVEQHKHYLDEIIEQISEFSKRVILADANLDKVLSAYNKHRDKPIREQAENIIHLFTLTNLGAPAAFKYFDTTIDRKRYTSTKEVLDATLIHQSITGLYETRIDLSQLGGDGGGGSGSSEAAAKGGTLNLEDEYRLYETSAEPEVSPGSTWLSDFPQAWAETGGMGLAVRQAPLIIPLKATSTPVSIKQYPMSQEAKLGIKPHIQRLLDQGILVPCQSPWNTPLLPVKKPGTNDYRPVQDLREVNKRVEDIHPTVPNPYNLLSGLPPSHRWYTVLDLKDAFFCLRLHPTSQPLFAFEWRDPGMGISGQLTWTRLPQGFKNSPTLFNEALHRDLADFRIQHPDLILLQYVDDILLAATSELDCQQGTRALLLTLGNLGYRASAKKAQLCQKQVKYLGYLLKEGQRWLTEARKETVMGQPTPKTPRQLREFLGKAGFCRLFIPGFAEMAAPLYPLTKPGTLFNWGPDQQKAYQEIKQALLTAPALGLPDLTKPFELFVDEKQGYAKGVLTQKLGPWRRPVAYLSKKLDPVAAGWPPCLRMVAAIAVLRKDAGKLTMGQPLVILAPHAVEALVKQPPDRWLSNARMTHYQAMLLDTDRVQFGPVVALNPATLLPLPEEGAPHDCLEILAETHGTRPDLTDQPIPDADHTWYTDGSSFLQEGQRKAGAAVTTETEVIWARALPAGTSAQRAELIALTQALKMAEGKRLNVYTDSRYAFATAHIHGEIYRRRGWLTSEGREIKNKSEILALLKALFLPKRLSIIHCLGHQKGDSAEARGNRLADQAAREAAIKTPPDTSTLLAGKRTADGSEFEKRTADGSEFESPKKKAKVE

SEQ ID NO: 1890 - protein, 2096 aa, synthetic construct
MPAAKRVKLDGGDKKYSIGLDIGTNSVGWAVITDEYKVPSKKFKVLGNTDRHSIKKNLIGALLFDSGETAEATRLKRTARRRYTRRKNRICYLQEIFSNEMAKVDDSFFHRLEESFLVEEDKKHERHPIFGNIVDEVAYHEKYPTIYHLRKKLVDSTDKADLRLIYLALAHMIKFRGHFLIEGDLNPDNSDVDKLFIQLVQTYNQLFEENPINASGVDAKAILSARLSKSRRLENLIAQLPGEKKNGLFGNLIALSLGLTPNFKSNFDLAEDAKLQLSKDTYDDDLDNLLAQIGDQYADLFLAAKNLSDAILLSDILRVNTEITKAPLSASMIKRYDEHHQDLTLLKALVRQQLPEKYKEIFFDQSKNGYAGYIDGGASQEEFYKFIKPILEKMDGTEELLVKLNREDLLRKQRTFDNGSIPHQIHLGELHAILRRQEDFYPFLKDNREKIEKILTFRIPYYVGPLARGNSRFAWMTRKSEETITPWNFEEVVDKGASAQSFIERMTNFDKNLPNEKVLPKHSLLYEYFTVYNELTKVKYVTEGMRKPAFLSGEQKKAIVDLLFKTNRKVTVKQLKEDYFKKIECFDSVEISGVEDRFNASLGTYHDLLKIIKDKDFLDNEENEDILEDIVLTLTLFEDREMIEERLKTYAHLFDDKVMKQLKRRRYTGWGRLSRKLINGIRDKQSGKTILDFLKSDGFANRNFMQLIHDDSLTFKEDIQKAQVSGQGDSLHEHIANLAGSPAIKKGILQTVKVVDELVKVMGRHKPENIVIEMARENQTTQKGQKNSRERMKRIEEGIKELGSQILKEHPVENTQLQNEKLYLYYLQNGRDMYVDQELDINRLSDYDVDHIVPQSFLKDDSIDNKVLTRSDKARGKSDNVPSEEVVKKMKNYWRQLLNAKLITQRKFDNLTKAERGGLSELDKAGFIKRQLVETRQITKHVAQILDSRMNTKYDENDKLIREVKVITLKSKLVSDFRKDFQFYKVREINNYHHAHDAYLNAVVGTALIKKYPKLESEFVYGDYKVYDVRKMIAKSEQEIGKATAKYFFYSNIMNFFKTEITLANGEIRKRPLIETNGETGEIVWDKGRDFATVRKVLSMPQVNIVKKTEVQTGGFSKESILPKRNSDKLIARKKDWDPKKYGGFDSPTVAYSVLVVAKVEKGKSKKLKSVKELLGITIMERSSFEKNPIDFLEAKGYKEVKKDLIIKLPKYSLFELENGRKRMLASAGELQKGNELALPSKYVNFLYLASHYEKLKGSPEDNEQKQLFVEQHKHYLDEIIEQISEFSKRVILADANLDKVLSAYNKHRDKPIREQAENIIHLFTLTNLGAPAAFKYFDTTIDRKRYTSTKEVLDATLIHQSITGLYETRIDLSQLGGDGGGSSPAPEAAAKGGTLNLEDEYRLYETSAEPEVSPGSTWLSDFPQAWAETGGMGLAVRQAPLIIPLKATSTPVSIKQYPMSQEAKLGIKPHIQRLLDQGILVPCQSPWNTPLLPVKKPGTNDYRPVQDLREVNKRVEDIHPTVPNPYNLLSGLPPSHRWYTVLDLKDAFFCLRLHPTSQPLFAFEWRDPGMGISGQLTWTRLPQGFKNSPTLFNEALHRDLADFRIQHPDLILLQYVDDILLAATSELDCQQGTRALLLTLGNLGYRASAKKAQLCQKQVKYLGYLLKEGQRWLTEARKETVMGQPTPKTPRQLREFLGKAGFCRLFIPGFAEMAAPLYPLTKPGTLFNWGPDQQKAYQEIKQALLTAPALGLPDLTKPFELFVDEKQGYAKGVLTQKLGPWRRPVAYLSKKLDPVAAGWPPCLRMVAAIAVLRKDAGKLTMGQPLVILAPHAVEALVKQPPDRWLSNARMTHYQAMLLDTDRVQFGPVVALNPATLLPLPEEGAPHDCLEILAETHGTRPDLTDQPIPDADHTWYTDGSSFLQEGQRKAGAAVTTETEVIWARALPAGTSAQRAELIALTQALKMAEGKRLNVYTDSRYAFATAHIHGEIYRRRGWLTSEGREIKNKSEILALLKALFLPKRLSIIHCLGHQKGDSAEARGNRLADQAAREAAIKTPPDTSTLLAGKRTADGSEFEKRTADGSEFESPKKKAKVE

SEQ ID NO: 1891 - protein, 2093 aa, synthetic construct
MPAAKRVKLDGGDKKYSIGLDIGTNSVGWAVITDEYKVPSKKFKVLGNTDRHSIKKNLIGALLFDSGETAEATRLKRTARRRYTRRKNRICYLQEIFSNEMAKVDDSFFHRLEESFLVEEDKKHERHPIFGNIVDEVAYHEKYPTIYHLRKKLVDSTDKADLRLIYLALAHMIKFRGHFLIEGDLNPDNSDVDKLFIQLVQTYNQLFEENPINASGVDAKAILSARLSKSRRLENLIAQLPGEKKNGLFGNLIALSLGLTPNFKSNFDLAEDAKLQLSKDTYDDDLDNLLAQIGDQYADLFLAAKNLSDAILLSDILRVNTEITKAPLSASMIKRYDEHHQDLTLLKALVRQQLPEKYKEIFFDQSKNGYAGYIDGGASQEEFYKFIKPILEKMDGTEELLVKLNREDLLRKQRTFDNGSIPHQIHLGELHAILRRQEDFYPFLKDNREKIEKILTFRIPYYVGPLARGNSRFAWMTRKSEETITPWNFEEVVDKGASAQSFIERMTNFDKNLPNEKVLPKHSLLYEYFTVYNELTKVKYVTEGMRKPAFLSGEQKKAIVDLLFKTNRKVTVKQLKEDYFKKIECFDSVEISGVEDRFNASLGTYHDLLKIIKDKDFLDNEENEDILEDIVLTLTLFEDREMIEERLKTYAHLFDDKVMKQLKRRRYTGWGRLSRKLINGIRDKQSGKTILDFLKSDGFANRNFMQLIHDDSLTFKEDIQKAQVSGQGDSLHEHIANLAGSPAIKKGILQTVKVVDELVKVMGRHKPENIVIEMARENQTTQKGQKNSRERMKRIEEGIKELGSQILKEHPVENTQLQNEKLYLYYLQNGRDMYVDQELDINRLSDYDVDHIVPQSFLKDDSIDNKVLTRSDKARGKSDNVPSEEVVKKMKNYWRQLLNAKLITQRKFDNLTKAERGGLSELDKAGFIKRQLVETRQITKHVAQILDSRMNTKYDENDKLIREVKVITLKSKLVSDFRKDFQFYKVREINNYHHAHDAYLNAVVGTALIKKYPKLESEFVYGDYKVYDVRKMIAKSEQEIGKATAKYFFYSNIMNFFKTEITLANGEIRKRPLIETNGETGEIVWDKGRDFATVRKVLSMPQVNIVKKTEVQTGGFSKESILPKRNSDKLIARKKDWDPKKYGGFDSPTVAYSVLVVAKVEKGKSKKLKSVKELLGITIMERSSFEKNPIDFLEAKGYKEVKKDLIIKLPKYSLFELENGRKRMLASAGELQKGNELALPSKYVNFLYLASHYEKLKGSPEDNEQKQLFVEQHKHYLDEIIEQISEFSKRVILADANLDKVLSAYNKHRDKPIREQAENIIHLFTLTNLGAPAAFKYFDTTIDRKRYTSTKEVLDATLIHQSITGLYETRIDLSQLGGDGGGSSEAAAKGGTLNLEDEYRLYETSAEPEVSPGSTWLSDFPQAWAETGGMGLAVRQAPLIIPLKATSTPVSIKQYPMSQEAKLGIKPHIQRLLDQGILVPCQSPWNTPLLPVKKPGTNDYRPVQDLREVNKRVEDIHPTVPNPYNLLSGLPPSHRWYTVLDLKDAFFCLRLHPTSQPLFAFEWRDPGMGISGQLTWTRLPQGFKNSPTLFNEALHRDLADFRIQHPDLILLQYVDDILLAATSELDCQQGTRALLLTLGNLGYRASAKKAQLCQKQVKYLGYLLKEGQRWLTEARKETVMGQPTPKTPRQLREFLGKAGFCRLFIPGFAEMAAPLYPLTKPGTLFNWGPDQQKAYQEIKQALLTAPALGLPDLTKPFELFVDEKQGYAKGVLTQKLGPWRRPVAYLSKKLDPVAAGWPPCLRMVAAIAVLRKDAGKLTMGQPLVILAPHAVEALVKQPPDRWLSNARMTHYQAMLLDTDRVQFGPVVALNPATLLPLPEEGAPHDCLEILAETHGTRPDLTDQPIPDADHTWYTDGSSFLQEGQRKAGAAVTTETEVIWARALPAGTSAQRAELIALTQALKMAEGKRLNVYTDSRYAFATAHIHGEIYRRRGWLTSEGREIKNKSEILALLKALFLPKRLSIIHCLGHQKGDSAEARGNRLADQAAREAAIKTPPDTSTLLAGKRTADGSEFEKRTADGSEFESPKKKAKVE

SEQ ID NO: 1892 - protein, 2094 aa, synthetic construct
MPAAKRVKLDGGDKKYSIGLDIGTNSVGWAVITDEYKVPSKKFKVLGNTDRHSIKKNLIGALLFDSGETAEATRLKRTARRRYTRRKNRICYLQEIFSNEMAKVDDSFFHRLEESFLVEEDKKHERHPIFGNIVDEVAYHEKYPTIYHLRKKLVDSTDKADLRLIYLALAHMIKFRGHFLIEGDLNPDNSDVDKLFIQLVQTYNQLFEENPINASGVDAKAILSARLSKSRRLENLIAQLPGEKKNGLFGNLIALSLGLTPNFKSNFDLAEDAKLQLSKDTYDDDLDNLLAQIGDQYADLFLAAKNLSDAILLSDILRVNTEITKAPLSASMIKRYDEHHQDLTLLKALVRQQLPEKYKEIFFDQSKNGYAGYIDGGASQEEFYKFIKPILEKMDGTEELLVKLNREDLLRKQRTFDNGSIPHQIHLGELHAILRRQEDFYPFLKDNREKIEKILTFRIPYYVGPLARGNSRFAWMTRKSEETITPWNFEEVVDKGASAQSFIERMTNFDKNLPNEKVLPKHSLLYEYFTVYNELTKVKYVTEGMRKPAFLSGEQKKAIVDLLFKTNRKVTVKQLKEDYFKKIECFDSVEISGVEDRFNASLGTYHDLLKIIKDKDFLDNEENEDILEDIVLTLTLFEDREMIEERLKTYAHLFDDKVMKQLKRRRYTGWGRLSRKLINGIRDKQSGKTILDFLKSDGFANRNFMQLIHDDSLTFKEDIQKAQVSGQGDSLHEHIANLAGSPAIKKGILQTVKVVDELVKVMGRHKPENIVIEMARENQTTQKGQKNSRERMKRIEEGIKELGSQILKEHPVENTQLQNEKLYLYYLQNGRDMYVDQELDINRLSDYDVDHIVPQSFLKDDSIDNKVLTRSDKARGKSDNVPSEEVVKKMKNYWRQLLNAKLITQRKFDNLTKAERGGLSELDKAGFIKRQLVETRQITKHVAQILDSRMNTKYDENDKLIREVKVITLKSKLVSDFRKDFQFYKVREINNYHHAHDAYLNAVVGTALIKKYPKLESEFVYGDYKVYDVRKMIAKSEQEIGKATAKYFFYSNIMNFFKTEITLANGEIRKRPLIETNGETGEIVWDKGRDFATVRKVLSMPQVNIVKKTEVQTGGFSKESILPKRNSDKLIARKKDWDPKKYGGFDSPTVAYSVLVVAKVEKGKSKKLKSVKELLGITIMERSSFEKNPIDFLEAKGYKEVKKDLIIKLPKYSLFELENGRKRMLASAGELQKGNELALPSKYVNFLYLASHYEKLKGSPEDNEQKQLFVEQHKHYLDEIIEQISEFSKRVILADANLDKVLSAYNKHRDKPIREQAENIIHLFTLTNLGAPAAFKYFDTTIDRKRYTSTKEVLDATLIHQSITGLYETRIDLSQLGGDGGGGGPAPGGSGGTLNLEDEYRLYETSAEPEVSPGSTWLSDFPQAWAETGGMGLAVRQAPLIIPLKATSTPVSIKQYPMSQEAKLGIKPHIQRLLDQGILVPCQSPWNTPLLPVKKPGTNDYRPVQDLREVNKRVEDIHPTVPNPYNLLSGLPPSHRWYTVLDLKDAFFCLRLHPTSQPLFAFEWRDPGMGISGQLTWTRLPQGFKNSPTLFNEALHRDLADFRIQHPDLILLQYVDDILLAATSELDCQQGTRALLLTLGNLGYRASAKKAQLCQKQVKYLGYLLKEGQRWLTEARKETVMGQPTPKTPRQLREFLGKAGFCRLFIPGFAEMAAPLYPLTKPGTLFNWGPDQQKAYQEIKQALLTAPALGLPDLTKPFELFVDEKQGYAKGVLTQKLGPWRRPVAYLSKKLDPVAAGWPPCLRMVAAIAVLRKDAGKLTMGQPLVILAPHAVEALVKQPPDRWLSNARMTHYQAMLLDTDRVQFGPVVALNPATLLPLPEEGAPHDCLEILAETHGTRPDLTDQPIPDADHTWYTDGSSFLQEGQRKAGAAVTTETEVIWARALPAGTSAQRAELIALTQALKMAEGKRLNVYTDSRYAFATAHIHGEIYRRRGWLTSEGREIKNKSEILALLKALFLPKRLSIIHCLGHQKGDSAEARGNRLADQAAREAAIKTPPDTSTLLAGKRTADGSEFEKRTADGSEFESPKKKAKVE

SEQ ID NO: 1893 - protein, 2094 aa, synthetic construct
MPAAKRVKLDGGDKKYSIGLDIGTNSVGWAVITDEYKVPSKKFKVLGNTDRHSIKKNLIGALLFDSGETAEATRLKRTARRRYTRRKNRICYLQEIFSNEMAKVDDSFFHRLEESFLVEEDKKHERHPIFGNIVDEVAYHEKYPTIYHLRKKLVDSTDKADLRLIYLALAHMIKFRGHFLIEGDLNPDNSDVDKLFIQLVQTYNQLFEENPINASGVDAKAILSARLSKSRRLENLIAQLPGEKKNGLFGNLIALSLGLTPNFKSNFDLAEDAKLQLSKDTYDDDLDNLLAQIGDQYADLFLAAKNLSDAILLSDILRVNTEITKAPLSASMIKRYDEHHQDLTLLKALVRQQLPEKYKEIFFDQSKNGYAGYIDGGASQEEFYKFIKPILEKMDGTEELLVKLNREDLLRKQRTFDNGSIPHQIHLGELHAILRRQEDFYPFLKDNREKIEKILTFRIPYYVGPLARGNSRFAWMTRKSEETITPWNFEEVVDKGASAQSFIERMTNFDKNLPNEKVLPKHSLLYEYFTVYNELTKVKYVTEGMRKPAFLSGEQKKAIVDLLFKTNRKVTVKQLKEDYFKKIECFDSVEISGVEDRFNASLGTYHDLLKIIKDKDFLDNEENEDILEDIVLTLTLFEDREMIEERLKTYAHLFDDKVMKQLKRRRYTGWGRLSRKLINGIRDKQSGKTILDFLKSDGFANRNFMQLIHDDSLTFKEDIQKAQVSGQGDSLHEHIANLAGSPAIKKGILQTVKVVDELVKVMGRHKPENIVIEMARENQTTQKGQKNSRERMKRIEEGIKELGSQILKEHPVENTQLQNEKLYLYYLQNGRDMYVDQELDINRLSDYDVDHIVPQSFLKDDSIDNKVLTRSDKARGKSDNVPSEEVVKKMKNYWRQLLNAKLITQRKFDNLTKAERGGLSELDKAGFIKRQLVETRQITKHVAQILDSRMNTKYDENDKLIREVKVITLKSKLVSDFRKDFQFYKVREINNYHHAHDAYLNAVVGTALIKKYPKLESEFVYGDYKVYDVRKMIAKSEQEIGKATAKYFFYSNIMNFFKTEITLANGEIRKRPLIETNGETGEIVWDKGRDFATVRKVLSMPQVNIVKKTEVQTGGFSKESILPKRNSDKLIARKKDWDPKKYGGFDSPTVAYSVLVVAKVEKGKSKKLKSVKELLGITIMERSSFEKNPIDFLEAKGYKEVKKDLIIKLPKYSLFELENGRKRMLASAGELQKGNELALPSKYVNFLYLASHYEKLKGSPEDNEQKQLFVEQHKHYLDEIIEQISEFSKRVILADANLDKVLSAYNKHRDKPIREQAENIIHLFTLTNLGAPAAFKYFDTTIDRKRYTSTKEVLDATLIHQSITGLYETRIDLSQLGGDGGPAPGGGGSSGGTLNLEDEYRLYETSAEPEVSPGSTWLSDFPQAWAETGGMGLAVRQAPLIIPLKATSTPVSIKQYPMSQEAKLGIKPHIQRLLDQGILVPCQSPWNTPLLPVKKPGTNDYRPVQDLREVNKRVEDIHPTVPNPYNLLSGLPPSHRWYTVLDLKDAFFCLRLHPTSQPLFAFEWRDPGMGISGQLTWTRLPQGFKNSPTLFNEALHRDLADFRIQHPDLILLQYVDDILLAATSELDCQQGTRALLLTLGNLGYRASAKKAQLCQKQVKYLGYLLKEGQRWLTEARKETVMGQPTPKTPRQLREFLGKAGFCRLFIPGFAEMAAPLYPLTKPGTLFNWGPDQQKAYQEIKQALLTAPALGLPDLTKPFELFVDEKQGYAKGVLTQKLGPWRRPVAYLSKKLDPVAAGWPPCLRMVAAIAVLRKDAGKLTMGQPLVILAPHAVEALVKQPPDRWLSNARMTHYQAMLLDTDRVQFGPVVALNPATLLPLPEEGAPHDCLEILAETHGTRPDLTDQPIPDADHTWYTDGSSFLQEGQRKAGAAVTTETEVIWARALPAGTSAQRAELIALTQALKMAEGKRLNVYTDSRYAFATAHIHGEIYRRRGWLTSEGREIKNKSEILALLKALFLPKRLSIIHCLGHQKGDSAEARGNRLADQAAREAAIKTPPDTSTLLAGKRTADGSEFEKRTADGSEFESPKKKAKVE

SEQ ID NO: 1894 - protein, 2094 aa, synthetic construct
MPAAKRVKLDGGDKKYSIGLDIGTNSVGWAVITDEYKVPSKKFKVLGNTDRHSIKKNLIGALLFDSGETAEATRLKRTARRRYTRRKNRICYLQEIFSNEMAKVDDSFFHRLEESFLVEEDKKHERHPIFGNIVDEVAYHEKYPTIYHLRKKLVDSTDKADLRLIYLALAHMIKFRGHFLIEGDLNPDNSDVDKLFIQLVQTYNQLFEENPINASGVDAKAILSARLSKSRRLENLIAQLPGEKKNGLFGNLIALSLGLTPNFKSNFDLAEDAKLQLSKDTYDDDLDNLLAQIGDQYADLFLAAKNLSDAILLSDILRVNTEITKAPLSASMIKRYDEHHQDLTLLKALVRQQLPEKYKEIFFDQSKNGYAGYIDGGASQEEFYKFIKPILEKMDGTEELLVKLNREDLLRKQRTFDNGSIPHQIHLGELHAILRRQEDFYPFLKDNREKIEKILTFRIPYYVGPLARGNSRFAWMTRKSEETITPWNFEEVVDKGASAQSFIERMTNFDKNLPNEKVLPKHSLLYEYFTVYNELTKVKYVTEGMRKPAFLSGEQKKAIVDLLFKTNRKVTVKQLKEDYFKKIECFDSVEISGVEDRFNASLGTYHDLLKIIKDKDFLDNEENEDILEDIVLTLTLFEDREMIEERLKTYAHLFDDKVMKQLKRRRYTGWGRLSRKLINGIRDKQSGKTILDFLKSDGFANRNFMQLIHDDSLTFKEDIQKAQVSGQGDSLHEHIANLAGSPAIKKGILQTVKVVDELVKVMGRHKPENIVIEMARENQTTQKGQKNSRERMKRIEEGIKELGSQILKEHPVENTQLQNEKLYLYYLQNGRDMYVDQELDINRLSDYDVDHIVPQSFLKDDSIDNKVLTRSDKARGKSDNVPSEEVVKKMKNYWRQLLNAKLITQRKFDNLTKAERGGLSELDKAGFIKRQLVETRQITKHVAQILDSRMNTKYDENDKLIREVKVITLKSKLVSDFRKDFQFYKVREINNYHHAHDAYLNAVVGTALIKKYPKLESEFVYGDYKVYDVRKMIAKSEQEIGKATAKYFFYSNIMNFFKTEITLANGEIRKRPLIETNGETGEIVWDKGRDFATVRKVLSMPQVNIVKKTEVQTGGFSKESILPKRNSDKLIARKKDWDPKKYGGFDSPTVAYSVLVVAKVEKGKSKKLKSVKELLGITIMERSSFEKNPIDFLEAKGYKEVKKDLIIKLPKYSLFELENGRKRMLASAGELQKGNELALPSKYVNFLYLASHYEKLKGSPEDNEQKQLFVEQHKHYLDEIIEQISEFSKRVILADANLDKVLSAYNKHRDKPIREQAENIIHLFTLTNLGAPAAFKYFDTTIDRKRYTSTKEVLDATLIHQSITGLYETRIDLSQLGGDGGGGGGGSGSSGGTLNLEDEYRLYETSAEPEVSPGSTWLSDFPQAWAETGGMGLAVRQAPLIIPLKATSTPVSIKQYPMSQEAKLGIKPHIQRLLDQGILVPCQSPWNTPLLPVKKPGTNDYRPVQDLREVNKRVEDIHPTVPNPYNLLSGLPPSHRWYTVLDLKDAFFCLRLHPTSQPLFAFEWRDPGMGISGQLTWTRLPQGFKNSPTLFNEALHRDLADFRIQHPDLILLQYVDDILLAATSELDCQQGTRALLLTLGNLGYRASAKKAQLCQKQVKYLGYLLKEGQRWLTEARKETVMGQPTPKTPRQLREFLGKAGFCRLFIPGFAEMAAPLYPLTKPGTLFNWGPDQQKAYQEIKQALLTAPALGLPDLTKPFELFVDEKQGYAKGVLTQKLGPWRRPVAYLSKKLDPVAAGWPPCLRMVAAIAVLRKDAGKLTMGQPLVILAPHAVEALVKQPPDRWLSNARMTHYQAMLLDTDRVQFGPVVALNPATLLPLPEEGAPHDCLEILAETHGTRPDLTDQPIPDADHTWYTDGSSFLQEGQRKAGAAVTTETEVIWARALPAGTSAQRAELIALTQALKMAEGKRLNVYTDSRYAFATAHIHGEIYRRRGWLTSEGREIKNKSEILALLKALFLPKRLSIIHCLGHQKGDSAEARGNRLADQAAREAAIKTPPDTSTLLAGKRTADGSEFEKRTADGSEFESPKKKAKVE

SEQ ID NO: 1895 - protein, 2091 aa, synthetic construct
MPAAKRVKLDGGDKKYSIGLDIGTNSVGWAVITDEYKVPSKKFKVLGNTDRHSIKKNLIGALLFDSGETAEATRLKRTARRRYTRRKNRICYLQEIFSNEMAKVDDSFFHRLEESFLVEEDKKHERHPIFGNIVDEVAYHEKYPTIYHLRKKLVDSTDKADLRLIYLALAHMIKFRGHFLIEGDLNPDNSDVDKLFIQLVQTYNQLFEENPINASGVDAKAILSARLSKSRRLENLIAQLPGEKKNGLFGNLIALSLGLTPNFKSNFDLAEDAKLQLSKDTYDDDLDNLLAQIGDQYADLFLAAKNLSDAILLSDILRVNTEITKAPLSASMIKRYDEHHQDLTLLKALVRQQLPEKYKEIFFDQSKNGYAGYIDGGASQEEFYKFIKPILEKMDGTEELLVKLNREDLLRKQRTFDNGSIPHQIHLGELHAILRRQEDFYPFLKDNREKIEKILTFRIPYYVGPLARGNSRFAWMTRKSEETITPWNFEEVVDKGASAQSFIERMTNFDKNLPNEKVLPKHSLLYEYFTVYNELTKVKYVTEGMRKPAFLSGEQKKAIVDLLFKTNRKVTVKQLKEDYFKKIECFDSVEISGVEDRFNASLGTYHDLLKIIKDKDFLDNEENEDILEDIVLTLTLFEDREMIEERLKTYAHLFDDKVMKQLKRRRYTGWGRLSRKLINGIRDKQSGKTILDFLKSDGFANRNFMQLIHDDSLTFKEDIQKAQVSGQGDSLHEHIANLAGSPAIKKGILQTVKVVDELVKVMGRHKPENIVIEMARENQTTQKGQKNSRERMKRIEEGIKELGSQILKEHPVENTQLQNEKLYLYYLQNGRDMYVDQELDINRLSDYDVDHIVPQSFLKDDSIDNKVLTRSDKARGKSDNVPSEEVVKKMKNYWRQLLNAKLITQRKFDNLTKAERGGLSELDKAGFIKRQLVETRQITKHVAQILDSRMNTKYDENDKLIREVKVITLKSKLVSDFRKDFQFYKVREINNYHHAHDAYLNAVVGTALIKKYPKLESEFVYGDYKVYDVRKMIAKSEQEIGKATAKYFFYSNIMNFFKTEITLANGEIRKRPLIETNGETGEIVWDKGRDFATVRKVLSMPQVNIVKKTEVQTGGFSKESILPKRNSDKLIARKKDWDPKKYGGFDSPTVAYSVLVVAKVEKGKSKKLKSVKELLGITIMERSSFEKNPIDFLEAKGYKEVKKDLIIKLPKYSLFELENGRKRMLASAGELQKGNELALPSKYVNFLYLASHYEKLKGSPEDNEQKQLFVEQHKHYLDEIIEQISEFSKRVILADANLDKVLSAYNKHRDKPIREQAENIIHLFTLTNLGAPAAFKYFDTTIDRKRYTSTKEVLDATLIHQSITGLYETRIDLSQLGGDGGPAPGGGGGTLNLEDEYRLYETSAEPEVSPGSTWLSDFPQAWAETGGMGLAVRQAPLIIPLKATSTPVSIKQYPMSQEAKLGIKPHIQRLLDQGILVPCQSPWNTPLLPVKKPGTNDYRPVQDLREVNKRVEDIHPTVPNPYNLLSGLPPSHRWYTVLDLKDAFFCLRLHPTSQPLFAFEWRDPGMGISGQLTWTRLPQGFKNSPTLFNEALHRDLADFRIQHPDLILLQYVDDILLAATSELDCQQGTRALLLTLGNLGYRASAKKAQLCQKQVKYLGYLLKEGQRWLTEARKETVMGQPTPKTPRQLREFLGKAGFCRLFIPGFAEMAAPLYPLTKPGTLFNWGPDQQKAYQEIKQALLTAPALGLPDLTKPFELFVDEKQGYAKGVLTQKLGPWRRPVAYLSKKLDPVAAGWPPCLRMVAAIAVLRKDAGKLTMGQPLVILAPHAVEALVKQPPDRWLSNARMTHYQAMLLDTDRVQFGPVVALNPATLLPLPEEGAPHDCLEILAETHGTRPDLTDQPIPDADHTWYTDGSSFLQEGQRKAGAAVTTETEVIWARALPAGTSAQRAELIALTQALKMAEGKRLNVYTDSRYAFATAHIHGEIYRRRGWLTSEGREIKNKSEILALLKALFLPKRLSIIHCLGHQKGDSAEARGNRLADQAAREAAIKTPPDTSTLLAGKRTADGSEFEKRTADGSEFESPKKKAKVE

SEQ ID NO: 1896 - protein, 2115 aa, synthetic construct
MPAAKRVKLDGGDKKYSIGLDIGTNSVGWAVITDEYKVPSKKFKVLGNTDRHSIKKNLIGALLFDSGETAEATRLKRTARRRYTRRKNRICYLQEIFSNEMAKVDDSFFHRLEESFLVEEDKKHERHPIFGNIVDEVAYHEKYPTIYHLRKKLVDSTDKADLRLIYLALAHMIKFRGHFLIEGDLNPDNSDVDKLFIQLVQTYNQLFEENPINASGVDAKAILSARLSKSRRLENLIAQLPGEKKNGLFGNLIALSLGLTPNFKSNFDLAEDAKLQLSKDTYDDDLDNLLAQIGDQYADLFLAAKNLSDAILLSDILRVNTEITKAPLSASMIKRYDEHHQDLTLLKALVRQQLPEKYKEIFFDQSKNGYAGYIDGGASQEEFYKFIKPILEKMDGTEELLVKLNREDLLRKQRTFDNGSIPHQIHLGELHAILRRQEDFYPFLKDNREKIEKILTFRIPYYVGPLARGNSRFAWMTRKSEETITPWNFEEVVDKGASAQSFIERMTNFDKNLPNEKVLPKHSLLYEYFTVYNELTKVKYVTEGMRKPAFLSGEQKKAIVDLLFKTNRKVTVKQLKEDYFKKIECFDSVEISGVEDRFNASLGTYHDLLKIIKDKDFLDNEENEDILEDIVLTLTLFEDREMIEERLKTYAHLFDDKVMKQLKRRRYTGWGRLSRKLINGIRDKQSGKTILDFLKSDGFANRNFMQLIHDDSLTFKEDIQKAQVSGQGDSLHEHIANLAGSPAIKKGILQTVKVVDELVKVMGRHKPENIVIEMARENQTTQKGQKNSRERMKRIEEGIKELGSQILKEHPVENTQLQNEKLYLYYLQNGRDMYVDQELDINRLSDYDVDHIVPQSFLKDDSIDNKVLTRSDKARGKSDNVPSEEVVKKMKNYWRQLLNAKLITQRKFDNLTKAERGGLSELDKAGFIKRQLVETRQITKHVAQILDSRMNTKYDENDKLIREVKVITLKSKLVSDFRKDFQFYKVREINNYHHAHDAYLNAVVGTALIKKYPKLESEFVYGDYKVYDVRKMIAKSEQEIGKATAKYFFYSNIMNFFKTEITLANGEIRKRPLIETNGETGEIVWDKGRDFATVRKVLSMPQVNIVKKTEVQTGGFSKESILPKRNSDKLIARKKDWDPKKYGGFDSPTVAYSVLVVAKVEKGKSKKLKSVKELLGITIMERSSFEKNPIDFLEAKGYKEVKKDLIIKLPKYSLFELENGRKRMLASAGELQKGNELALPSKYVNFLYLASHYEKLKGSPEDNEQKQLFVEQHKHYLDEIIEQISEFSKRVILADANLDKVLSAYNKHRDKPIREQAENIIHLFTLTNLGAPAAFKYFDTTIDRKRYTSTKEVLDATLIHQSITGLYETRIDLSQLGGDGGEAAAKEAAAKEAAAKEAAAKEAAAKEAAAKGGTLNLEDEYRLYETSAEPEVSPGSTWLSDFPQAWAETGGMGLAVRQAPLIIPLKATSTPVSIKQYPMSQEAKLGIKPHIQRLLDQGILVPCQSPWNTPLLPVKKPGTNDYRPVQDLREVNKRVEDIHPTVPNPYNLLSGLPPSHRWYTVLDLKDAFFCLRLHPTSQPLFAFEWRDPGMGISGQLTWTRLPQGFKNSPTLFNEALHRDLADFRIQHPDLILLQYVDDILLAATSELDCQQGTRALLLTLGNLGYRASAKKAQLCQKQVKYLGYLLKEGQRWLTEARKETVMGQPTPKTPRQLREFLGKAGFCRLFIPGFAEMAAPLYPLTKPGTLFNWGPDQQKAYQEIKQALLTAPALGLPDLTKPFELFVDEKQGYAKGVLTQKLGPWRRPVAYLSKKLDPVAAGWPPCLRMVAAIAVLRKDAGKLTMGQPLVILAPHAVEALVKQPPDRWLSNARMTHYQAMLLDTDRVQFGPVVALNPATLLPLPEEGAPHDCLEILAETHGTRPDLTDQPIPDADHTWYTDGSSFLQEGQRKAGAAVTTETEVIWARALPAGTSAQRAELIALTQALKMAEGKRLNVYTDSRYAFATAHIHGEIYRRRGWLTSEGREIKNKSEILALLKALFLPKRLSIIHCLGHQKGDSAEARGNRLADQAAREAAIKTPPDTSTLLAGKRTADGSEFEKRTADGSEFESPKKKAKVE

SEQ ID NO: 1897 - protein, 2091 aa, synthetic construct
MPAAKRVKLDGGDKKYSIGLDIGTNSVGWAVITDEYKVPSKKFKVLGNTDRHSIKKNLIGALLFDSGETAEATRLKRTARRRYTRRKNRICYLQEIFSNEMAKVDDSFFHRLEESFLVEEDKKHERHPIFGNIVDEVAYHEKYPTIYHLRKKLVDSTDKADLRLIYLALAHMIKFRGHFLIEGDLNPDNSDVDKLFIQLVQTYNQLFEENPINASGVDAKAILSARLSKSRRLENLIAQLPGEKKNGLFGNLIALSLGLTPNFKSNFDLAEDAKLQLSKDTYDDDLDNLLAQIGDQYADLFLAAKNLSDAILLSDILRVNTEITKAPLSASMIKRYDEHHQDLTLLKALVRQQLPEKYKEIFFDQSKNGYAGYIDGGASQEEFYKFIKPILEKMDGTEELLVKLNREDLLRKQRTFDNGSIPHQIHLGELHAILRRQEDFYPFLKDNREKIEKILTFRIPYYVGPLARGNSRFAWMTRKSEETITPWNFEEVVDKGASAQSFIERMTNFDKNLPNEKVLPKHSLLYEYFTVYNELTKVKYVTEGMRKPAFLSGEQKKAIVDLLFKTNRKVTVKQLKEDYFKKIECFDSVEISGVEDRFNASLGTYHDLLKIIKDKDFLDNEENEDILEDIVLTLTLFEDREMIEERLKTYAHLFDDKVMKQLKRRRYTGWGRLSRKLINGIRDKQSGKTILDFLKSDGFANRNFMQLIHDDSLTFKEDIQKAQVSGQGDSLHEHIANLAGSPAIKKGILQTVKVVDELVKVMGRHKPENIVIEMARENQTTQKGQKNSRERMKRIEEGIKELGSQILKEHPVENTQLQNEKLYLYYLQNGRDMYVDQELDINRLSDYDVDHIVPQSFLKDDSIDNKVLTRSDKARGKSDNVPSEEVVKKMKNYWRQLLNAKLITQRKFDNLTKAERGGLSELDKAGFIKRQLVETRQITKHVAQILDSRMNTKYDENDKLIREVKVITLKSKLVSDFRKDFQFYKVREINNYHHAHDAYLNAVVGTALIKKYPKLESEFVYGDYKVYDVRKMIAKSEQEIGKATAKYFFYSNIMNFFKTEITLANGEIRKRPLIETNGETGEIVWDKGRDFATVRKVLSMPQVNIVKKTEVQTGGFSKESILPKRNSDKLIARKKDWDPKKYGGFDSPTVAYSVLVVAKVEKGKSKKLKSVKELLGITIMERSSFEKNPIDFLEAKGYKEVKKDLIIKLPKYSLFELENGRKRMLASAGELQKGNELALPSKYVNFLYLASHYEKLKGSPEDNEQKQLFVEQHKHYLDEIIEQISEFSKRVILADANLDKVLSAYNKHRDKPIREQAENIIHLFTLTNLGAPAAFKYFDTTIDRKRYTSTKEVLDATLIHQSITGLYETRIDLSQLGGDGGGGSGGSGGTLNLEDEYRLYETSAEPEVSPGSTWLSDFPQAWAETGGMGLAVRQAPLIIPLKATSTPVSIKQYPMSQEAKLGIKPHIQRLLDQGILVPCQSPWNTPLLPVKKPGTNDYRPVQDLREVNKRVEDIHPTVPNPYNLLSGLPPSHRWYTVLDLKDAFFCLRLHPTSQPLFAFEWRDPGMGISGQLTWTRLPQGFKNSPTLFNEALHRDLADFRIQHPDLILLQYVDDILLAATSELDCQQGTRALLLTLGNLGYRASAKKAQLCQKQVKYLGYLLKEGQRWLTEARKETVMGQPTPKTPRQLREFLGKAGFCRLFIPGFAEMAAPLYPLTKPGTLFNWGPDQQKAYQEIKQALLTAPALGLPDLTKPFELFVDEKQGYAKGVLTQKLGPWRRPVAYLSKKLDPVAAGWPPCLRMVAAIAVLRKDAGKLTMGQPLVILAPHAVEALVKQPPDRWLSNARMTHYQAMLLDTDRVQFGPVVALNPATLLPLPEEGAPHDCLEILAETHGTRPDLTDQPIPDADHTWYTDGSSFLQEGQRKAGAAVTTETEVIWARALPAGTSAQRAELIALTQALKMAEGKRLNVYTDSRYAFATAHIHGEIYRRRGWLTSEGREIKNKSEILALLKALFLPKRLSIIHCLGHQKGDSAEARGNRLADQAAREAAIKTPPDTSTLLAGKRTADGSEFEKRTADGSEFESPKKKAKVE

SEQ ID NO: 1898 - protein, 2093 aa, synthetic construct
MPAAKRVKLDGGDKKYSIGLDIGTNSVGWAVITDEYKVPSKKFKVLGNTDRHSIKKNLIGALLFDSGETAEATRLKRTARRRYTRRKNRICYLQEIFSNEMAKVDDSFFHRLEESFLVEEDKKHERHPIFGNIVDEVAYHEKYPTIYHLRKKLVDSTDKADLRLIYLALAHMIKFRGHFLIEGDLNPDNSDVDKLFIQLVQTYNQLFEENPINASGVDAKAILSARLSKSRRLENLIAQLPGEKKNGLFGNLIALSLGLTPNFKSNFDLAEDAKLQLSKDTYDDDLDNLLAQIGDQYADLFLAAKNLSDAILLSDILRVNTEITKAPLSASMIKRYDEHHQDLTLLKALVRQQLPEKYKEIFFDQSKNGYAGYIDGGASQEEFYKFIKPILEKMDGTEELLVKLNREDLLRKQRTFDNGSIPHQIHLGELHAILRRQEDFYPFLKDNREKIEKILTFRIPYYVGPLARGNSRFAWMTRKSEETITPWNFEEVVDKGASAQSFIERMTNFDKNLPNEKVLPKHSLLYEYFTVYNELTKVKYVTEGMRKPAFLSGEQKKAIVDLLFKTNRKVTVKQLKEDYFKKIECFDSVEISGVEDRFNASLGTYHDLLKIIKDKDFLDNEENEDILEDIVLTLTLFEDREMIEERLKTYAHLFDDKVMKQLKRRRYTGWGRLSRKLINGIRDKQSGKTILDFLKSDGFANRNFMQLIHDDSLTFKEDIQKAQVSGQGDSLHEHIANLAGSPAIKKGILQTVKVVDELVKVMGRHKPENIVIEMARENQTTQKGQKNSRERMKRIEEGIKELGSQILKEHPVENTQLQNEKLYLYYLQNGRDMYVDQELDINRLSDYDVDHIVPQSFLKDDSIDNKVLTRSDKARGKSDNVPSEEVVKKMKNYWRQLLNAKLITQRKFDNLTKAERGGLSELDKAGFIKRQLVETRQITKHVAQILDSRMNTKYDENDKLIREVKVITLKSKLVSDFRKDFQFYKVREINNYHHAHDAYLNAVVGTALIKKYPKLESEFVYGDYKVYDVRKMIAKSEQEIGKATAKYFFYSNIMNFFKTEITLANGEIRKRPLIETNGETGEIVWDKGRDFATVRKVLSMPQVNIVKKTEVQTGGFSKESILPKRNSDKLIARKKDWDPKKYGGFDSPTVAYSVLVVAKVEKGKSKKLKSVKELLGITIMERSSFEKNPIDFLEAKGYKEVKKDLIIKLPKYSLFELENGRKRMLASAGELQKGNELALPSKYVNFLYLASHYEKLKGSPEDNEQKQLFVEQHKHYLDEIIEQISEFSKRVILADANLDKVLSAYNKHRDKPIREQAENIIHLFTLTNLGAPAAFKYFDTTIDRKRYTSTKEVLDATLIHQSITGLYETRIDLSQLGGDGGEAAAKGSSGGTLNLEDEYRLYETSAEPEVSPGSTWLSDFPQAWAETGGMGLAVRQAPLIIPLKATSTPVSIKQYPMSQEAKLGIKPHIQRLLDQGILVPCQSPWNTPLLPVKKPGTNDYRPVQDLREVNKRVEDIHPTVPNPYNLLSGLPPSHRWYTVLDLKDAFFCLRLHPTSQPLFAFEWRDPGMGISGQLTWTRLPQGFKNSPTLFNEALHRDLADFRIQHPDLILLQYVDDILLAATSELDCQQGTRALLLTLGNLGYRASAKKAQLCQKQVKYLGYLLKEGQRWLTEARKETVMGQPTPKTPRQLREFLGKAGFCRLFIPGFAEMAAPLYPLTKPGTLFNWGPDQQKAYQEIKQALLTAPALGLPDLTKPFELFVDEKQGYAKGVLTQKLGPWRRPVAYLSKKLDPVAAGWPPCLRMVAAIAVLRKDAGKLTMGQPLVILAPHAVEALVKQPPDRWLSNARMTHYQAMLLDTDRVQFGPVVALNPATLLPLPEEGAPHDCLEILAETHGTRPDLTDQPIPDADHTWYTDGSSFLQEGQRKAGAAVTTETEVIWARALPAGTSAQRAELIALTQALKMAEGKRLNVYTDSRYAFATAHIHGEIYRRRGWLTSEGREIKNKSEILALLKALFLPKRLSIIHCLGHQKGDSAEARGNRLADQAAREAAIKTPPDTSTLLAGKRTADGSEFEKRTADGSEFESPKKKAKVE

SEQ ID NO: 1899 - protein, 2094 aa, synthetic construct
MPAAKRVKLDGGDKKYSIGLDIGTNSVGWAVITDEYKVPSKKFKVLGNTDRHSIKKNLIGALLFDSGETAEATRLKRTARRRYTRRKNRICYLQEIFSNEMAKVDDSFFHRLEESFLVEEDKKHERHPIFGNIVDEVAYHEKYPTIYHLRKKLVDSTDKADLRLIYLALAHMIKFRGHFLIEGDLNPDNSDVDKLFIQLVQTYNQLFEENPINASGVDAKAILSARLSKSRRLENLIAQLPGEKKNGLFGNLIALSLGLTPNFKSNFDLAEDAKLQLSKDTYDDDLDNLLAQIGDQYADLFLAAKNLSDAILLSDILRVNTEITKAPLSASMIKRYDEHHQDLTLLKALVRQQLPEKYKEIFFDQSKNGYAGYIDGGASQEEFYKFIKPILEKMDGTEELLVKLNREDLLRKQRTFDNGSIPHQIHLGELHAILRRQEDFYPFLKDNREKIEKILTFRIPYYVGPLARGNSRFAWMTRKSEETITPWNFEEVVDKGASAQSFIERMTNFDKNLPNEKVLPKHSLLYEYFTVYNELTKVKYVTEGMRKPAFLSGEQKKAIVDLLFKTNRKVTVKQLKEDYFKKIECFDSVEISGVEDRFNASLGTYHDLLKIIKDKDFLDNEENEDILEDIVLTLTLFEDREMIEERLKTYAHLFDDKVMKQLKRRRYTGWGRLSRKLINGIRDKQSGKTILDFLKSDGFANRNFMQLIHDDSLTFKEDIQKAQVSGQGDSLHEHIANLAGSPAIKKGILQTVKVVDELVKVMGRHKPENIVIEMARENQTTQKGQKNSRERMKRIEEGIKELGSQILKEHPVENTQLQNEKLYLYYLQNGRDMYVDQELDINRLSDYDVDHIVPQSFLKDDSIDNKVLTRSDKARGKSDNVPSEEVVKKMKNYWRQLLNAKLITQRKFDNLTKAERGGLSELDKAGFIKRQLVETRQITKHVAQILDSRMNTKYDENDKLIREVKVITLKSKLVSDFRKDFQFYKVREINNYHHAHDAYLNAVVGTALIKKYPKLESEFVYGDYKVYDVRKMIAKSEQEIGKATAKYFFYSNIMNFFKTEITLANGEIRKRPLIETNGETGEIVWDKGRDFATVRKVLSMPQVNIVKKTEVQTGGFSKESILPKRNSDKLIARKKDWDPKKYGGFDSPTVAYSVLVVAKVEKGKSKKLKSVKELLGITIMERSSFEKNPIDFLEAKGYKEVKKDLIIKLPKYSLFELENGRKRMLASAGELQKGNELALPSKYVNFLYLASHYEKLKGSPEDNEQKQLFVEQHKHYLDEIIEQISEFSKRVILADANLDKVLSAYNKHRDKPIREQAENIIHLFTLTNLGAPAAFKYFDTTIDRKRYTSTKEVLDATLIHQSITGLYETRIDLSQLGGDGGGGSPAPGGGGGTLNLEDEYRLYETSAEPEVSPGSTWLSDFPQAWAETGGMGLAVRQAPLIIPLKATSTPVSIKQYPMSQEAKLGIKPHIQRLLDQGILVPCQSPWNTPLLPVKKPGTNDYRPVQDLREVNKRVEDIHPTVPNPYNLLSGLPPSHRWYTVLDLKDAFFCLRLHPTSQPLFAFEWRDPGMGISGQLTWTRLPQGFKNSPTLFNEALHRDLADFRIQHPDLILLQYVDDILLAATSELDCQQGTRALLLTLGNLGYRASAKKAQLCQKQVKYLGYLLKEGQRWLTEARKETVMGQPTPKTPRQLREFLGKAGFCRLFIPGFAEMAAPLYPLTKPGTLFNWGPDQQKAYQEIKQALLTAPALGLPDLTKPFELFVDEKQGYAKGVLTQKLGPWRRPVAYLSKKLDPVAAGWPPCLRMVAAIAVLRKDAGKLTMGQPLVILAPHAVEALVKQPPDRWLSNARMTHYQAMLLDTDRVQFGPVVALNPATLLPLPEEGAPHDCLEILAETHGTRPDLTDQPIPDADHTWYTDGSSFLQEGQRKAGAAVTTETEVIWARALPAGTSAQRAELIALTQALKMAEGKRLNVYTDSRYAFATAHIHGEIYRRRGWLTSEGREIKNKSEILALLKALFLPKRLSIIHCLGHQKGDSAEARGNRLADQAAREAAIKTPPDTSTLLAGKRTADGSEFEKRTADGSEFESPKKKAKVE

SEQ ID NO: 1900 - protein, 2091 aa, synthetic construct
MPAAKRVKLDGGDKKYSIGLDIGTNSVGWAVITDEYKVPSKKFKVLGNTDRHSIKKNLIGALLFDSGETAEATRLKRTARRRYTRRKNRICYLQEIFSNEMAKVDDSFFHRLEESFLVEEDKKHERHPIFGNIVDEVAYHEKYPTIYHLRKKLVDSTDKADLRLIYLALAHMIKFRGHFLIEGDLNPDNSDVDKLFIQLVQTYNQLFEENPINASGVDAKAILSARLSKSRRLENLIAQLPGEKKNGLFGNLIALSLGLTPNFKSNFDLAEDAKLQLSKDTYDDDLDNLLAQIGDQYADLFLAAKNLSDAILLSDILRVNTEITKAPLSASMIKRYDEHHQDLTLLKALVRQQLPEKYKEIFFDQSKNGYAGYIDGGASQEEFYKFIKPILEKMDGTEELLVKLNREDLLRKQRTFDNGSIPHQIHLGELHAILRRQEDFYPFLKDNREKIEKILTFRIPYYVGPLARGNSRFAWMTRKSEETITPWNFEEVVDKGASAQSFIERMTNFDKNLPNEKVLPKHSLLYEYFTVYNELTKVKYVTEGMRKPAFLSGEQKKAIVDLLFKTNRKVTVKQLKEDYFKKIECFDSVEISGVEDRFNASLGTYHDLLKIIKDKDFLDNEENEDILEDIVLTLTLFEDREMIEERLKTYAHLFDDKVMKQLKRRRYTGWGRLSRKLINGIRDKQSGKTILDFLKSDGFANRNFMQLIHDDSLTFKEDIQKAQVSGQGDSLHEHIANLAGSPAIKKGILQTVKVVDELVKVMGRHKPENIVIEMARENQTTQKGQKNSRERMKRIEEGIKELGSQILKEHPVENTQLQNEKLYLYYLQNGRDMYVDQELDINRLSDYDVDHIVPQSFLKDDSIDNKVLTRSDKARGKSDNVPSEEVVKKMKNYWRQLLNAKLITQRKFDNLTKAERGGLSELDKAGFIKRQLVETRQITKHVAQILDSRMNTKYDENDKLIREVKVITLKSKLVSDFRKDFQFYKVREINNYHHAHDAYLNAVVGTALIKKYPKLESEFVYGDYKVYDVRKMIAKSEQEIGKATAKYFFYSNIMNFFKTEITLANGEIRKRPLIETNGETGEIVWDKGRDFATVRKVLSMPQVNIVKKTEVQTGGFSKESILPKRNSDKLIARKKDWDPKKYGGFDSPTVAYSVLVVAKVEKGKSKKLKSVKELLGITIMERSSFEKNPIDFLEAKGYKEVKKDLIIKLPKYSLFELENGRKRMLASAGELQKGNELALPSKYVNFLYLASHYEKLKGSPEDNEQKQLFVEQHKHYLDEIIEQISEFSKRVILADANLDKVLSAYNKHRDKPIREQAENIIHLFTLTNLGAPAAFKYFDTTIDRKRYTSTKEVLDATLIHQSITGLYETRIDLSQLGGDGGPAPGSSGGTLNLEDEYRLYETSAEPEVSPGSTWLSDFPQAWAETGGMGLAVRQAPLIIPLKATSTPVSIKQYPMSQEAKLGIKPHIQRLLDQGILVPCQSPWNTPLLPVKKPGTNDYRPVQDLREVNKRVEDIHPTVPNPYNLLSGLPPSHRWYTVLDLKDAFFCLRLHPTSQPLFAFEWRDPGMGISGQLTWTRLPQGFKNSPTLFNEALHRDLADFRIQHPDLILLQYVDDILLAATSELDCQQGTRALLLTLGNLGYRASAKKAQLCQKQVKYLGYLLKEGQRWLTEARKETVMGQPTPKTPRQLREFLGKAGFCRLFIPGFAEMAAPLYPLTKPGTLFNWGPDQQKAYQEIKQALLTAPALGLPDLTKPFELFVDEKQGYAKGVLTQKLGPWRRPVAYLSKKLDPVAAGWPPCLRMVAAIAVLRKDAGKLTMGQPLVILAPHAVEALVKQPPDRWLSNARMTHYQAMLLDTDRVQFGPVVALNPATLLPLPEEGAPHDCLEILAETHGTRPDLTDQPIPDADHTWYTDGSSFLQEGQRKAGAAVTTETEVIWARALPAGTSAQRAELIALTQALKMAEGKRLNVYTDSRYAFATAHIHGEIYRRRGWLTSEGREIKNKSEILALLKALFLPKRLSIIHCLGHQKGDSAEARGNRLADQAAREAAIKTPPDTSTLLAGKRTADGSEFEKRTADGSEFESPKKKAKVE

SEQ ID NO: 1901 - protein, 2096 aa, synthetic construct
MPAAKRVKLDGGDKKYSIGLDIGTNSVGWAVITDEYKVPSKKFKVLGNTDRHSIKKNLIGALLFDSGETAEATRLKRTARRRYTRRKNRICYLQEIFSNEMAKVDDSFFHRLEESFLVEEDKKHERHPIFGNIVDEVAYHEKYPTIYHLRKKLVDSTDKADLRLIYLALAHMIKFRGHFLIEGDLNPDNSDVDKLFIQLVQTYNQLFEENPINASGVDAKAILSARLSKSRRLENLIAQLPGEKKNGLFGNLIALSLGLTPNFKSNFDLAEDAKLQLSKDTYDDDLDNLLAQIGDQYADLFLAAKNLSDAILLSDILRVNTEITKAPLSASMIKRYDEHHQDLTLLKALVRQQLPEKYKEIFFDQSKNGYAGYIDGGASQEEFYKFIKPILEKMDGTEELLVKLNREDLLRKQRTFDNGSIPHQIHLGELHAILRRQEDFYPFLKDNREKIEKILTFRIPYYVGPLARGNSRFAWMTRKSEETITPWNFEEVVDKGASAQSFIERMTNFDKNLPNEKVLPKHSLLYEYFTVYNELTKVKYVTEGMRKPAFLSGEQKKAIVDLLFKTNRKVTVKQLKEDYFKKIECFDSVEISGVEDRFNASLGTYHDLLKIIKDKDFLDNEENEDILEDIVLTLTLFEDREMIEERLKTYAHLFDDKVMKQLKRRRYTGWGRLSRKLINGIRDKQSGKTILDFLKSDGFANRNFMQLIHDDSLTFKEDIQKAQVSGQGDSLHEHIANLAGSPAIKKGILQTVKVVDELVKVMGRHKPENIVIEMARENQTTQKGQKNSRERMKRIEEGIKELGSQILKEHPVENTQLQNEKLYLYYLQNGRDMYVDQELDINRLSDYDVDHIVPQSFLKDDSIDNKVLTRSDKARGKSDNVPSEEVVKKMKNYWRQLLNAKLITQRKFDNLTKAERGGLSELDKAGFIKRQLVETRQITKHVAQILDSRMNTKYDENDKLIREVKVITLKSKLVSDFRKDFQFYKVREINNYHHAHDAYLNAVVGTALIKKYPKLESEFVYGDYKVYDVRKMIAKSEQEIGKATAKYFFYSNIMNFFKTEITLANGEIRKRPLIETNGETGEIVWDKGRDFATVRKVLSMPQVNIVKKTEVQTGGFSKESILPKRNSDKLIARKKDWDPKKYGGFDSPTVAYSVLVVAKVEKGKSKKLKSVKELLGITIMERSSFEKNPIDFLEAKGYKEVKKDLIIKLPKYSLFELENGRKRMLASAGELQKGNELALPSKYVNFLYLASHYEKLKGSPEDNEQKQLFVEQHKHYLDEIIEQISEFSKRVILADANLDKVLSAYNKHRDKPIREQAENIIHLFTLTNLGAPAAFKYFDTTIDRKRYTSTKEVLDATLIHQSITGLYETRIDLSQLGGDGGGSSGGSEAAAKGGTLNLEDEYRLYETSAEPEVSPGSTWLSDFPQAWAETGGMGLAVRQAPLIIPLKATSTPVSIKQYPMSQEAKLGIKPHIQRLLDQGILVPCQSPWNTPLLPVKKPGTNDYRPVQDLREVNKRVEDIHPTVPNPYNLLSGLPPSHRWYTVLDLKDAFFCLRLHPTSQPLFAFEWRDPGMGISGQLTWTRLPQGFKNSPTLFNEALHRDLADFRIQHPDLILLQYVDDILLAATSELDCQQGTRALLLTLGNLGYRASAKKAQLCQKQVKYLGYLLKEGQRWLTEARKETVMGQPTPKTPRQLREFLGKAGFCRLFIPGFAEMAAPLYPLTKPGTLFNWGPDQQKAYQEIKQALLTAPALGLPDLTKPFELFVDEKQGYAKGVLTQKLGPWRRPVAYLSKKLDPVAAGWPPCLRMVAAIAVLRKDAGKLTMGQPLVILAPHAVEALVKQPPDRWLSNARMTHYQAMLLDTDRVQFGPVVALNPATLLPLPEEGAPHDCLEILAETHGTRPDLTDQPIPDADHTWYTDGSSFLQEGQRKAGAAVTTETEVIWARALPAGTSAQRAELIALTQALKMAEGKRLNVYTDSRYAFATAHIHGEIYRRRGWLTSEGREIKNKSEILALLKALFLPKRLSIIHCLGHQKGDSAEARGNRLADQAAREAAIKTPPDTSTLLAGKRTADGSEFEKRTADGSEFESPKKKAKVE

SEQ ID NO: 1902 - protein, 2094 aa, synthetic construct
MPAAKRVKLDGGDKKYSIGLDIGTNSVGWAVITDEYKVPSKKFKVLGNTDRHSIKKNLIGALLFDSGETAEATRLKRTARRRYTRRKNRICYLQEIFSNEMAKVDDSFFHRLEESFLVEEDKKHERHPIFGNIVDEVAYHEKYPTIYHLRKKLVDSTDKADLRLIYLALAHMIKFRGHFLIEGDLNPDNSDVDKLFIQLVQTYNQLFEENPINASGVDAKAILSARLSKSRRLENLIAQLPGEKKNGLFGNLIALSLGLTPNFKSNFDLAEDAKLQLSKDTYDDDLDNLLAQIGDQYADLFLAAKNLSDAILLSDILRVNTEITKAPLSASMIKRYDEHHQDLTLLKALVRQQLPEKYKEIFFDQSKNGYAGYIDGGASQEEFYKFIKPILEKMDGTEELLVKLNREDLLRKQRTFDNGSIPHQIHLGELHAILRRQEDFYPFLKDNREKIEKILTFRIPYYVGPLARGNSRFAWMTRKSEETITPWNFEEVVDKGASAQSFIERMTNFDKNLPNEKVLPKHSLLYEYFTVYNELTKVKYVTEGMRKPAFLSGEQKKAIVDLLFKTNRKVTVKQLKEDYFKKIECFDSVEISGVEDRFNASLGTYHDLLKIIKDKDFLDNEENEDILEDIVLTLTLFEDREMIEERLKTYAHLFDDKVMKQLKRRRYTGWGRLSRKLINGIRDKQSGKTILDFLKSDGFANRNFMQLIHDDSLTFKEDIQKAQVSGQGDSLHEHIANLAGSPAIKKGILQTVKVVDELVKVMGRHKPENIVIEMARENQTTQKGQKNSRERMKRIEEGIKELGSQILKEHPVENTQLQNEKLYLYYLQNGRDMYVDQELDINRLSDYDVDHIVPQSFLKDDSIDNKVLTRSDKARGKSDNVPSEEVVKKMKNYWRQLLNAKLITQRKFDNLTKAERGGLSELDKAGFIKRQLVETRQITKHVAQILDSRMNTKYDENDKLIREVKVITLKSKLVSDFRKDFQFYKVREINNYHHAHDAYLNAVVGTALIKKYPKLESEFVYGDYKVYDVRKMIAKSEQEIGKATAKYFFYSNIMNFFKTEITLANGEIRKRPLIETNGETGEIVWDKGRDFATVRKVLSMPQVNIVKKTEVQTGGFSKESILPKRNSDKLIARKKDWDPKKYGGFDSPTVAYSVLVVAKVEKGKSKKLKSVKELLGITIMERSSFEKNPIDFLEAKGYKEVKKDLIIKLPKYSLFELENGRKRMLASAGELQKGNELALPSKYVNFLYLASHYEKLKGSPEDNEQKQLFVEQHKHYLDEIIEQISEFSKRVILADANLDKVLSAYNKHRDKPIREQAENIIHLFTLTNLGAPAAFKYFDTTIDRKRYTSTKEVLDATLIHQSITGLYETRIDLSQLGGDGGPAPGGSGSSGGTLNLEDEYRLYETSAEPEVSPGSTWLSDFPQAWAETGGMGLAVRQAPLIIPLKATSTPVSIKQYPMSQEAKLGIKPHIQRLLDQGILVPCQSPWNTPLLPVKKPGTNDYRPVQDLREVNKRVEDIHPTVPNPYNLLSGLPPSHRWYTVLDLKDAFFCLRLHPTSQPLFAFEWRDPGMGISGQLTWTRLPQGFKNSPTLFNEALHRDLADFRIQHPDLILLQYVDDILLAATSELDCQQGTRALLLTLGNLGYRASAKKAQLCQKQVKYLGYLLKEGQRWLTEARKETVMGQPTPKTPRQLREFLGKAGFCRLFIPGFAEMAAPLYPLTKPGTLFNWGPDQQKAYQEIKQALLTAPALGLPDLTKPFELFVDEKQGYAKGVLTQKLGPWRRPVAYLSKKLDPVAAGWPPCLRMVAAIAVLRKDAGKLTMGQPLVILAPHAVEALVKQPPDRWLSNARMTHYQAMLLDTDRVQFGPVVALNPATLLPLPEEGAPHDCLEILAETHGTRPDLTDQPIPDADHTWYTDGSSFLQEGQRKAGAAVTTETEVIWARALPAGTSAQRAELIALTQALKMAEGKRLNVYTDSRYAFATAHIHGEIYRRRGWLTSEGREIKNKSEILALLKALFLPKRLSIIHCLGHQKGDSAEARGNRLADQAAREAAIKTPPDTSTLLAGKRTADGSEFEKRTADGSEFESPKKKAKVE

SEQ ID NO: 1903 - protein, 2094 aa, synthetic construct
MPAAKRVKLDGGDKKYSIGLDIGTNSVGWAVITDEYKVPSKKFKVLGNTDRHSIKKNLIGALLFDSGETAEATRLKRTARRRYTRRKNRICYLQEIFSNEMAKVDDSFFHRLEESFLVEEDKKHERHPIFGNIVDEVAYHEKYPTIYHLRKKLVDSTDKADLRLIYLALAHMIKFRGHFLIEGDLNPDNSDVDKLFIQLVQTYNQLFEENPINASGVDAKAILSARLSKSRRLENLIAQLPGEKKNGLFGNLIALSLGLTPNFKSNFDLAEDAKLQLSKDTYDDDLDNLLAQIGDQYADLFLAAKNLSDAILLSDILRVNTEITKAPLSASMIKRYDEHHQDLTLLKALVRQQLPEKYKEIFFDQSKNGYAGYIDGGASQEEFYKFIKPILEKMDGTEELLVKLNREDLLRKQRTFDNGSIPHQIHLGELHAILRRQEDFYPFLKDNREKIEKILTFRIPYYVGPLARGNSRFAWMTRKSEETITPWNFEEVVDKGASAQSFIERMTNFDKNLPNEKVLPKHSLLYEYFTVYNELTKVKYVTEGMRKPAFLSGEQKKAIVDLLFKTNRKVTVKQLKEDYFKKIECFDSVEISGVEDRFNASLGTYHDLLKIIKDKDFLDNEENEDILEDIVLTLTLFEDREMIEERLKTYAHLFDDKVMKQLKRRRYTGWGRLSRKLINGIRDKQSGKTILDFLKSDGFANRNFMQLIHDDSLTFKEDIQKAQVSGQGDSLHEHIANLAGSPAIKKGILQTVKVVDELVKVMGRHKPENIVIEMARENQTTQKGQKNSRERMKRIEEGIKELGSQILKEHPVENTQLQNEKLYLYYLQNGRDMYVDQELDINRLSDYDVDHIVPQSFLKDDSIDNKVLTRSDKARGKSDNVPSEEVVKKMKNYWRQLLNAKLITQRKFDNLTKAERGGLSELDKAGFIKRQLVETRQITKHVAQILDSRMNTKYDENDKLIREVKVITLKSKLVSDFRKDFQFYKVREINNYHHAHDAYLNAVVGTALIKKYPKLESEFVYGDYKVYDVRKMIAKSEQEIGKATAKYFFYSNIMNFFKTEITLANGEIRKRPLIETNGETGEIVWDKGRDFATVRKVLSMPQVNIVKKTEVQTGGFSKESILPKRNSDKLIARKKDWDPKKYGGFDSPTVAYSVLVVAKVEKGKSKKLKSVKELLGITIMERSSFEKNPIDFLEAKGYKEVKKDLIIKLPKYSLFELENGRKRMLASAGELQKGNELALPSKYVNFLYLASHYEKLKGSPEDNEQKQLFVEQHKHYLDEIIEQISEFSKRVILADANLDKVLSAYNKHRDKPIREQAENIIHLFTLTNLGAPAAFKYFDTTIDRKRYTSTKEVLDATLIHQSITGLYETRIDLSQLGGDGGGGSPAPGSSGGTLNLEDEYRLYETSAEPEVSPGSTWLSDFPQAWAETGGMGLAVRQAPLIIPLKATSTPVSIKQYPMSQEAKLGIKPHIQRLLDQGILVPCQSPWNTPLLPVKKPGTNDYRPVQDLREVNKRVEDIHPTVPNPYNLLSGLPPSHRWYTVLDLKDAFFCLRLHPTSQPLFAFEWRDPGMGISGQLTWTRLPQGFKNSPTLFNEALHRDLADFRIQHPDLILLQYVDDILLAATSELDCQQGTRALLLTLGNLGYRASAKKAQLCQKQVKYLGYLLKEGQRWLTEARKETVMGQPTPKTPRQLREFLGKAGFCRLFIPGFAEMAAPLYPLTKPGTLFNWGPDQQKAYQEIKQALLTAPALGLPDLTKPFELFVDEKQGYAKGVLTQKLGPWRRPVAYLSKKLDPVAAGWPPCLRMVAAIAVLRKDAGKLTMGQPLVILAPHAVEALVKQPPDRWLSNARMTHYQAMLLDTDRVQFGPVVALNPATLLPLPEEGAPHDCLEILAETHGTRPDLTDQPIPDADHTWYTDGSSFLQEGQRKAGAAVTTETEVIWARALPAGTSAQRAELIALTQALKMAEGKRLNVYTDSRYAFATAHIHGEIYRRRGWLTSEGREIKNKSEILALLKALFLPKRLSIIHCLGHQKGDSAEARGNRLADQAAREAAIKTPPDTSTLLAGKRTADGSEFEKRTADGSEFESPKKKAKVE

SEQ ID NO: 1904 - protein, 2091 aa, synthetic construct
MPAAKRVKLDGGDKKYSIGLDIGTNSVGWAVITDEYKVPSKKFKVLGNTDRHSIKKNLIGALLFDSGETAEATRLKRTARRRYTRRKNRICYLQEIFSNEMAKVDDSFFHRLEESFLVEEDKKHERHPIFGNIVDEVAYHEKYPTIYHLRKKLVDSTDKADLRLIYLALAHMIKFRGHFLIEGDLNPDNSDVDKLFIQLVQTYNQLFEENPINASGVDAKAILSARLSKSRRLENLIAQLPGEKKNGLFGNLIALSLGLTPNFKSNFDLAEDAKLQLSKDTYDDDLDNLLAQIGDQYADLFLAAKNLSDAILLSDILRVNTEITKAPLSASMIKRYDEHHQDLTLLKALVRQQLPEKYKEIFFDQSKNGYAGYIDGGASQEEFYKFIKPILEKMDGTEELLVKLNREDLLRKQRTFDNGSIPHQIHLGELHAILRRQEDFYPFLKDNREKIEKILTFRIPYYVGPLARGNSRFAWMTRKSEETITPWNFEEVVDKGASAQSFIERMTNFDKNLPNEKVLPKHSLLYEYFTVYNELTKVKYVTEGMRKPAFLSGEQKKAIVDLLFKTNRKVTVKQLKEDYFKKIECFDSVEISGVEDRFNASLGTYHDLLKIIKDKDFLDNEENEDILEDIVLTLTLFEDREMIEERLKTYAHLFDDKVMKQLKRRRYTGWGRLSRKLINGIRDKQSGKTILDFLKSDGFANRNFMQLIHDDSLTFKEDIQKAQVSGQGDSLHEHIANLAGSPAIKKGILQTVKVVDELVKVMGRHKPENIVIEMARENQTTQKGQKNSRERMKRIEEGIKELGSQILKEHPVENTQLQNEKLYLYYLQNGRDMYVDQELDINRLSDYDVDHIVPQSFLKDDSIDNKVLTRSDKARGKSDNVPSEEVVKKMKNYWRQLLNAKLITQRKFDNLTKAERGGLSELDKAGFIKRQLVETRQITKHVAQILDSRMNTKYDENDKLIREVKVITLKSKLVSDFRKDFQFYKVREINNYHHAHDAYLNAVVGTALIKKYPKLESEFVYGDYKVYDVRKMIAKSEQEIGKATAKYFFYSNIMNFFKTEITLANGEIRKRPLIETNGETGEIVWDKGRDFATVRKVLSMPQVNIVKKTEVQTGGFSKESILPKRNSDKLIARKKDWDPKKYGGFDSPTVAYSVLVVAKVEKGKSKKLKSVKELLGITIMERSSFEKNPIDFLEAKGYKEVKKDLIIKLPKYSLFELENGRKRMLASAGELQKGNELALPSKYVNFLYLASHYEKLKGSPEDNEQKQLFVEQHKHYLDEIIEQISEFSKRVILADANLDKVLSAYNKHRDKPIREQAENIIHLFTLTNLGAPAAFKYFDTTIDRKRYTSTKEVLDATLIHQSITGLYETRIDLSQLGGDGGGSSGGGGGTLNLEDEYRLYETSAEPEVSPGSTWLSDFPQAWAETGGMGLAVRQAPLIIPLKATSTPVSIKQYPMSQEAKLGIKPHIQRLLDQGILVPCQSPWNTPLLPVKKPGTNDYRPVQDLREVNKRVEDIHPTVPNPYNLLSGLPPSHRWYTVLDLKDAFFCLRLHPTSQPLFAFEWRDPGMGISGQLTWTRLPQGFKNSPTLFNEALHRDLADFRIQHPDLILLQYVDDILLAATSELDCQQGTRALLLTLGNLGYRASAKKAQLCQKQVKYLGYLLKEGQRWLTEARKETVMGQPTPKTPRQLREFLGKAGFCRLFIPGFAEMAAPLYPLTKPGTLFNWGPDQQKAYQEIKQALLTAPALGLPDLTKPFELFVDEKQGYAKGVLTQKLGPWRRPVAYLSKKLDPVAAGWPPCLRMVAAIAVLRKDAGKLTMGQPLVILAPHAVEALVKQPPDRWLSNARMTHYQAMLLDTDRVQFGPVVALNPATLLPLPEEGAPHDCLEILAETHGTRPDLTDQPIPDADHTWYTDGSSFLQEGQRKAGAAVTTETEVIWARALPAGTSAQRAELIALTQALKMAEGKRLNVYTDSRYAFATAHIHGEIYRRRGWLTSEGREIKNKSEILALLKALFLPKRLSIIHCLGHQKGDSAEARGNRLADQAAREAAIKTPPDTSTLLAGKRTADGSEFEKRTADGSEFESPKKKAKVE

SEQ ID NO: 1905 - protein, 2094 aa, synthetic construct
MPAAKRVKLDGGDKKYSIGLDIGTNSVGWAVITDEYKVPSKKFKVLGNTDRHSIKKNLIGALLFDSGETAEATRLKRTARRRYTRRKNRICYLQEIFSNEMAKVDDSFFHRLEESFLVEEDKKHERHPIFGNIVDEVAYHEKYPTIYHLRKKLVDSTDKADLRLIYLALAHMIKFRGHFLIEGDLNPDNSDVDKLFIQLVQTYNQLFEENPINASGVDAKAILSARLSKSRRLENLIAQLPGEKKNGLFGNLIALSLGLTPNFKSNFDLAEDAKLQLSKDTYDDDLDNLLAQIGDQYADLFLAAKNLSDAILLSDILRVNTEITKAPLSASMIKRYDEHHQDLTLLKALVRQQLPEKYKEIFFDQSKNGYAGYIDGGASQEEFYKFIKPILEKMDGTEELLVKLNREDLLRKQRTFDNGSIPHQIHLGELHAILRRQEDFYPFLKDNREKIEKILTFRIPYYVGPLARGNSRFAWMTRKSEETITPWNFEEVVDKGASAQSFIERMTNFDKNLPNEKVLPKHSLLYEYFTVYNELTKVKYVTEGMRKPAFLSGEQKKAIVDLLFKTNRKVTVKQLKEDYFKKIECFDSVEISGVEDRFNASLGTYHDLLKIIKDKDFLDNEENEDILEDIVLTLTLFEDREMIEERLKTYAHLFDDKVMKQLKRRRYTGWGRLSRKLINGIRDKQSGKTILDFLKSDGFANRNFMQLIHDDSLTFKEDIQKAQVSGQGDSLHEHIANLAGSPAIKKGILQTVKVVDELVKVMGRHKPENIVIEMARENQTTQKGQKNSRERMKRIEEGIKELGSQILKEHPVENTQLQNEKLYLYYLQNGRDMYVDQELDINRLSDYDVDHIVPQSFLKDDSIDNKVLTRSDKARGKSDNVPSEEVVKKMKNYWRQLLNAKLITQRKFDNLTKAERGGLSELDKAGFIKRQLVETRQITKHVAQILDSRMNTKYDENDKLIREVKVITLKSKLVSDFRKDFQFYKVREINNYHHAHDAYLNAVVGTALIKKYPKLESEFVYGDYKVYDVRKMIAKSEQEIGKATAKYFFYSNIMNFFKTEITLANGEIRKRPLIETNGETGEIVWDKGRDFATVRKVLSMPQVNIVKKTEVQTGGFSKESILPKRNSDKLIARKKDWDPKKYGGFDSPTVAYSVLVVAKVEKGKSKKLKSVKELLGITIMERSSFEKNPIDFLEAKGYKEVKKDLIIKLPKYSLFELENGRKRMLASAGELQKGNELALPSKYVNFLYLASHYEKLKGSPEDNEQKQLFVEQHKHYLDEIIEQISEFSKRVILADANLDKVLSAYNKHRDKPIREQAENIIHLFTLTNLGAPAAFKYFDTTIDRKRYTSTKEVLDATLIHQSITGLYETRIDLSQLGGDGGGGGGSSPAPGGTLNLEDEYRLYETSAEPEVSPGSTWLSDFPQAWAETGGMGLAVRQAPLIIPLKATSTPVSIKQYPMSQEAKLGIKPHIQRLLDQGILVPCQSPWNTPLLPVKKPGTNDYRPVQDLREVNKRVEDIHPTVPNPYNLLSGLPPSHRWYTVLDLKDAFFCLRLHPTSQPLFAFEWRDPGMGISGQLTWTRLPQGFKNSPTLFNEALHRDLADFRIQHPDLILLQYVDDILLAATSELDCQQGTRALLLTLGNLGYRASAKKAQLCQKQVKYLGYLLKEGQRWLTEARKETVMGQPTPKTPRQLREFLGKAGFCRLFIPGFAEMAAPLYPLTKPGTLFNWGPDQQKAYQEIKQALLTAPALGLPDLTKPFELFVDEKQGYAKGVLTQKLGPWRRPVAYLSKKLDPVAAGWPPCLRMVAAIAVLRKDAGKLTMGQPLVILAPHAVEALVKQPPDRWLSNARMTHYQAMLLDTDRVQFGPVVALNPATLLPLPEEGAPHDCLEILAETHGTRPDLTDQPIPDADHTWYTDGSSFLQEGQRKAGAAVTTETEVIWARALPAGTSAQRAELIALTQALKMAEGKRLNVYTDSRYAFATAHIHGEIYRRRGWLTSEGREIKNKSEILALLKALFLPKRLSIIHCLGHQKGDSAEARGNRLADQAAREAAIKTPPDTSTLLAGKRTADGSEFEKRTADGSEFESPKKKAKVE

SEQ ID NO: 1906 - protein, 2096 aa, synthetic construct
MPAAKRVKLDGGDKKYSIGLDIGTNSVGWAVITDEYKVPSKKFKVLGNTDRHSIKKNLIGALLFDSGETAEATRLKRTARRRYTRRKNRICYLQEIFSNEMAKVDDSFFHRLEESFLVEEDKKHERHPIFGNIVDEVAYHEKYPTIYHLRKKLVDSTDKADLRLIYLALAHMIKFRGHFLIEGDLNPDNSDVDKLFIQLVQTYNQLFEENPINASGVDAKAILSARLSKSRRLENLIAQLPGEKKNGLFGNLIALSLGLTPNFKSNFDLAEDAKLQLSKDTYDDDLDNLLAQIGDQYADLFLAAKNLSDAILLSDILRVNTEITKAPLSASMIKRYDEHHQDLTLLKALVRQQLPEKYKEIFFDQSKNGYAGYIDGGASQEEFYKFIKPILEKMDGTEELLVKLNREDLLRKQRTFDNGSIPHQIHLGELHAILRRQEDFYPFLKDNREKIEKILTFRIPYYVGPLARGNSRFAWMTRKSEETITPWNFEEVVDKGASAQSFIERMTNFDKNLPNEKVLPKHSLLYEYFTVYNELTKVKYVTEGMRKPAFLSGEQKKAIVDLLFKTNRKVTVKQLKEDYFKKIECFDSVEISGVEDRFNASLGTYHDLLKIIKDKDFLDNEENEDILEDIVLTLTLFEDREMIEERLKTYAHLFDDKVMKQLKRRRYTGWGRLSRKLINGIRDKQSGKTILDFLKSDGFANRNFMQLIHDDSLTFKEDIQKAQVSGQGDSLHEHIANLAGSPAIKKGILQTVKVVDELVKVMGRHKPENIVIEMARENQTTQKGQKNSRERMKRIEEGIKELGSQILKEHPVENTQLQNEKLYLYYLQNGRDMYVDQELDINRLSDYDVDHIVPQSFLKDDSIDNKVLTRSDKARGKSDNVPSEEVVKKMKNYWRQLLNAKLITQRKFDNLTKAERGGLSELDKAGFIKRQLVETRQITKHVAQILDSRMNTKYDENDKLIREVKVITLKSKLVSDFRKDFQFYKVREINNYHHAHDAYLNAVVGTALIKKYPKLESEFVYGDYKVYDVRKMIAKSEQEIGKATAKYFFYSNIMNFFKTEITLANGEIRKRPLIETNGETGEIVWDKGRDFATVRKVLSMPQVNIVKKTEVQTGGFSKESILPKRNSDKLIARKKDWDPKKYGGFDSPTVAYSVLVVAKVEKGKSKKLKSVKELLGITIMERSSFEKNPIDFLEAKGYKEVKKDLIIKLPKYSLFELENGRKRMLASAGELQKGNELALPSKYVNFLYLASHYEKLKGSPEDNEQKQLFVEQHKHYLDEIIEQISEFSKRVILADANLDKVLSAYNKHRDKPIREQAENIIHLFTLTNLGAPAAFKYFDTTIDRKRYTSTKEVLDATLIHQSITGLYETRIDLSQLGGDGGGGGGGSEAAAKGGTLNLEDEYRLYETSAEPEVSPGSTWLSDFPQAWAETGGMGLAVRQAPLIIPLKATSTPVSIKQYPMSQEAKLGIKPHIQRLLDQGILVPCQSPWNTPLLPVKKPGTNDYRPVQDLREVNKRVEDIHPTVPNPYNLLSGLPPSHRWYTVLDLKDAFFCLRLHPTSQPLFAFEWRDPGMGISGQLTWTRLPQGFKNSPTLFNEALHRDLADFRIQHPDLILLQYVDDILLAATSELDCQQGTRALLLTLGNLGYRASAKKAQLCQKQVKYLGYLLKEGQRWLTEARKETVMGQPTPKTPRQLREFLGKAGFCRLFIPGFAEMAAPLYPLTKPGTLFNWGPDQQKAYQEIKQALLTAPALGLPDLTKPFELFVDEKQGYAKGVLTQKLGPWRRPVAYLSKKLDPVAAGWPPCLRMVAAIAVLRKDAGKLTMGQPLVILAPHAVEALVKQPPDRWLSNARMTHYQAMLLDTDRVQFGPVVALNPATLLPLPEEGAPHDCLEILAETHGTRPDLTDQPIPDADHTWYTDGSSFLQEGQRKAGAAVTTETEVIWARALPAGTSAQRAELIALTQALKMAEGKRLNVYTDSRYAFATAHIHGEIYRRRGWLTSEGREIKNKSEILALLKALFLPKRLSIIHCLGHQKGDSAEARGNRLADQAAREAAIKTPPDTSTLLAGKRTADGSEFEKRTADGSEFESPKKKAKVE

SEQ ID NO: 1907 - protein, 2096 aa, synthetic construct
MPAAKRVKLDGGDKKYSIGLDIGTNSVGWAVITDEYKVPSKKFKVLGNTDRHSIKKNLIGALLFDSGETAEATRLKRTARRRYTRRKNRICYLQEIFSNEMAKVDDSFFHRLEESFLVEEDKKHERHPIFGNIVDEVAYHEKYPTIYHLRKKLVDSTDKADLRLIYLALAHMIKFRGHFLIEGDLNPDNSDVDKLFIQLVQTYNQLFEENPINASGVDAKAILSARLSKSRRLENLIAQLPGEKKNGLFGNLIALSLGLTPNFKSNFDLAEDAKLQLSKDTYDDDLDNLLAQIGDQYADLFLAAKNLSDAILLSDILRVNTEITKAPLSASMIKRYDEHHQDLTLLKALVRQQLPEKYKEIFFDQSKNGYAGYIDGGASQEEFYKFIKPILEKMDGTEELLVKLNREDLLRKQRTFDNGSIPHQIHLGELHAILRRQEDFYPFLKDNREKIEKILTFRIPYYVGPLARGNSRFAWMTRKSEETITPWNFEEVVDKGASAQSFIERMTNFDKNLPNEKVLPKHSLLYEYFTVYNELTKVKYVTEGMRKPAFLSGEQKKAIVDLLFKTNRKVTVKQLKEDYFKKIECFDSVEISGVEDRFNASLGTYHDLLKIIKDKDFLDNEENEDILEDIVLTLTLFEDREMIEERLKTYAHLFDDKVMKQLKRRRYTGWGRLSRKLINGIRDKQSGKTILDFLKSDGFANRNFMQLIHDDSLTFKEDIQKAQVSGQGDSLHEHIANLAGSPAIKKGILQTVKVVDELVKVMGRHKPENIVIEMARENQTTQKGQKNSRERMKRIEEGIKELGSQILKEHPVENTQLQNEKLYLYYLQNGRDMYVDQELDINRLSDYDVDHIVPQSFLKDDSIDNKVLTRSDKARGKSDNVPSEEVVKKMKNYWRQLLNAKLITQRKFDNLTKAERGGLSELDKAGFIKRQLVETRQITKHVAQILDSRMNTKYDENDKLIREVKVITLKSKLVSDFRKDFQFYKVREINNYHHAHDAYLNAVVGTALIKKYPKLESEFVYGDYKVYDVRKMIAKSEQEIGKATAKYFFYSNIMNFFKTEITLANGEIRKRPLIETNGETGEIVWDKGRDFATVRKVLSMPQVNIVKKTEVQTGGFSKESILPKRNSDKLIARKKDWDPKKYGGFDSPTVAYSVLVVAKVEKGKSKKLKSVKELLGITIMERSSFEKNPIDFLEAKGYKEVKKDLIIKLPKYSLFELENGRKRMLASAGELQKGNELALPSKYVNFLYLASHYEKLKGSPEDNEQKQLFVEQHKHYLDEIIEQISEFSKRVILADANLDKVLSAYNKHRDKPIREQAENIIHLFTLTNLGAPAAFKYFDTTIDRKRYTSTKEVLDATLIHQSITGLYETRIDLSQLGGDGGEAAAKGGSGGGGGTLNLEDEYRLYETSAEPEVSPGSTWLSDFPQAWAETGGMGLAVRQAPLIIPLKATSTPVSIKQYPMSQEAKLGIKPHIQRLLDQGILVPCQSPWNTPLLPVKKPGTNDYRPVQDLREVNKRVEDIHPTVPNPYNLLSGLPPSHRWYTVLDLKDAFFCLRLHPTSQPLFAFEWRDPGMGISGQLTWTRLPQGFKNSPTLFNEALHRDLADFRIQHPDLILLQYVDDILLAATSELDCQQGTRALLLTLGNLGYRASAKKAQLCQKQVKYLGYLLKEGQRWLTEARKETVMGQPTPKTPRQLREFLGKAGFCRLFIPGFAEMAAPLYPLTKPGTLFNWGPDQQKAYQEIKQALLTAPALGLPDLTKPFELFVDEKQGYAKGVLTQKLGPWRRPVAYLSKKLDPVAAGWPPCLRMVAAIAVLRKDAGKLTMGQPLVILAPHAVEALVKQPPDRWLSNARMTHYQAMLLDTDRVQFGPVVALNPATLLPLPEEGAPHDCLEILAETHGTRPDLTDQPIPDADHTWYTDGSSFLQEGQRKAGAAVTTETEVIWARALPAGTSAQRAELIALTQALKMAEGKRLNVYTDSRYAFATAHIHGEIYRRRGWLTSEGREIKNKSEILALLKALFLPKRLSIIHCLGHQKGDSAEARGNRLADQAAREAAIKTPPDTSTLLAGKRTADGSEFEKRTADGSEFESPKKKAKVE

SEQ ID NO: 1908 - protein, 2096 aa, synthetic construct
MPAAKRVKLDGGDKKYSIGLDIGTNSVGWAVITDEYKVPSKKFKVLGNTDRHSIKKNLIGALLFDSGETAEATRLKRTARRRYTRRKNRICYLQEIFSNEMAKVDDSFFHRLEESFLVEEDKKHERHPIFGNIVDEVAYHEKYPTIYHLRKKLVDSTDKADLRLIYLALAHMIKFRGHFLIEGDLNPDNSDVDKLFIQLVQTYNQLFEENPINASGVDAKAILSARLSKSRRLENLIAQLPGEKKNGLFGNLIALSLGLTPNFKSNFDLAEDAKLQLSKDTYDDDLDNLLAQIGDQYADLFLAAKNLSDAILLSDILRVNTEITKAPLSASMIKRYDEHHQDLTLLKALVRQQLPEKYKEIFFDQSKNGYAGYIDGGASQEEFYKFIKPILEKMDGTEELLVKLNREDLLRKQRTFDNGSIPHQIHLGELHAILRRQEDFYPFLKDNREKIEKILTFRIPYYVGPLARGNSRFAWMTRKSEETITPWNFEEVVDKGASAQSFIERMTNFDKNLPNEKVLPKHSLLYEYFTVYNELTKVKYVTEGMRKPAFLSGEQKKAIVDLLFKTNRKVTVKQLKEDYFKKIECFDSVEISGVEDRFNASLGTYHDLLKIIKDKDFLDNEENEDILEDIVLTLTLFEDREMIEERLKTYAHLFDDKVMKQLKRRRYTGWGRLSRKLINGIRDKQSGKTILDFLKSDGFANRNFMQLIHDDSLTFKEDIQKAQVSGQGDSLHEHIANLAGSPAIKKGILQTVKVVDELVKVMGRHKPENIVIEMARENQTTQKGQKNSRERMKRIEEGIKELGSQILKEHPVENTQLQNEKLYLYYLQNGRDMYVDQELDINRLSDYDVDHIVPQSFLKDDSIDNKVLTRSDKARGKSDNVPSEEVVKKMKNYWRQLLNAKLITQRKFDNLTKAERGGLSELDKAGFIKRQLVETRQITKHVAQILDSRMNTKYDENDKLIREVKVITLKSKLVSDFRKDFQFYKVREINNYHHAHDAYLNAVVGTALIKKYPKLESEFVYGDYKVYDVRKMIAKSEQEIGKATAKYFFYSNIMNFFKTEITLANGEIRKRPLIETNGETGEIVWDKGRDFATVRKVLSMPQVNIVKKTEVQTGGFSKESILPKRNSDKLIARKKDWDPKKYGGFDSPTVAYSVLVVAKVEKGKSKKLKSVKELLGITIMERSSFEKNPIDFLEAKGYKEVKKDLIIKLPKYSLFELENGRKRMLASAGELQKGNELALPSKYVNFLYLASHYEKLKGSPEDNEQKQLFVEQHKHYLDEIIEQISEFSKRVILADANLDKVLSAYNKHRDKPIREQAENIIHLFTLTNLGAPAAFKYFDTTIDRKRYTSTKEVLDATLIHQSITGLYETRIDLSQLGGDGGGGSPAPEAAAKGGTLNLEDEYRLYETSAEPEVSPGSTWLSDFPQAWAETGGMGLAVRQAPLIIPLKATSTPVSIKQYPMSQEAKLGIKPHIQRLLDQGILVPCQSPWNTPLLPVKKPGTNDYRPVQDLREVNKRVEDIHPTVPNPYNLLSGLPPSHRWYTVLDLKDAFFCLRLHPTSQPLFAFEWRDPGMGISGQLTWTRLPQGFKNSPTLFNEALHRDLADFRIQHPDLILLQYVDDILLAATSELDCQQGTRALLLTLGNLGYRASAKKAQLCQKQVKYLGYLLKEGQRWLTEARKETVMGQPTPKTPRQLREFLGKAGFCRLFIPGFAEMAAPLYPLTKPGTLFNWGPDQQKAYQEIKQALLTAPALGLPDLTKPFELFVDEKQGYAKGVLTQKLGPWRRPVAYLSKKLDPVAAGWPPCLRMVAAIAVLRKDAGKLTMGQPLVILAPHAVEALVKQPPDRWLSNARMTHYQAMLLDTDRVQFGPVVALNPATLLPLPEEGAPHDCLEILAETHGTRPDLTDQPIPDADHTWYTDGSSFLQEGQRKAGAAVTTETEVIWARALPAGTSAQRAELIALTQALKMAEGKRLNVYTDSRYAFATAHIHGEIYRRRGWLTSEGREIKNKSEILALLKALFLPKRLSIIHCLGHQKGDSAEARGNRLADQAAREAAIKTPPDTSTLLAGKRTADGSEFEKRTADGSEFESPKKKAKVE

SEQ ID NO: 1909 - protein, 2094 aa, synthetic construct
MPAAKRVKLDGGDKKYSIGLDIGTNSVGWAVITDEYKVPSKKFKVLGNTDRHSIKKNLIGALLFDSGETAEATRLKRTARRRYTRRKNRICYLQEIFSNEMAKVDDSFFHRLEESFLVEEDKKHERHPIFGNIVDEVAYHEKYPTIYHLRKKLVDSTDKADLRLIYLALAHMIKFRGHFLIEGDLNPDNSDVDKLFIQLVQTYNQLFEENPINASGVDAKAILSARLSKSRRLENLIAQLPGEKKNGLFGNLIALSLGLTPNFKSNFDLAEDAKLQLSKDTYDDDLDNLLAQIGDQYADLFLAAKNLSDAILLSDILRVNTEITKAPLSASMIKRYDEHHQDLTLLKALVRQQLPEKYKEIFFDQSKNGYAGYIDGGASQEEFYKFIKPILEKMDGTEELLVKLNREDLLRKQRTFDNGSIPHQIHLGELHAILRRQEDFYPFLKDNREKIEKILTFRIPYYVGPLARGNSRFAWMTRKSEETITPWNFEEVVDKGASAQSFIERMTNFDKNLPNEKVLPKHSLLYEYFTVYNELTKVKYVTEGMRKPAFLSGEQKKAIVDLLFKTNRKVTVKQLKEDYFKKIECFDSVEISGVEDRFNASLGTYHDLLKIIKDKDFLDNEENEDILEDIVLTLTLFEDREMIEERLKTYAHLFDDKVMKQLKRRRYTGWGRLSRKLINGIRDKQSGKTILDFLKSDGFANRNFMQLIHDDSLTFKEDIQKAQVSGQGDSLHEHIANLAGSPAIKKGILQTVKVVDELVKVMGRHKPENIVIEMARENQTTQKGQKNSRERMKRIEEGIKELGSQILKEHPVENTQLQNEKLYLYYLQNGRDMYVDQELDINRLSDYDVDHIVPQSFLKDDSIDNKVLTRSDKARGKSDNVPSEEVVKKMKNYWRQLLNAKLITQRKFDNLTKAERGGLSELDKAGFIKRQLVETRQITKHVAQILDSRMNTKYDENDKLIREVKVITLKSKLVSDFRKDFQFYKVREINNYHHAHDAYLNAVVGTALIKKYPKLESEFVYGDYKVYDVRKMIAKSEQEIGKATAKYFFYSNIMNFFKTEITLANGEIRKRPLIETNGETGEIVWDKGRDFATVRKVLSMPQVNIVKKTEVQTGGFSKESILPKRNSDKLIARKKDWDPKKYGGFDSPTVAYSVLVVAKVEKGKSKKLKSVKELLGITIMERSSFEKNPIDFLEAKGYKEVKKDLIIKLPKYSLFELENGRKRMLASAGELQKGNELALPSKYVNFLYLASHYEKLKGSPEDNEQKQLFVEQHKHYLDEIIEQISEFSKRVILADANLDKVLSAYNKHRDKPIREQAENIIHLFTLTNLGAPAAFKYFDTTIDRKRYTSTKEVLDATLIHQSITGLYETRIDLSQLGGDGGGSSGGGGGSGGTLNLEDEYRLYETSAEPEVSPGSTWLSDFPQAWAETGGMGLAVRQAPLIIPLKATSTPVSIKQYPMSQEAKLGIKPHIQRLLDQGILVPCQSPWNTPLLPVKKPGTNDYRPVQDLREVNKRVEDIHPTVPNPYNLLSGLPPSHRWYTVLDLKDAFFCLRLHPTSQPLFAFEWRDPGMGISGQLTWTRLPQGFKNSPTLFNEALHRDLADFRIQHPDLILLQYVDDILLAATSELDCQQGTRALLLTLGNLGYRASAKKAQLCQKQVKYLGYLLKEGQRWLTEARKETVMGQPTPKTPRQLREFLGKAGFCRLFIPGFAEMAAPLYPLTKPGTLFNWGPDQQKAYQEIKQALLTAPALGLPDLTKPFELFVDEKQGYAKGVLTQKLGPWRRPVAYLSKKLDPVAAGWPPCLRMVAAIAVLRKDAGKLTMGQPLVILAPHAVEALVKQPPDRWLSNARMTHYQAMLLDTDRVQFGPVVALNPATLLPLPEEGAPHDCLEILAETHGTRPDLTDQPIPDADHTWYTDGSSFLQEGQRKAGAAVTTETEVIWARALPAGTSAQRAELIALTQALKMAEGKRLNVYTDSRYAFATAHIHGEIYRRRGWLTSEGREIKNKSEILALLKALFLPKRLSIIHCLGHQKGDSAEARGNRLADQAAREAAIKTPPDTSTLLAGKRTADGSEFEKRTADGSEFESPKKKAKVE

SEQ ID NO: 1910 - protein, 2096 aa, synthetic construct
MPAAKRVKLDGGDKKYSIGLDIGTNSVGWAVITDEYKVPSKKFKVLGNTDRHSIKKNLIGALLFDSGETAEATRLKRTARRRYTRRKNRICYLQEIFSNEMAKVDDSFFHRLEESFLVEEDKKHERHPIFGNIVDEVAYHEKYPTIYHLRKKLVDSTDKADLRLIYLALAHMIKFRGHFLIEGDLNPDNSDVDKLFIQLVQTYNQLFEENPINASGVDAKAILSARLSKSRRLENLIAQLPGEKKNGLFGNLIALSLGLTPNFKSNFDLAEDAKLQLSKDTYDDDLDNLLAQIGDQYADLFLAAKNLSDAILLSDILRVNTEITKAPLSASMIKRYDEHHQDLTLLKALVRQQLPEKYKEIFFDQSKNGYAGYIDGGASQEEFYKFIKPILEKMDGTEELLVKLNREDLLRKQRTFDNGSIPHQIHLGELHAILRRQEDFYPFLKDNREKIEKILTFRIPYYVGPLARGNSRFAWMTRKSEETITPWNFEEVVDKGASAQSFIERMTNFDKNLPNEKVLPKHSLLYEYFTVYNELTKVKYVTEGMRKPAFLSGEQKKAIVDLLFKTNRKVTVKQLKEDYFKKIECFDSVEISGVEDRFNASLGTYHDLLKIIKDKDFLDNEENEDILEDIVLTLTLFEDREMIEERLKTYAHLFDDKVMKQLKRRRYTGWGRLSRKLINGIRDKQSGKTILDFLKSDGFANRNFMQLIHDDSLTFKEDIQKAQVSGQGDSLHEHIANLAGSPAIKKGILQTVKVVDELVKVMGRHKPENIVIEMARENQTTQKGQKNSRERMKRIEEGIKELGSQILKEHPVENTQLQNEKLYLYYLQNGRDMYVDQELDINRLSDYDVDHIVPQSFLKDDSIDNKVLTRSDKARGKSDNVPSEEVVKKMKNYWRQLLNAKLITQRKFDNLTKAERGGLSELDKAGFIKRQLVETRQITKHVAQILDSRMNTKYDENDKLIREVKVITLKSKLVSDFRKDFQFYKVREINNYHHAHDAYLNAVVGTALIKKYPKLESEFVYGDYKVYDVRKMIAKSEQEIGKATAKYFFYSNIMNFFKTEITLANGEIRKRPLIETNGETGEIVWDKGRDFATVRKVLSMPQVNIVKKTEVQTGGFSKESILPKRNSDKLIARKKDWDPKKYGGFDSPTVAYSVLVVAKVEKGKSKKLKSVKELLGITIMERSSFEKNPIDFLEAKGYKEVKKDLIIKLPKYSLFELENGRKRMLASAGELQKGNELALPSKYVNFLYLASHYEKLKGSPEDNEQKQLFVEQHKHYLDEIIEQISEFSKRVILADANLDKVLSAYNKHRDKPIREQAENIIHLFTLTNLGAPAAFKYFDTTIDRKRYTSTKEVLDATLIHQSITGLYETRIDLSQLGGDGGGSSEAAAKGGSGGTLNLEDEYRLYETSAEPEVSPGSTWLSDFPQAWAETGGMGLAVRQAPLIIPLKATSTPVSIKQYPMSQEAKLGIKPHIQRLLDQGILVPCQSPWNTPLLPVKKPGTNDYRPVQDLREVNKRVEDIHPTVPNPYNLLSGLPPSHRWYTVLDLKDAFFCLRLHPTSQPLFAFEWRDPGMGISGQLTWTRLPQGFKNSPTLFNEALHRDLADFRIQHPDLILLQYVDDILLAATSELDCQQGTRALLLTLGNLGYRASAKKAQLCQKQVKYLGYLLKEGQRWLTEARKETVMGQPTPKTPRQLREFLGKAGFCRLFIPGFAEMAAPLYPLTKPGTLFNWGPDQQKAYQEIKQALLTAPALGLPDLTKPFELFVDEKQGYAKGVLTQKLGPWRRPVAYLSKKLDPVAAGWPPCLRMVAAIAVLRKDAGKLTMGQPLVILAPHAVEALVKQPPDRWLSNARMTHYQAMLLDTDRVQFGPVVALNPATLLPLPEEGAPHDCLEILAETHGTRPDLTDQPIPDADHTWYTDGSSFLQEGQRKAGAAVTTETEVIWARALPAGTSAQRAELIALTQALKMAEGKRLNVYTDSRYAFATAHIHGEIYRRRGWLTSEGREIKNKSEILALLKALFLPKRLSIIHCLGHQKGDSAEARGNRLADQAAREAAIKTPPDTSTLLAGKRTADGSEFEKRTADGSEFESPKKKAKVE

SEQ ID NO: 1911 - protein, 2091 aa, synthetic construct
MPAAKRVKLDGGDKKYSIGLDIGTNSVGWAVITDEYKVPSKKFKVLGNTDRHSIKKNLIGALLFDSGETAEATRLKRTARRRYTRRKNRICYLQEIFSNEMAKVDDSFFHRLEESFLVEEDKKHERHPIFGNIVDEVAYHEKYPTIYHLRKKLVDSTDKADLRLIYLALAHMIKFRGHFLIEGDLNPDNSDVDKLFIQLVQTYNQLFEENPINASGVDAKAILSARLSKSRRLENLIAQLPGEKKNGLFGNLIALSLGLTPNFKSNFDLAEDAKLQLSKDTYDDDLDNLLAQIGDQYADLFLAAKNLSDAILLSDILRVNTEITKAPLSASMIKRYDEHHQDLTLLKALVRQQLPEKYKEIFFDQSKNGYAGYIDGGASQEEFYKFIKPILEKMDGTEELLVKLNREDLLRKQRTFDNGSIPHQIHLGELHAILRRQEDFYPFLKDNREKIEKILTFRIPYYVGPLARGNSRFAWMTRKSEETITPWNFEEVVDKGASAQSFIERMTNFDKNLPNEKVLPKHSLLYEYFTVYNELTKVKYVTEGMRKPAFLSGEQKKAIVDLLFKTNRKVTVKQLKEDYFKKIECFDSVEISGVEDRFNASLGTYHDLLKIIKDKDFLDNEENEDILEDIVLTLTLFEDREMIEERLKTYAHLFDDKVMKQLKRRRYTGWGRLSRKLINGIRDKQSGKTILDFLKSDGFANRNFMQLIHDDSLTFKEDIQKAQVSGQGDSLHEHIANLAGSPAIKKGILQTVKVVDELVKVMGRHKPENIVIEMARENQTTQKGQKNSRERMKRIEEGIKELGSQILKEHPVENTQLQNEKLYLYYLQNGRDMYVDQELDINRLSDYDVDHIVPQSFLKDDSIDNKVLTRSDKARGKSDNVPSEEVVKKMKNYWRQLLNAKLITQRKFDNLTKAERGGLSELDKAGFIKRQLVETRQITKHVAQILDSRMNTKYDENDKLIREVKVITLKSKLVSDFRKDFQFYKVREINNYHHAHDAYLNAVVGTALIKKYPKLESEFVYGDYKVYDVRKMIAKSEQEIGKATAKYFFYSNIMNFFKTEITLANGEIRKRPLIETNGETGEIVWDKGRDFATVRKVLSMPQVNIVKKTEVQTGGFSKESILPKRNSDKLIARKKDWDPKKYGGFDSPTVAYSVLVVAKVEKGKSKKLKSVKELLGITIMERSSFEKNPIDFLEAKGYKEVKKDLIIKLPKYSLFELENGRKRMLASAGELQKGNELALPSKYVNFLYLASHYEKLKGSPEDNEQKQLFVEQHKHYLDEIIEQISEFSKRVILADANLDKVLSAYNKHRDKPIREQAENIIHLFTLTNLGAPAAFKYFDTTIDRKRYTSTKEVLDATLIHQSITGLYETRIDLSQLGGDGGGGSGSSGGTLNLEDEYRLYETSAEPEVSPGSTWLSDFPQAWAETGGMGLAVRQAPLIIPLKATSTPVSIKQYPMSQEAKLGIKPHIQRLLDQGILVPCQSPWNTPLLPVKKPGTNDYRPVQDLREVNKRVEDIHPTVPNPYNLLSGLPPSHRWYTVLDLKDAFFCLRLHPTSQPLFAFEWRDPGMGISGQLTWTRLPQGFKNSPTLFNEALHRDLADFRIQHPDLILLQYVDDILLAATSELDCQQGTRALLLTLGNLGYRASAKKAQLCQKQVKYLGYLLKEGQRWLTEARKETVMGQPTPKTPRQLREFLGKAGFCRLFIPGFAEMAAPLYPLTKPGTLFNWGPDQQKAYQEIKQALLTAPALGLPDLTKPFELFVDEKQGYAKGVLTQKLGPWRRPVAYLSKKLDPVAAGWPPCLRMVAAIAVLRKDAGKLTMGQPLVILAPHAVEALVKQPPDRWLSNARMTHYQAMLLDTDRVQFGPVVALNPATLLPLPEEGAPHDCLEILAETHGTRPDLTDQPIPDADHTWYTDGSSFLQEGQRKAGAAVTTETEVIWARALPAGTSAQRAELIALTQALKMAEGKRLNVYTDSRYAFATAHIHGEIYRRRGWLTSEGREIKNKSEILALLKALFLPKRLSIIHCLGHQKGDSAEARGNRLADQAAREAAIKTPPDTSTLLAGKRTADGSEFEKRTADGSEFESPKKKAKVE

SEQ ID NO: 1912 - protein, 2096 aa, synthetic construct
MPAAKRVKLDGGDKKYSIGLDIGTNSVGWAVITDEYKVPSKKFKVLGNTDRHSIKKNLIGALLFDSGETAEATRLKRTARRRYTRRKNRICYLQEIFSNEMAKVDDSFFHRLEESFLVEEDKKHERHPIFGNIVDEVAYHEKYPTIYHLRKKLVDSTDKADLRLIYLALAHMIKFRGHFLIEGDLNPDNSDVDKLFIQLVQTYNQLFEENPINASGVDAKAILSARLSKSRRLENLIAQLPGEKKNGLFGNLIALSLGLTPNFKSNFDLAEDAKLQLSKDTYDDDLDNLLAQIGDQYADLFLAAKNLSDAILLSDILRVNTEITKAPLSASMIKRYDEHHQDLTLLKALVRQQLPEKYKEIFFDQSKNGYAGYIDGGASQEEFYKFIKPILEKMDGTEELLVKLNREDLLRKQRTFDNGSIPHQIHLGELHAILRRQEDFYPFLKDNREKIEKILTFRIPYYVGPLARGNSRFAWMTRKSEETITPWNFEEVVDKGASAQSFIERMTNFDKNLPNEKVLPKHSLLYEYFTVYNELTKVKYVTEGMRKPAFLSGEQKKAIVDLLFKTNRKVTVKQLKEDYFKKIECFDSVEISGVEDRFNASLGTYHDLLKIIKDKDFLDNEENEDILEDIVLTLTLFEDREMIEERLKTYAHLFDDKVMKQLKRRRYTGWGRLSRKLINGIRDKQSGKTILDFLKSDGFANRNFMQLIHDDSLTFKEDIQKAQVSGQGDSLHEHIANLAGSPAIKKGILQTVKVVDELVKVMGRHKPENIVIEMARENQTTQKGQKNSRERMKRIEEGIKELGSQILKEHPVENTQLQNEKLYLYYLQNGRDMYVDQELDINRLSDYDVDHIVPQSFLKDDSIDNKVLTRSDKARGKSDNVPSEEVVKKMKNYWRQLLNAKLITQRKFDNLTKAERGGLSELDKAGFIKRQLVETRQITKHVAQILDSRMNTKYDENDKLIREVKVITLKSKLVSDFRKDFQFYKVREINNYHHAHDAYLNAVVGTALIKKYPKLESEFVYGDYKVYDVRKMIAKSEQEIGKATAKYFFYSNIMNFFKTEITLANGEIRKRPLIETNGETGEIVWDKGRDFATVRKVLSMPQVNIVKKTEVQTGGFSKESILPKRNSDKLIARKKDWDPKKYGGFDSPTVAYSVLVVAKVEKGKSKKLKSVKELLGITIMERSSFEKNPIDFLEAKGYKEVKKDLIIKLPKYSLFELENGRKRMLASAGELQKGNELALPSKYVNFLYLASHYEKLKGSPEDNEQKQLFVEQHKHYLDEIIEQISEFSKRVILADANLDKVLSAYNKHRDKPIREQAENIIHLFTLTNLGAPAAFKYFDTTIDRKRYTSTKEVLDATLIHQSITGLYETRIDLSQLGGDGGPAPGSSEAAAKGGTLNLEDEYRLYETSAEPEVSPGSTWLSDFPQAWAETGGMGLAVRQAPLIIPLKATSTPVSIKQYPMSQEAKLGIKPHIQRLLDQGILVPCQSPWNTPLLPVKKPGTNDYRPVQDLREVNKRVEDIHPTVPNPYNLLSGLPPSHRWYTVLDLKDAFFCLRLHPTSQPLFAFEWRDPGMGISGQLTWTRLPQGFKNSPTLFNEALHRDLADFRIQHPDLILLQYVDDILLAATSELDCQQGTRALLLTLGNLGYRASAKKAQLCQKQVKYLGYLLKEGQRWLTEARKETVMGQPTPKTPRQLREFLGKAGFCRLFIPGFAEMAAPLYPLTKPGTLFNWGPDQQKAYQEIKQALLTAPALGLPDLTKPFELFVDEKQGYAKGVLTQKLGPWRRPVAYLSKKLDPVAAGWPPCLRMVAAIAVLRKDAGKLTMGQPLVILAPHAVEALVKQPPDRWLSNARMTHYQAMLLDTDRVQFGPVVALNPATLLPLPEEGAPHDCLEILAETHGTRPDLTDQPIPDADHTWYTDGSSFLQEGQRKAGAAVTTETEVIWARALPAGTSAQRAELIALTQALKMAEGKRLNVYTDSRYAFATAHIHGEIYRRRGWLTSEGREIKNKSEILALLKALFLPKRLSIIHCLGHQKGDSAEARGNRLADQAAREAAIKTPPDTSTLLAGKRTADGSEFEKRTADGSEFESPKKKAKVE

SEQ ID NO: 1913 - protein, 2096 aa, synthetic construct
MPAAKRVKLDGGDKKYSIGLDIGTNSVGWAVITDEYKVPSKKFKVLGNTDRHSIKKNLIGALLFDSGETAEATRLKRTARRRYTRRKNRICYLQEIFSNEMAKVDDSFFHRLEESFLVEEDKKHERHPIFGNIVDEVAYHEKYPTIYHLRKKLVDSTDKADLRLIYLALAHMIKFRGHFLIEGDLNPDNSDVDKLFIQLVQTYNQLFEENPINASGVDAKAILSARLSKSRRLENLIAQLPGEKKNGLFGNLIALSLGLTPNFKSNFDLAEDAKLQLSKDTYDDDLDNLLAQIGDQYADLFLAAKNLSDAILLSDILRVNTEITKAPLSASMIKRYDEHHQDLTLLKALVRQQLPEKYKEIFFDQSKNGYAGYIDGGASQEEFYKFIKPILEKMDGTEELLVKLNREDLLRKQRTFDNGSIPHQIHLGELHAILRRQEDFYPFLKDNREKIEKILTFRIPYYVGPLARGNSRFAWMTRKSEETITPWNFEEVVDKGASAQSFIERMTNFDKNLPNEKVLPKHSLLYEYFTVYNELTKVKYVTEGMRKPAFLSGEQKKAIVDLLFKTNRKVTVKQLKEDYFKKIECFDSVEISGVEDRFNASLGTYHDLLKIIKDKDFLDNEENEDILEDIVLTLTLFEDREMIEERLKTYAHLFDDKVMKQLKRRRYTGWGRLSRKLINGIRDKQSGKTILDFLKSDGFANRNFMQLIHDDSLTFKEDIQKAQVSGQGDSLHEHIANLAGSPAIKKGILQTVKVVDELVKVMGRHKPENIVIEMARENQTTQKGQKNSRERMKRIEEGIKELGSQILKEHPVENTQLQNEKLYLYYLQNGRDMYVDQELDINRLSDYDVDHIVPQSFLKDDSIDNKVLTRSDKARGKSDNVPSEEVVKKMKNYWRQLLNAKLITQRKFDNLTKAERGGLSELDKAGFIKRQLVETRQITKHVAQILDSRMNTKYDENDKLIREVKVITLKSKLVSDFRKDFQFYKVREINNYHHAHDAYLNAVVGTALIKKYPKLESEFVYGDYKVYDVRKMIAKSEQEIGKATAKYFFYSNIMNFFKTEITLANGEIRKRPLIETNGETGEIVWDKGRDFATVRKVLSMPQVNIVKKTEVQTGGFSKESILPKRNSDKLIARKKDWDPKKYGGFDSPTVAYSVLVVAKVEKGKSKKLKSVKELLGITIMERSSFEKNPIDFLEAKGYKEVKKDLIIKLPKYSLFELENGRKRMLASAGELQKGNELALPSKYVNFLYLASHYEKLKGSPEDNEQKQLFVEQHKHYLDEIIEQISEFSKRVILADANLDKVLSAYNKHRDKPIREQAENIIHLFTLTNLGAPAAFKYFDTTIDRKRYTSTKEVLDATLIHQSITGLYETRIDLSQLGGDGGEAAAKGSSGGSGGTLNLEDEYRLYETSAEPEVSPGSTWLSDFPQAWAETGGMGLAVRQAPLIIPLKATSTPVSIKQYPMSQEAKLGIKPHIQRLLDQGILVPCQSPWNTPLLPVKKPGTNDYRPVQDLREVNKRVEDIHPTVPNPYNLLSGLPPSHRWYTVLDLKDAFFCLRLHPTSQPLFAFEWRDPGMGISGQLTWTRLPQGFKNSPTLFNEALHRDLADFRIQHPDLILLQYVDDILLAATSELDCQQGTRALLLTLGNLGYRASAKKAQLCQKQVKYLGYLLKEGQRWLTEARKETVMGQPTPKTPRQLREFLGKAGFCRLFIPGFAEMAAPLYPLTKPGTLFNWGPDQQKAYQEIKQALLTAPALGLPDLTKPFELFVDEKQGYAKGVLTQKLGPWRRPVAYLSKKLDPVAAGWPPCLRMVAAIAVLRKDAGKLTMGQPLVILAPHAVEALVKQPPDRWLSNARMTHYQAMLLDTDRVQFGPVVALNPATLLPLPEEGAPHDCLEILAETHGTRPDLTDQPIPDADHTWYTDGSSFLQEGQRKAGAAVTTETEVIWARALPAGTSAQRAELIALTQALKMAEGKRLNVYTDSRYAFATAHIHGEIYRRRGWLTSEGREIKNKSEILALLKALFLPKRLSIIHCLGHQKGDSAEARGNRLADQAAREAAIKTPPDTSTLLAGKRTADGSEFEKRTADGSEFESPKKKAKVE

SEQ ID NO: 1914 - protein, 2091 aa, synthetic construct
MPAAKRVKLDGGDKKYSIGLDIGTNSVGWAVITDEYKVPSKKFKVLGNTDRHSIKKNLIGALLFDSGETAEATRLKRTARRRYTRRKNRICYLQEIFSNEMAKVDDSFFHRLEESFLVEEDKKHERHPIFGNIVDEVAYHEKYPTIYHLRKKLVDSTDKADLRLIYLALAHMIKFRGHFLIEGDLNPDNSDVDKLFIQLVQTYNQLFEENPINASGVDAKAILSARLSKSRRLENLIAQLPGEKKNGLFGNLIALSLGLTPNFKSNFDLAEDAKLQLSKDTYDDDLDNLLAQIGDQYADLFLAAKNLSDAILLSDILRVNTEITKAPLSASMIKRYDEHHQDLTLLKALVRQQLPEKYKEIFFDQSKNGYAGYIDGGASQEEFYKFIKPILEKMDGTEELLVKLNREDLLRKQRTFDNGSIPHQIHLGELHAILRRQEDFYPFLKDNREKIEKILTFRIPYYVGPLARGNSRFAWMTRKSEETITPWNFEEVVDKGASAQSFIERMTNFDKNLPNEKVLPKHSLLYEYFTVYNELTKVKYVTEGMRKPAFLSGEQKKAIVDLLFKTNRKVTVKQLKEDYFKKIECFDSVEISGVEDRFNASLGTYHDLLKIIKDKDFLDNEENEDILEDIVLTLTLFEDREMIEERLKTYAHLFDDKVMKQLKRRRYTGWGRLSRKLINGIRDKQSGKTILDFLKSDGFANRNFMQLIHDDSLTFKEDIQKAQVSGQGDSLHEHIANLAGSPAIKKGILQTVKVVDELVKVMGRHKPENIVIEMARENQTTQKGQKNSRERMKRIEEGIKELGSQILKEHPVENTQLQNEKLYLYYLQNGRDMYVDQELDINRLSDYDVDHIVPQSFLKDDSIDNKVLTRSDKARGKSDNVPSEEVVKKMKNYWRQLLNAKLITQRKFDNLTKAERGGLSELDKAGFIKRQLVETRQITKHVAQILDSRMNTKYDENDKLIREVKVITLKSKLVSDFRKDFQFYKVREINNYHHAHDAYLNAVVGTALIKKYPKLESEFVYGDYKVYDVRKMIAKSEQEIGKATAKYFFYSNIMNFFKTEITLANGEIRKRPLIETNGETGEIVWDKGRDFATVRKVLSMPQVNIVKKTEVQTGGFSKESILPKRNSDKLIARKKDWDPKKYGGFDSPTVAYSVLVVAKVEKGKSKKLKSVKELLGITIMERSSFEKNPIDFLEAKGYKEVKKDLIIKLPKYSLFELENGRKRMLASAGELQKGNELALPSKYVNFLYLASHYEKLKGSPEDNEQKQLFVEQHKHYLDEIIEQISEFSKRVILADANLDKVLSAYNKHRDKPIREQAENIIHLFTLTNLGAPAAFKYFDTTIDRKRYTSTKEVLDATLIHQSITGLYETRIDLSQLGGDGGGGSPAPGGTLNLEDEYRLYETSAEPEVSPGSTWLSDFPQAWAETGGMGLAVRQAPLIIPLKATSTPVSIKQYPMSQEAKLGIKPHIQRLLDQGILVPCQSPWNTPLLPVKKPGTNDYRPVQDLREVNKRVEDIHPTVPNPYNLLSGLPPSHRWYTVLDLKDAFFCLRLHPTSQPLFAFEWRDPGMGISGQLTWTRLPQGFKNSPTLFNEALHRDLADFRIQHPDLILLQYVDDILLAATSELDCQQGTRALLLTLGNLGYRASAKKAQLCQKQVKYLGYLLKEGQRWLTEARKETVMGQPTPKTPRQLREFLGKAGFCRLFIPGFAEMAAPLYPLTKPGTLFNWGPDQQKAYQEIKQALLTAPALGLPDLTKPFELFVDEKQGYAKGVLTQKLGPWRRPVAYLSKKLDPVAAGWPPCLRMVAAIAVLRKDAGKLTMGQPLVILAPHAVEALVKQPPDRWLSNARMTHYQAMLLDTDRVQFGPVVALNPATLLPLPEEGAPHDCLEILAETHGTRPDLTDQPIPDADHTWYTDGSSFLQEGQRKAGAAVTTETEVIWARALPAGTSAQRAELIALTQALKMAEGKRLNVYTDSRYAFATAHIHGEIYRRRGWLTSEGREIKNKSEILALLKALFLPKRLSIIHCLGHQKGDSAEARGNRLADQAAREAAIKTPPDTSTLLAGKRTADGSEFEKRTADGSEFESPKKKAKVE

SEQ ID NO: 1915 - protein, 2096 aa, synthetic construct
MPAAKRVKLDGGDKKYSIGLDIGTNSVGWAVITDEYKVPSKKFKVLGNTDRHSIKKNLIGALLFDSGETAEATRLKRTARRRYTRRKNRICYLQEIFSNEMAKVDDSFFHRLEESFLVEEDKKHERHPIFGNIVDEVAYHEKYPTIYHLRKKLVDSTDKADLRLIYLALAHMIKFRGHFLIEGDLNPDNSDVDKLFIQLVQTYNQLFEENPINASGVDAKAILSARLSKSRRLENLIAQLPGEKKNGLFGNLIALSLGLTPNFKSNFDLAEDAKLQLSKDTYDDDLDNLLAQIGDQYADLFLAAKNLSDAILLSDILRVNTEITKAPLSASMIKRYDEHHQDLTLLKALVRQQLPEKYKEIFFDQSKNGYAGYIDGGASQEEFYKFIKPILEKMDGTEELLVKLNREDLLRKQRTFDNGSIPHQIHLGELHAILRRQEDFYPFLKDNREKIEKILTFRIPYYVGPLARGNSRFAWMTRKSEETITPWNFEEVVDKGASAQSFIERMTNFDKNLPNEKVLPKHSLLYEYFTVYNELTKVKYVTEGMRKPAFLSGEQKKAIVDLLFKTNRKVTVKQLKEDYFKKIECFDSVEISGVEDRFNASLGTYHDLLKIIKDKDFLDNEENEDILEDIVLTLTLFEDREMIEERLKTYAHLFDDKVMKQLKRRRYTGWGRLSRKLINGIRDKQSGKTILDFLKSDGFANRNFMQLIHDDSLTFKEDIQKAQVSGQGDSLHEHIANLAGSPAIKKGILQTVKVVDELVKVMGRHKPENIVIEMARENQTTQKGQKNSRERMKRIEEGIKELGSQILKEHPVENTQLQNEKLYLYYLQNGRDMYVDQELDINRLSDYDVDHIVPQSFLKDDSIDNKVLTRSDKARGKSDNVPSEEVVKKMKNYWRQLLNAKLITQRKFDNLTKAERGGLSELDKAGFIKRQLVETRQITKHVAQILDSRMNTKYDENDKLIREVKVITLKSKLVSDFRKDFQFYKVREINNYHHAHDAYLNAVVGTALIKKYPKLESEFVYGDYKVYDVRKMIAKSEQEIGKATAKYFFYSNIMNFFKTEITLANGEIRKRPLIETNGETGEIVWDKGRDFATVRKVLSMPQVNIVKKTEVQTGGFSKESILPKRNSDKLIARKKDWDPKKYGGFDSPTVAYSVLVVAKVEKGKSKKLKSVKELLGITIMERSSFEKNPIDFLEAKGYKEVKKDLIIKLPKYSLFELENGRKRMLASAGELQKGNELALPSKYVNFLYLASHYEKLKGSPEDNEQKQLFVEQHKHYLDEIIEQISEFSKRVILADANLDKVLSAYNKHRDKPIREQAENIIHLFTLTNLGAPAAFKYFDTTIDRKRYTSTKEVLDATLIHQSITGLYETRIDLSQLGGDGGGGSEAAAKGGGGGTLNLEDEYRLYETSAEPEVSPGSTWLSDFPQAWAETGGMGLAVRQAPLIIPLKATSTPVSIKQYPMSQEAKLGIKPHIQRLLDQGILVPCQSPWNTPLLPVKKPGTNDYRPVQDLREVNKRVEDIHPTVPNPYNLLSGLPPSHRWYTVLDLKDAFFCLRLHPTSQPLFAFEWRDPGMGISGQLTWTRLPQGFKNSPTLFNEALHRDLADFRIQHPDLILLQYVDDILLAATSELDCQQGTRALLLTLGNLGYRASAKKAQLCQKQVKYLGYLLKEGQRWLTEARKETVMGQPTPKTPRQLREFLGKAGFCRLFIPGFAEMAAPLYPLTKPGTLFNWGPDQQKAYQEIKQALLTAPALGLPDLTKPFELFVDEKQGYAKGVLTQKLGPWRRPVAYLSKKLDPVAAGWPPCLRMVAAIAVLRKDAGKLTMGQPLVILAPHAVEALVKQPPDRWLSNARMTHYQAMLLDTDRVQFGPVVALNPATLLPLPEEGAPHDCLEILAETHGTRPDLTDQPIPDADHTWYTDGSSFLQEGQRKAGAAVTTETEVIWARALPAGTSAQRAELIALTQALKMAEGKRLNVYTDSRYAFATAHIHGEIYRRRGWLTSEGREIKNKSEILALLKALFLPKRLSIIHCLGHQKGDSAEARGNRLADQAAREAAIKTPPDTSTLLAGKRTADGSEFEKRTADGSEFESPKKKAKVE

SEQ ID NO: 1916 - protein, 2097 aa, synthetic construct
MPAAKRVKLDGGDKKYSIGLDIGTNSVGWAVITDEYKVPSKKFKVLGNTDRHSIKKNLIGALLFDSGETAEATRLKRTARRRYTRRKNRICYLQEIFSNEMAKVDDSFFHRLEESFLVEEDKKHERHPIFGNIVDEVAYHEKYPTIYHLRKKLVDSTDKADLRLIYLALAHMIKFRGHFLIEGDLNPDNSDVDKLFIQLVQTYNQLFEENPINASGVDAKAILSARLSKSRRLENLIAQLPGEKKNGLFGNLIALSLGLTPNFKSNFDLAEDAKLQLSKDTYDDDLDNLLAQIGDQYADLFLAAKNLSDAILLSDILRVNTEITKAPLSASMIKRYDEHHQDLTLLKALVRQQLPEKYKEIFFDQSKNGYAGYIDGGASQEEFYKFIKPILEKMDGTEELLVKLNREDLLRKQRTFDNGSIPHQIHLGELHAILRRQEDFYPFLKDNREKIEKILTFRIPYYVGPLARGNSRFAWMTRKSEETITPWNFEEVVDKGASAQSFIERMTNFDKNLPNEKVLPKHSLLYEYFTVYNELTKVKYVTEGMRKPAFLSGEQKKAIVDLLFKTNRKVTVKQLKEDYFKKIECFDSVEISGVEDRFNASLGTYHDLLKIIKDKDFLDNEENEDILEDIVLTLTLFEDREMIEERLKTYAHLFDDKVMKQLKRRRYTGWGRLSRKLINGIRDKQSGKTILDFLKSDGFANRNFMQLIHDDSLTFKEDIQKAQVSGQGDSLHEHIANLAGSPAIKKGILQTVKVVDELVKVMGRHKPENIVIEMARENQTTQKGQKNSRERMKRIEEGIKELGSQILKEHPVENTQLQNEKLYLYYLQNGRDMYVDQELDINRLSDYDVDHIVPQSFLKDDSIDNKVLTRSDKARGKSDNVPSEEVVKKMKNYWRQLLNAKLITQRKFDNLTKAERGGLSELDKAGFIKRQLVETRQITKHVAQILDSRMNTKYDENDKLIREVKVITLKSKLVSDFRKDFQFYKVREINNYHHAHDAYLNAVVGTALIKKYPKLESEFVYGDYKVYDVRKMIAKSEQEIGKATAKYFFYSNIMNFFKTEITLANGEIRKRPLIETNGETGEIVWDKGRDFATVRKVLSMPQVNIVKKTEVQTGGFSKESILPKRNSDKLIARKKDWDPKKYGGFDSPTVAYSVLVVAKVEKGKSKKLKSVKELLGITIMERSSFEKNPIDFLEAKGYKEVKKDLIIKLPKYSLFELENGRKRMLASAGELQKGNELALPSKYVNFLYLASHYEKLKGSPEDNEQKQLFVEQHKHYLDEIIEQISEFSKRVILADANLDKVLSAYNKHRDKPIREQAENIIHLFTLTNLGAPAAFKYFDTTIDRKRYTSTKEVLDATLIHQSITGLYETRIDLSQLGGDGGGGSGGSGGSGGSGGTLNLEDEYRLYETSAEPEVSPGSTWLSDFPQAWAETGGMGLAVRQAPLIIPLKATSTPVSIKQYPMSQEAKLGIKPHIQRLLDQGILVPCQSPWNTPLLPVKKPGTNDYRPVQDLREVNKRVEDIHPTVPNPYNLLSGLPPSHRWYTVLDLKDAFFCLRLHPTSQPLFAFEWRDPGMGISGQLTWTRLPQGFKNSPTLFNEALHRDLADFRIQHPDLILLQYVDDILLAATSELDCQQGTRALLLTLGNLGYRASAKKAQLCQKQVKYLGYLLKEGQRWLTEARKETVMGQPTPKTPRQLREFLGKAGFCRLFIPGFAEMAAPLYPLTKPGTLFNWGPDQQKAYQEIKQALLTAPALGLPDLTKPFELFVDEKQGYAKGVLTQKLGPWRRPVAYLSKKLDPVAAGWPPCLRMVAAIAVLRKDAGKLTMGQPLVILAPHAVEALVKQPPDRWLSNARMTHYQAMLLDTDRVQFGPVVALNPATLLPLPEEGAPHDCLEILAETHGTRPDLTDQPIPDADHTWYTDGSSFLQEGQRKAGAAVTTETEVIWARALPAGTSAQRAELIALTQALKMAEGKRLNVYTDSRYAFATAHIHGEIYRRRGWLTSEGREIKNKSEILALLKALFLPKRLSIIHCLGHQKGDSAEARGNRLADQAAREAAIKTPPDTSTLLAGKRTADGSEFEKRTADGSEFESPKKKAKVE

SEQ ID NO: 1917 - protein, 2090 aa, synthetic construct
MPAAKRVKLDGGDKKYSIGLDIGTNSVGWAVITDEYKVPSKKFKVLGNTDRHSIKKNLIGALLFDSGETAEATRLKRTARRRYTRRKNRICYLQEIFSNEMAKVDDSFFHRLEESFLVEEDKKHERHPIFGNIVDEVAYHEKYPTIYHLRKKLVDSTDKADLRLIYLALAHMIKFRGHFLIEGDLNPDNSDVDKLFIQLVQTYNQLFEENPINASGVDAKAILSARLSKSRRLENLIAQLPGEKKNGLFGNLIALSLGLTPNFKSNFDLAEDAKLQLSKDTYDDDLDNLLAQIGDQYADLFLAAKNLSDAILLSDILRVNTEITKAPLSASMIKRYDEHHQDLTLLKALVRQQLPEKYKEIFFDQSKNGYAGYIDGGASQEEFYKFIKPILEKMDGTEELLVKLNREDLLRKQRTFDNGSIPHQIHLGELHAILRRQEDFYPFLKDNREKIEKILTFRIPYYVGPLARGNSRFAWMTRKSEETITPWNFEEVVDKGASAQSFIERMTNFDKNLPNEKVLPKHSLLYEYFTVYNELTKVKYVTEGMRKPAFLSGEQKKAIVDLLFKTNRKVTVKQLKEDYFKKIECFDSVEISGVEDRFNASLGTYHDLLKIIKDKDFLDNEENEDILEDIVLTLTLFEDREMIEERLKTYAHLFDDKVMKQLKRRRYTGWGRLSRKLINGIRDKQSGKTILDFLKSDGFANRNFMQLIHDDSLTFKEDIQKAQVSGQGDSLHEHIANLAGSPAIKKGILQTVKVVDELVKVMGRHKPENIVIEMARENQTTQKGQKNSRERMKRIEEGIKELGSQILKEHPVENTQLQNEKLYLYYLQNGRDMYVDQELDINRLSDYDVDHIVPQSFLKDDSIDNKVLTRSDKARGKSDNVPSEEVVKKMKNYWRQLLNAKLITQRKFDNLTKAERGGLSELDKAGFIKRQLVETRQITKHVAQILDSRMNTKYDENDKLIREVKVITLKSKLVSDFRKDFQFYKVREINNYHHAHDAYLNAVVGTALIKKYPKLESEFVYGDYKVYDVRKMIAKSEQEIGKATAKYFFYSNIMNFFKTEITLANGEIRKRPLIETNGETGEIVWDKGRDFATVRKVLSMPQVNIVKKTEVQTGGFSKESILPKRNSDKLIARKKDWDPKKYGGFDSPTVAYSVLVVAKVEKGKSKKLKSVKELLGITIMERSSFEKNPIDFLEAKGYKEVKKDLIIKLPKYSLFELENGRKRMLASAGELQKGNELALPSKYVNFLYLASHYEKLKGSPEDNEQKQLFVEQHKHYLDEIIEQISEFSKRVILADANLDKVLSAYNKHRDKPIREQAENIIHLFTLTNLGAPAAFKYFDTTIDRKRYTSTKEVLDATLIHQSITGLYETRIDLSQLGGDGGGGGGGGGTLNLEDEYRLYETSAEPEVSPGSTWLSDFPQAWAETGGMGLAVRQAPLIIPLKATSTPVSIKQYPMSQEAKLGIKPHIQRLLDQGILVPCQSPWNTPLLPVKKPGTNDYRPVQDLREVNKRVEDIHPTVPNPYNLLSGLPPSHRWYTVLDLKDAFFCLRLHPTSQPLFAFEWRDPGMGISGQLTWTRLPQGFKNSPTLFNEALHRDLADFRIQHPDLILLQYVDDILLAATSELDCQQGTRALLLTLGNLGYRASAKKAQLCQKQVKYLGYLLKEGQRWLTEARKETVMGQPTPKTPRQLREFLGKAGFCRLFIPGFAEMAAPLYPLTKPGTLFNWGPDQQKAYQEIKQALLTAPALGLPDLTKPFELFVDEKQGYAKGVLTQKLGPWRRPVAYLSKKLDPVAAGWPPCLRMVAAIAVLRKDAGKLTMGQPLVILAPHAVEALVKQPPDRWLSNARMTHYQAMLLDTDRVQFGPVVALNPATLLPLPEEGAPHDCLEILAETHGTRPDLTDQPIPDADHTWYTDGSSFLQEGQRKAGAAVTTETEVIWARALPAGTSAQRAELIALTQALKMAEGKRLNVYTDSRYAFATAHIHGEIYRRRGWLTSEGREIKNKSEILALLKALFLPKRLSIIHCLGHQKGDSAEARGNRLADQAAREAAIKTPPDTSTLLAGKRTADGSEFEKRTADGSEFESPKKKAKVE

SEQ ID NO: 1918 - protein, 2131 aa, synthetic construct
MPAAKRVKLDGGDKKYSIGLDIGTNSVGWAVITDEYKVPSKKFKVLGNTDRHSIKKNLIGALLFDSGETAEATRLKRTARRRYTRRKNRICYLQEIFSNEMAKVDDSFFHRLEESFLVEEDKKHERHPIFGNIVDEVAYHEKYPTIYHLRKKLVDSTDKADLRLIYLALAHMIKFRGHFLIEGDLNPDNSDVDKLFIQLVQTYNQLFEENPINASGVDAKAILSARLSKSRRLENLIAQLPGEKKNGLFGNLIALSLGLTPNFKSNFDLAEDAKLQLSKDTYDDDLDNLLAQIGDQYADLFLAAKNLSDAILLSDILRVNTEITKAPLSASMIKRYDEHHQDLTLLKALVRQQLPEKYKEIFFDQSKNGYAGYIDGGASQEEFYKFIKPILEKMDGTEELLVKLNREDLLRKQRTFDNGSIPHQIHLGELHAILRRQEDFYPFLKDNREKIEKILTFRIPYYVGPLARGNSRFAWMTRKSEETITPWNFEEVVDKGASAQSFIERMTNFDKNLPNEKVLPKHSLLYEYFTVYNELTKVKYVTEGMRKPAFLSGEQKKAIVDLLFKTNRKVTVKQLKEDYFKKIECFDSVEISGVEDRFNASLGTYHDLLKIIKDKDFLDNEENEDILEDIVLTLTLFEDREMIEERLKTYAHLFDDKVMKQLKRRRYTGWGRLSRKLINGIRDKQSGKTILDFLKSDGFANRNFMQLIHDDSLTFKEDIQKAQVSGQGDSLHEHIANLAGSPAIKKGILQTVKVVDELVKVMGRHKPENIVIEMARENQTTQKGQKNSRERMKRIEEGIKELGSQILKEHPVENTQLQNEKLYLYYLQNGRDMYVDQELDINRLSDYDVDHIVPQSFLKDDSIDNKVLTRSDKARGKSDNVPSEEVVKKMKNYWRQLLNAKLITQRKFDNLTKAERGGLSELDKAGFIKRQLVETRQITKHVAQILDSRMNTKYDENDKLIREVKVITLKSKLVSDFRKDFQFYKVREINNYHHAHDAYLNAVVGTALIKKYPKLESEFVYGDYKVYDVRKMIAKSEQEIGKATAKYFFYSNIMNFFKTEITLANGEIRKRPLIETNGETGEIVWDKGRDFATVRKVLSMPQVNIVKKTEVQTGGFSKESILPKRNSDKLIARKKDWDPKKYGGFDSPTVAYSVLVVAKVEKGKSKKLKSVKELLGITIMERSSFEKNPIDFLEAKGYKEVKKDLIIKLPKYSLFELENGRKRMLASAGELQKGNELALPSKYVNFLYLASHYEKLKGSPEDNEQKQLFVEQHKHYLDEIIEQISEFSKRVILADANLDKVLSAYNKHRDKPIREQAENIIHLFTLTNLGAPAAFKYFDTTIDRKRYTSTKEVLDATLIHQSITGLYETRIDLSQLGGDGGAEAAAKEAAAKEAAAKEAAAKALEAEAAAKEAAAKEAAAKEAAAKAGGTLNLEDEYRLYETSAEPEVSPGSTWLSDFPQAWAETGGMGLAVRQAPLIIPLKATSTPVSIKQYPMSQEAKLGIKPHIQRLLDQGILVPCQSPWNTPLLPVKKPGTNDYRPVQDLREVNKRVEDIHPTVPNPYNLLSGLPPSHRWYTVLDLKDAFFCLRLHPTSQPLFAFEWRDPGMGISGQLTWTRLPQGFKNSPTLFNEALHRDLADFRIQHPDLILLQYVDDILLAATSELDCQQGTRALLLTLGNLGYRASAKKAQLCQKQVKYLGYLLKEGQRWLTEARKETVMGQPTPKTPRQLREFLGKAGFCRLFIPGFAEMAAPLYPLTKPGTLFNWGPDQQKAYQEIKQALLTAPALGLPDLTKPFELFVDEKQGYAKGVLTQKLGPWRRPVAYLSKKLDPVAAGWPPCLRMVAAIAVLRKDAGKLTMGQPLVILAPHAVEALVKQPPDRWLSNARMTHYQAMLLDTDRVQFGPVVALNPATLLPLPEEGAPHDCLEILAETHGTRPDLTDQPIPDADHTWYTDGSSFLQEGQRKAGAAVTTETEVIWARALPAGTSAQRAELIALTQALKMAEGKRLNVYTDSRYAFATAHIHGEIYRRRGWLTSEGREIKNKSEILALLKALFLPKRLSIIHCLGHQKGDSAEARGNRLADQAAREAAIKTPPDTSTLLAGKRTADGSEFEKRTADGSEFESPKKKAKVE

SEQ ID NO: 1919 - protein, 2096 aa, synthetic construct
MPAAKRVKLDGGDKKYSIGLDIGTNSVGWAVITDEYKVPSKKFKVLGNTDRHSIKKNLIGALLFDSGETAEATRLKRTARRRYTRRKNRICYLQEIFSNEMAKVDDSFFHRLEESFLVEEDKKHERHPIFGNIVDEVAYHEKYPTIYHLRKKLVDSTDKADLRLIYLALAHMIKFRGHFLIEGDLNPDNSDVDKLFIQLVQTYNQLFEENPINASGVDAKAILSARLSKSRRLENLIAQLPGEKKNGLFGNLIALSLGLTPNFKSNFDLAEDAKLQLSKDTYDDDLDNLLAQIGDQYADLFLAAKNLSDAILLSDILRVNTEITKAPLSASMIKRYDEHHQDLTLLKALVRQQLPEKYKEIFFDQSKNGYAGYIDGGASQEEFYKFIKPILEKMDGTEELLVKLNREDLLRKQRTFDNGSIPHQIHLGELHAILRRQEDFYPFLKDNREKIEKILTFRIPYYVGPLARGNSRFAWMTRKSEETITPWNFEEVVDKGASAQSFIERMTNFDKNLPNEKVLPKHSLLYEYFTVYNELTKVKYVTEGMRKPAFLSGEQKKAIVDLLFKTNRKVTVKQLKEDYFKKIECFDSVEISGVEDRFNASLGTYHDLLKIIKDKDFLDNEENEDILEDIVLTLTLFEDREMIEERLKTYAHLFDDKVMKQLKRRRYTGWGRLSRKLINGIRDKQSGKTILDFLKSDGFANRNFMQLIHDDSLTFKEDIQKAQVSGQGDSLHEHIANLAGSPAIKKGILQTVKVVDELVKVMGRHKPENIVIEMARENQTTQKGQKNSRERMKRIEEGIKELGSQILKEHPVENTQLQNEKLYLYYLQNGRDMYVDQELDINRLSDYDVDHIVPQSFLKDDSIDNKVLTRSDKARGKSDNVPSEEVVKKMKNYWRQLLNAKLITQRKFDNLTKAERGGLSELDKAGFIKRQLVETRQITKHVAQILDSRMNTKYDENDKLIREVKVITLKSKLVSDFRKDFQFYKVREINNYHHAHDAYLNAVVGTALIKKYPKLESEFVYGDYKVYDVRKMIAKSEQEIGKATAKYFFYSNIMNFFKTEITLANGEIRKRPLIETNGETGEIVWDKGRDFATVRKVLSMPQVNIVKKTEVQTGGFSKESILPKRNSDKLIARKKDWDPKKYGGFDSPTVAYSVLVVAKVEKGKSKKLKSVKELLGITIMERSSFEKNPIDFLEAKGYKEVKKDLIIKLPKYSLFELENGRKRMLASAGELQKGNELALPSKYVNFLYLASHYEKLKGSPEDNEQKQLFVEQHKHYLDEIIEQISEFSKRVILADANLDKVLSAYNKHRDKPIREQAENIIHLFTLTNLGAPAAFKYFDTTIDRKRYTSTKEVLDATLIHQSITGLYETRIDLSQLGGDGGPAPEAAAKGSSGGTLNLEDEYRLYETSAEPEVSPGSTWLSDFPQAWAETGGMGLAVRQAPLIIPLKATSTPVSIKQYPMSQEAKLGIKPHIQRLLDQGILVPCQSPWNTPLLPVKKPGTNDYRPVQDLREVNKRVEDIHPTVPNPYNLLSGLPPSHRWYTVLDLKDAFFCLRLHPTSQPLFAFEWRDPGMGISGQLTWTRLPQGFKNSPTLFNEALHRDLADFRIQHPDLILLQYVDDILLAATSELDCQQGTRALLLTLGNLGYRASAKKAQLCQKQVKYLGYLLKEGQRWLTEARKETVMGQPTPKTPRQLREFLGKAGFCRLFIPGFAEMAAPLYPLTKPGTLFNWGPDQQKAYQEIKQALLTAPALGLPDLTKPFELFVDEKQGYAKGVLTQKLGPWRRPVAYLSKKLDPVAAGWPPCLRMVAAIAVLRKDAGKLTMGQPLVILAPHAVEALVKQPPDRWLSNARMTHYQAMLLDTDRVQFGPVVALNPATLLPLPEEGAPHDCLEILAETHGTRPDLTDQPIPDADHTWYTDGSSFLQEGQRKAGAAVTTETEVIWARALPAGTSAQRAELIALTQALKMAEGKRLNVYTDSRYAFATAHIHGEIYRRRGWLTSEGREIKNKSEILALLKALFLPKRLSIIHCLGHQKGDSAEARGNRLADQAAREAAIKTPPDTSTLLAGKRTADGSEFEKRTADGSEFESPKKKAKVE

SEQ ID NO: 1920 - protein, 2096 aa, synthetic construct
MPAAKRVKLDGGDKKYSIGLDIGTNSVGWAVITDEYKVPSKKFKVLGNTDRHSIKKNLIGALLFDSGETAEATRLKRTARRRYTRRKNRICYLQEIFSNEMAKVDDSFFHRLEESFLVEEDKKHERHPIFGNIVDEVAYHEKYPTIYHLRKKLVDSTDKADLRLIYLALAHMIKFRGHFLIEGDLNPDNSDVDKLFIQLVQTYNQLFEENPINASGVDAKAILSARLSKSRRLENLIAQLPGEKKNGLFGNLIALSLGLTPNFKSNFDLAEDAKLQLSKDTYDDDLDNLLAQIGDQYADLFLAAKNLSDAILLSDILRVNTEITKAPLSASMIKRYDEHHQDLTLLKALVRQQLPEKYKEIFFDQSKNGYAGYIDGGASQEEFYKFIKPILEKMDGTEELLVKLNREDLLRKQRTFDNGSIPHQIHLGELHAILRRQEDFYPFLKDNREKIEKILTFRIPYYVGPLARGNSRFAWMTRKSEETITPWNFEEVVDKGASAQSFIERMTNFDKNLPNEKVLPKHSLLYEYFTVYNELTKVKYVTEGMRKPAFLSGEQKKAIVDLLFKTNRKVTVKQLKEDYFKKIECFDSVEISGVEDRFNASLGTYHDLLKIIKDKDFLDNEENEDILEDIVLTLTLFEDREMIEERLKTYAHLFDDKVMKQLKRRRYTGWGRLSRKLINGIRDKQSGKTILDFLKSDGFANRNFMQLIHDDSLTFKEDIQKAQVSGQGDSLHEHIANLAGSPAIKKGILQTVKVVDELVKVMGRHKPENIVIEMARENQTTQKGQKNSRERMKRIEEGIKELGSQILKEHPVENTQLQNEKLYLYYLQNGRDMYVDQELDINRLSDYDVDHIVPQSFLKDDSIDNKVLTRSDKARGKSDNVPSEEVVKKMKNYWRQLLNAKLITQRKFDNLTKAERGGLSELDKAGFIKRQLVETRQITKHVAQILDSRMNTKYDENDKLIREVKVITLKSKLVSDFRKDFQFYKVREINNYHHAHDAYLNAVVGTALIKKYPKLESEFVYGDYKVYDVRKMIAKSEQEIGKATAKYFFYSNIMNFFKTEITLANGEIRKRPLIETNGETGEIVWDKGRDFATVRKVLSMPQVNIVKKTEVQTGGFSKESILPKRNSDKLIARKKDWDPKKYGGFDSPTVAYSVLVVAKVEKGKSKKLKSVKELLGITIMERSSFEKNPIDFLEAKGYKEVKKDLIIKLPKYSLFELENGRKRMLASAGELQKGNELALPSKYVNFLYLASHYEKLKGSPEDNEQKQLFVEQHKHYLDEIIEQISEFSKRVILADANLDKVLSAYNKHRDKPIREQAENIIHLFTLTNLGAPAAFKYFDTTIDRKRYTSTKEVLDATLIHQSITGLYETRIDLSQLGGDGGGGGEAAAKGGSGGTLNLEDEYRLYETSAEPEVSPGSTWLSDFPQAWAETGGMGLAVRQAPLIIPLKATSTPVSIKQYPMSQEAKLGIKPHIQRLLDQGILVPCQSPWNTPLLPVKKPGTNDYRPVQDLREVNKRVEDIHPTVPNPYNLLSGLPPSHRWYTVLDLKDAFFCLRLHPTSQPLFAFEWRDPGMGISGQLTWTRLPQGFKNSPTLFNEALHRDLADFRIQHPDLILLQYVDDILLAATSELDCQQGTRALLLTLGNLGYRASAKKAQLCQKQVKYLGYLLKEGQRWLTEARKETVMGQPTPKTPRQLREFLGKAGFCRLFIPGFAEMAAPLYPLTKPGTLFNWGPDQQKAYQEIKQALLTAPALGLPDLTKPFELFVDEKQGYAKGVLTQKLGPWRRPVAYLSKKLDPVAAGWPPCLRMVAAIAVLRKDAGKLTMGQPLVILAPHAVEALVKQPPDRWLSNARMTHYQAMLLDTDRVQFGPVVALNPATLLPLPEEGAPHDCLEILAETHGTRPDLTDQPIPDADHTWYTDGSSFLQEGQRKAGAAVTTETEVIWARALPAGTSAQRAELIALTQALKMAEGKRLNVYTDSRYAFATAHIHGEIYRRRGWLTSEGREIKNKSEILALLKALFLPKRLSIIHCLGHQKGDSAEARGNRLADQAAREAAIKTPPDTSTLLAGKRTADGSEFEKRTADGSEFESPKKKAKVE

SEQ ID NO: 1921 - protein, 2096 aa, synthetic construct
MPAAKRVKLDGGDKKYSIGLDIGTNSVGWAVITDEYKVPSKKFKVLGNTDRHSIKKNLIGALLFDSGETAEATRLKRTARRRYTRRKNRICYLQEIFSNEMAKVDDSFFHRLEESFLVEEDKKHERHPIFGNIVDEVAYHEKYPTIYHLRKKLVDSTDKADLRLIYLALAHMIKFRGHFLIEGDLNPDNSDVDKLFIQLVQTYNQLFEENPINASGVDAKAILSARLSKSRRLENLIAQLPGEKKNGLFGNLIALSLGLTPNFKSNFDLAEDAKLQLSKDTYDDDLDNLLAQIGDQYADLFLAAKNLSDAILLSDILRVNTEITKAPLSASMIKRYDEHHQDLTLLKALVRQQLPEKYKEIFFDQSKNGYAGYIDGGASQEEFYKFIKPILEKMDGTEELLVKLNREDLLRKQRTFDNGSIPHQIHLGELHAILRRQEDFYPFLKDNREKIEKILTFRIPYYVGPLARGNSRFAWMTRKSEETITPWNFEEVVDKGASAQSFIERMTNFDKNLPNEKVLPKHSLLYEYFTVYNELTKVKYVTEGMRKPAFLSGEQKKAIVDLLFKTNRKVTVKQLKEDYFKKIECFDSVEISGVEDRFNASLGTYHDLLKIIKDKDFLDNEENEDILEDIVLTLTLFEDREMIEERLKTYAHLFDDKVMKQLKRRRYTGWGRLSRKLINGIRDKQSGKTILDFLKSDGFANRNFMQLIHDDSLTFKEDIQKAQVSGQGDSLHEHIANLAGSPAIKKGILQTVKVVDELVKVMGRHKPENIVIEMARENQTTQKGQKNSRERMKRIEEGIKELGSQILKEHPVENTQLQNEKLYLYYLQNGRDMYVDQELDINRLSDYDVDHIVPQSFLKDDSIDNKVLTRSDKARGKSDNVPSEEVVKKMKNYWRQLLNAKLITQRKFDNLTKAERGGLSELDKAGFIKRQLVETRQITKHVAQILDSRMNTKYDENDKLIREVKVITLKSKLVSDFRKDFQFYKVREINNYHHAHDAYLNAVVGTALIKKYPKLESEFVYGDYKVYDVRKMIAKSEQEIGKATAKYFFYSNIMNFFKTEITLANGEIRKRPLIETNGETGEIVWDKGRDFATVRKVLSMPQVNIVKKTEVQTGGFSKESILPKRNSDKLIARKKDWDPKKYGGFDSPTVAYSVLVVAKVEKGKSKKLKSVKELLGITIMERSSFEKNPIDFLEAKGYKEVKKDLIIKLPKYSLFELENGRKRMLASAGELQKGNELALPSKYVNFLYLASHYEKLKGSPEDNEQKQLFVEQHKHYLDEIIEQISEFSKRVILADANLDKVLSAYNKHRDKPIREQAENIIHLFTLTNLGAPAAFKYFDTTIDRKRYTSTKEVLDATLIHQSITGLYETRIDLSQLGGDGGEAAAKGSSGGGGGTLNLEDEYRLYETSAEPEVSPGSTWLSDFPQAWAETGGMGLAVRQAPLIIPLKATSTPVSIKQYPMSQEAKLGIKPHIQRLLDQGILVPCQSPWNTPLLPVKKPGTNDYRPVQDLREVNKRVEDIHPTVPNPYNLLSGLPPSHRWYTVLDLKDAFFCLRLHPTSQPLFAFEWRDPGMGISGQLTWTRLPQGFKNSPTLFNEALHRDLADFRIQHPDLILLQYVDDILLAATSELDCQQGTRALLLTLGNLGYRASAKKAQLCQKQVKYLGYLLKEGQRWLTEARKETVMGQPTPKTPRQLREFLGKAGFCRLFIPGFAEMAAPLYPLTKPGTLFNWGPDQQKAYQEIKQALLTAPALGLPDLTKPFELFVDEKQGYAKGVLTQKLGPWRRPVAYLSKKLDPVAAGWPPCLRMVAAIAVLRKDAGKLTMGQPLVILAPHAVEALVKQPPDRWLSNARMTHYQAMLLDTDRVQFGPVVALNPATLLPLPEEGAPHDCLEILAETHGTRPDLTDQPIPDADHTWYTDGSSFLQEGQRKAGAAVTTETEVIWARALPAGTSAQRAELIALTQALKMAEGKRLNVYTDSRYAFATAHIHGEIYRRRGWLTSEGREIKNKSEILALLKALFLPKRLSIIHCLGHQKGDSAEARGNRLADQAAREAAIKTPPDTSTLLAGKRTADGSEFEKRTADGSEFESPKKKAKVE

SEQ ID NO: 1922 - protein, 2093 aa, synthetic construct
MPAAKRVKLDGGDKKYSIGLDIGTNSVGWAVITDEYKVPSKKFKVLGNTDRHSIKKNLIGALLFDSGETAEATRLKRTARRRYTRRKNRICYLQEIFSNEMAKVDDSFFHRLEESFLVEEDKKHERHPIFGNIVDEVAYHEKYPTIYHLRKKLVDSTDKADLRLIYLALAHMIKFRGHFLIEGDLNPDNSDVDKLFIQLVQTYNQLFEENPINASGVDAKAILSARLSKSRRLENLIAQLPGEKKNGLFGNLIALSLGLTPNFKSNFDLAEDAKLQLSKDTYDDDLDNLLAQIGDQYADLFLAAKNLSDAILLSDILRVNTEITKAPLSASMIKRYDEHHQDLTLLKALVRQQLPEKYKEIFFDQSKNGYAGYIDGGASQEEFYKFIKPILEKMDGTEELLVKLNREDLLRKQRTFDNGSIPHQIHLGELHAILRRQEDFYPFLKDNREKIEKILTFRIPYYVGPLARGNSRFAWMTRKSEETITPWNFEEVVDKGASAQSFIERMTNFDKNLPNEKVLPKHSLLYEYFTVYNELTKVKYVTEGMRKPAFLSGEQKKAIVDLLFKTNRKVTVKQLKEDYFKKIECFDSVEISGVEDRFNASLGTYHDLLKIIKDKDFLDNEENEDILEDIVLTLTLFEDREMIEERLKTYAHLFDDKVMKQLKRRRYTGWGRLSRKLINGIRDKQSGKTILDFLKSDGFANRNFMQLIHDDSLTFKEDIQKAQVSGQGDSLHEHIANLAGSPAIKKGILQTVKVVDELVKVMGRHKPENIVIEMARENQTTQKGQKNSRERMKRIEEGIKELGSQILKEHPVENTQLQNEKLYLYYLQNGRDMYVDQELDINRLSDYDVDHIVPQSFLKDDSIDNKVLTRSDKARGKSDNVPSEEVVKKMKNYWRQLLNAKLITQRKFDNLTKAERGGLSELDKAGFIKRQLVETRQITKHVAQILDSRMNTKYDENDKLIREVKVITLKSKLVSDFRKDFQFYKVREINNYHHAHDAYLNAVVGTALIKKYPKLESEFVYGDYKVYDVRKMIAKSEQEIGKATAKYFFYSNIMNFFKTEITLANGEIRKRPLIETNGETGEIVWDKGRDFATVRKVLSMPQVNIVKKTEVQTGGFSKESILPKRNSDKLIARKKDWDPKKYGGFDSPTVAYSVLVVAKVEKGKSKKLKSVKELLGITIMERSSFEKNPIDFLEAKGYKEVKKDLIIKLPKYSLFELENGRKRMLASAGELQKGNELALPSKYVNFLYLASHYEKLKGSPEDNEQKQLFVEQHKHYLDEIIEQISEFSKRVILADANLDKVLSAYNKHRDKPIREQAENIIHLFTLTNLGAPAAFKYFDTTIDRKRYTSTKEVLDATLIHQSITGLYETRIDLSQLGGDGGGGSEAAAKGGTLNLEDEYRLYETSAEPEVSPGSTWLSDFPQAWAETGGMGLAVRQAPLIIPLKATSTPVSIKQYPMSQEAKLGIKPHIQRLLDQGILVPCQSPWNTPLLPVKKPGTNDYRPVQDLREVNKRVEDIHPTVPNPYNLLSGLPPSHRWYTVLDLKDAFFCLRLHPTSQPLFAFEWRDPGMGISGQLTWTRLPQGFKNSPTLFNEALHRDLADFRIQHPDLILLQYVDDILLAATSELDCQQGTRALLLTLGNLGYRASAKKAQLCQKQVKYLGYLLKEGQRWLTEARKETVMGQPTPKTPRQLREFLGKAGFCRLFIPGFAEMAAPLYPLTKPGTLFNWGPDQQKAYQEIKQALLTAPALGLPDLTKPFELFVDEKQGYAKGVLTQKLGPWRRPVAYLSKKLDPVAAGWPPCLRMVAAIAVLRKDAGKLTMGQPLVILAPHAVEALVKQPPDRWLSNARMTHYQAMLLDTDRVQFGPVVALNPATLLPLPEEGAPHDCLEILAETHGTRPDLTDQPIPDADHTWYTDGSSFLQEGQRKAGAAVTTETEVIWARALPAGTSAQRAELIALTQALKMAEGKRLNVYTDSRYAFATAHIHGEIYRRRGWLTSEGREIKNKSEILALLKALFLPKRLSIIHCLGHQKGDSAEARGNRLADQAAREAAIKTPPDTSTLLAGKRTADGSEFEKRTADGSEFESPKKKAKVE

SEQ ID NO: 1923 - protein, 2100 aa, synthetic construct
MPAAKRVKLDGGDKKYSIGLDIGTNSVGWAVITDEYKVPSKKFKVLGNTDRHSIKKNLIGALLFDSGETAEATRLKRTARRRYTRRKNRICYLQEIFSNEMAKVDDSFFHRLEESFLVEEDKKHERHPIFGNIVDEVAYHEKYPTIYHLRKKLVDSTDKADLRLIYLALAHMIKFRGHFLIEGDLNPDNSDVDKLFIQLVQTYNQLFEENPINASGVDAKAILSARLSKSRRLENLIAQLPGEKKNGLFGNLIALSLGLTPNFKSNFDLAEDAKLQLSKDTYDDDLDNLLAQIGDQYADLFLAAKNLSDAILLSDILRVNTEITKAPLSASMIKRYDEHHQDLTLLKALVRQQLPEKYKEIFFDQSKNGYAGYIDGGASQEEFYKFIKPILEKMDGTEELLVKLNREDLLRKQRTFDNGSIPHQIHLGELHAILRRQEDFYPFLKDNREKIEKILTFRIPYYVGPLARGNSRFAWMTRKSEETITPWNFEEVVDKGASAQSFIERMTNFDKNLPNEKVLPKHSLLYEYFTVYNELTKVKYVTEGMRKPAFLSGEQKKAIVDLLFKTNRKVTVKQLKEDYFKKIECFDSVEISGVEDRFNASLGTYHDLLKIIKDKDFLDNEENEDILEDIVLTLTLFEDREMIEERLKTYAHLFDDKVMKQLKRRRYTGWGRLSRKLINGIRDKQSGKTILDFLKSDGFANRNFMQLIHDDSLTFKEDIQKAQVSGQGDSLHEHIANLAGSPAIKKGILQTVKVVDELVKVMGRHKPENIVIEMARENQTTQKGQKNSRERMKRIEEGIKELGSQILKEHPVENTQLQNEKLYLYYLQNGRDMYVDQELDINRLSDYDVDHIVPQSFLKDDSIDNKVLTRSDKARGKSDNVPSEEVVKKMKNYWRQLLNAKLITQRKFDNLTKAERGGLSELDKAGFIKRQLVETRQITKHVAQILDSRMNTKYDENDKLIREVKVITLKSKLVSDFRKDFQFYKVREINNYHHAHDAYLNAVVGTALIKKYPKLESEFVYGDYKVYDVRKMIAKSEQEIGKATAKYFFYSNIMNFFKTEITLANGEIRKRPLIETNGETGEIVWDKGRDFATVRKVLSMPQVNIVKKTEVQTGGFSKESILPKRNSDKLIARKKDWDPKKYGGFDSPTVAYSVLVVAKVEKGKSKKLKSVKELLGITIMERSSFEKNPIDFLEAKGYKEVKKDLIIKLPKYSLFELENGRKRMLASAGELQKGNELALPSKYVNFLYLASHYEKLKGSPEDNEQKQLFVEQHKHYLDEIIEQISEFSKRVILADANLDKVLSAYNKHRDKPIREQAENIIHLFTLTNLGAPAAFKYFDTTIDRKRYTSTKEVLDATLIHQSITGLYETRIDLSQLGGDGGGSSGSSGSSGSSGSSGGTLNLEDEYRLYETSAEPEVSPGSTWLSDFPQAWAETGGMGLAVRQAPLIIPLKATSTPVSIKQYPMSQEAKLGIKPHIQRLLDQGILVPCQSPWNTPLLPVKKPGTNDYRPVQDLREVNKRVEDIHPTVPNPYNLLSGLPPSHRWYTVLDLKDAFFCLRLHPTSQPLFAFEWRDPGMGISGQLTWTRLPQGFKNSPTLFNEALHRDLADFRIQHPDLILLQYVDDILLAATSELDCQQGTRALLLTLGNLGYRASAKKAQLCQKQVKYLGYLLKEGQRWLTEARKETVMGQPTPKTPRQLREFLGKAGFCRLFIPGFAEMAAPLYPLTKPGTLFNWGPDQQKAYQEIKQALLTAPALGLPDLTKPFELFVDEKQGYAKGVLTQKLGPWRRPVAYLSKKLDPVAAGWPPCLRMVAAIAVLRKDAGKLTMGQPLVILAPHAVEALVKQPPDRWLSNARMTHYQAMLLDTDRVQFGPVVALNPATLLPLPEEGAPHDCLEILAETHGTRPDLTDQPIPDADHTWYTDGSSFLQEGQRKAGAAVTTETEVIWARALPAGTSAQRAELIALTQALKMAEGKRLNVYTDSRYAFATAHIHGEIYRRRGWLTSEGREIKNKSEILALLKALFLPKRLSIIHCLGHQKGDSAEARGNRLADQAAREAAIKTPPDTSTLLAGKRTADGSEFEKRTADGSEFESPKKKAKVE

SEQ ID NO: 1924 - protein, 2096 aa, synthetic construct
MPAAKRVKLDGGDKKYSIGLDIGTNSVGWAVITDEYKVPSKKFKVLGNTDRHSIKKNLIGALLFDSGETAEATRLKRTARRRYTRRKNRICYLQEIFSNEMAKVDDSFFHRLEESFLVEEDKKHERHPIFGNIVDEVAYHEKYPTIYHLRKKLVDSTDKADLRLIYLALAHMIKFRGHFLIEGDLNPDNSDVDKLFIQLVQTYNQLFEENPINASGVDAKAILSARLSKSRRLENLIAQLPGEKKNGLFGNLIALSLGLTPNFKSNFDLAEDAKLQLSKDTYDDDLDNLLAQIGDQYADLFLAAKNLSDAILLSDILRVNTEITKAPLSASMIKRYDEHHQDLTLLKALVRQQLPEKYKEIFFDQSKNGYAGYIDGGASQEEFYKFIKPILEKMDGTEELLVKLNREDLLRKQRTFDNGSIPHQIHLGELHAILRRQEDFYPFLKDNREKIEKILTFRIPYYVGPLARGNSRFAWMTRKSEETITPWNFEEVVDKGASAQSFIERMTNFDKNLPNEKVLPKHSLLYEYFTVYNELTKVKYVTEGMRKPAFLSGEQKKAIVDLLFKTNRKVTVKQLKEDYFKKIECFDSVEISGVEDRFNASLGTYHDLLKIIKDKDFLDNEENEDILEDIVLTLTLFEDREMIEERLKTYAHLFDDKVMKQLKRRRYTGWGRLSRKLINGIRDKQSGKTILDFLKSDGFANRNFMQLIHDDSLTFKEDIQKAQVSGQGDSLHEHIANLAGSPAIKKGILQTVKVVDELVKVMGRHKPENIVIEMARENQTTQKGQKNSRERMKRIEEGIKELGSQILKEHPVENTQLQNEKLYLYYLQNGRDMYVDQELDINRLSDYDVDHIVPQSFLKDDSIDNKVLTRSDKARGKSDNVPSEEVVKKMKNYWRQLLNAKLITQRKFDNLTKAERGGLSELDKAGFIKRQLVETRQITKHVAQILDSRMNTKYDENDKLIREVKVITLKSKLVSDFRKDFQFYKVREINNYHHAHDAYLNAVVGTALIKKYPKLESEFVYGDYKVYDVRKMIAKSEQEIGKATAKYFFYSNIMNFFKTEITLANGEIRKRPLIETNGETGEIVWDKGRDFATVRKVLSMPQVNIVKKTEVQTGGFSKESILPKRNSDKLIARKKDWDPKKYGGFDSPTVAYSVLVVAKVEKGKSKKLKSVKELLGITIMERSSFEKNPIDFLEAKGYKEVKKDLIIKLPKYSLFELENGRKRMLASAGELQKGNELALPSKYVNFLYLASHYEKLKGSPEDNEQKQLFVEQHKHYLDEIIEQISEFSKRVILADANLDKVLSAYNKHRDKPIREQAENIIHLFTLTNLGAPAAFKYFDTTIDRKRYTSTKEVLDATLIHQSITGLYETRIDLSQLGGDGGPAPAPAPAPAPGGTLNLEDEYRLYETSAEPEVSPGSTWLSDFPQAWAETGGMGLAVRQAPLIIPLKATSTPVSIKQYPMSQEAKLGIKPHIQRLLDQGILVPCQSPWNTPLLPVKKPGTNDYRPVQDLREVNKRVEDIHPTVPNPYNLLSGLPPSHRWYTVLDLKDAFFCLRLHPTSQPLFAFEWRDPGMGISGQLTWTRLPQGFKNSPTLFNEALHRDLADFRIQHPDLILLQYVDDILLAATSELDCQQGTRALLLTLGNLGYRASAKKAQLCQKQVKYLGYLLKEGQRWLTEARKETVMGQPTPKTPRQLREFLGKAGFCRLFIPGFAEMAAPLYPLTKPGTLFNWGPDQQKAYQEIKQALLTAPALGLPDLTKPFELFVDEKQGYAKGVLTQKLGPWRRPVAYLSKKLDPVAAGWPPCLRMVAAIAVLRKDAGKLTMGQPLVILAPHAVEALVKQPPDRWLSNARMTHYQAMLLDTDRVQFGPVVALNPATLLPLPEEGAPHDCLEILAETHGTRPDLTDQPIPDADHTWYTDGSSFLQEGQRKAGAAVTTETEVIWARALPAGTSAQRAELIALTQALKMAEGKRLNVYTDSRYAFATAHIHGEIYRRRGWLTSEGREIKNKSEILALLKALFLPKRLSIIHCLGHQKGDSAEARGNRLADQAAREAAIKTPPDTSTLLAGKRTADGSEFEKRTADGSEFESPKKKAKVE

SEQ ID NO: 1925 - protein, 2094 aa, synthetic construct
MPAAKRVKLDGGDKKYSIGLDIGTNSVGWAVITDEYKVPSKKFKVLGNTDRHSIKKNLIGALLFDSGETAEATRLKRTARRRYTRRKNRICYLQEIFSNEMAKVDDSFFHRLEESFLVEEDKKHERHPIFGNIVDEVAYHEKYPTIYHLRKKLVDSTDKADLRLIYLALAHMIKFRGHFLIEGDLNPDNSDVDKLFIQLVQTYNQLFEENPINASGVDAKAILSARLSKSRRLENLIAQLPGEKKNGLFGNLIALSLGLTPNFKSNFDLAEDAKLQLSKDTYDDDLDNLLAQIGDQYADLFLAAKNLSDAILLSDILRVNTEITKAPLSASMIKRYDEHHQDLTLLKALVRQQLPEKYKEIFFDQSKNGYAGYIDGGASQEEFYKFIKPILEKMDGTEELLVKLNREDLLRKQRTFDNGSIPHQIHLGELHAILRRQEDFYPFLKDNREKIEKILTFRIPYYVGPLARGNSRFAWMTRKSEETITPWNFEEVVDKGASAQSFIERMTNFDKNLPNEKVLPKHSLLYEYFTVYNELTKVKYVTEGMRKPAFLSGEQKKAIVDLLFKTNRKVTVKQLKEDYFKKIECFDSVEISGVEDRFNASLGTYHDLLKIIKDKDFLDNEENEDILEDIVLTLTLFEDREMIEERLKTYAHLFDDKVMKQLKRRRYTGWGRLSRKLINGIRDKQSGKTILDFLKSDGFANRNFMQLIHDDSLTFKEDIQKAQVSGQGDSLHEHIANLAGSPAIKKGILQTVKVVDELVKVMGRHKPENIVIEMARENQTTQKGQKNSRERMKRIEEGIKELGSQILKEHPVENTQLQNEKLYLYYLQNGRDMYVDQELDINRLSDYDVDHIVPQSFLKDDSIDNKVLTRSDKARGKSDNVPSEEVVKKMKNYWRQLLNAKLITQRKFDNLTKAERGGLSELDKAGFIKRQLVETRQITKHVAQILDSRMNTKYDENDKLIREVKVITLKSKLVSDFRKDFQFYKVREINNYHHAHDAYLNAVVGTALIKKYPKLESEFVYGDYKVYDVRKMIAKSEQEIGKATAKYFFYSNIMNFFKTEITLANGEIRKRPLIETNGETGEIVWDKGRDFATVRKVLSMPQVNIVKKTEVQTGGFSKESILPKRNSDKLIARKKDWDPKKYGGFDSPTVAYSVLVVAKVEKGKSKKLKSVKELLGITIMERSSFEKNPIDFLEAKGYKEVKKDLIIKLPKYSLFELENGRKRMLASAGELQKGNELALPSKYVNFLYLASHYEKLKGSPEDNEQKQLFVEQHKHYLDEIIEQISEFSKRVILADANLDKVLSAYNKHRDKPIREQAENIIHLFTLTNLGAPAAFKYFDTTIDRKRYTSTKEVLDATLIHQSITGLYETRIDLSQLGGDGGGSSGSSGSSGGTLNLEDEYRLYETSAEPEVSPGSTWLSDFPQAWAETGGMGLAVRQAPLIIPLKATSTPVSIKQYPMSQEAKLGIKPHIQRLLDQGILVPCQSPWNTPLLPVKKPGTNDYRPVQDLREVNKRVEDIHPTVPNPYNLLSGLPPSHRWYTVLDLKDAFFCLRLHPTSQPLFAFEWRDPGMGISGQLTWTRLPQGFKNSPTLFNEALHRDLADFRIQHPDLILLQYVDDILLAATSELDCQQGTRALLLTLGNLGYRASAKKAQLCQKQVKYLGYLLKEGQRWLTEARKETVMGQPTPKTPRQLREFLGKAGFCRLFIPGFAEMAAPLYPLTKPGTLFNWGPDQQKAYQEIKQALLTAPALGLPDLTKPFELFVDEKQGYAKGVLTQKLGPWRRPVAYLSKKLDPVAAGWPPCLRMVAAIAVLRKDAGKLTMGQPLVILAPHAVEALVKQPPDRWLSNARMTHYQAMLLDTDRVQFGPVVALNPATLLPLPEEGAPHDCLEILAETHGTRPDLTDQPIPDADHTWYTDGSSFLQEGQRKAGAAVTTETEVIWARALPAGTSAQRAELIALTQALKMAEGKRLNVYTDSRYAFATAHIHGEIYRRRGWLTSEGREIKNKSEILALLKALFLPKRLSIIHCLGHQKGDSAEARGNRLADQAAREAAIKTPPDTSTLLAGKRTADGSEFEKRTADGSEFESPKKKAKVE

SEQ ID NO: 1926 - protein, 2094 aa, synthetic construct
MPAAKRVKLDGGDKKYSIGLDIGTNSVGWAVITDEYKVPSKKFKVLGNTDRHSIKKNLIGALLFDSGETAEATRLKRTARRRYTRRKNRICYLQEIFSNEMAKVDDSFFHRLEESFLVEEDKKHERHPIFGNIVDEVAYHEKYPTIYHLRKKLVDSTDKADLRLIYLALAHMIKFRGHFLIEGDLNPDNSDVDKLFIQLVQTYNQLFEENPINASGVDAKAILSARLSKSRRLENLIAQLPGEKKNGLFGNLIALSLGLTPNFKSNFDLAEDAKLQLSKDTYDDDLDNLLAQIGDQYADLFLAAKNLSDAILLSDILRVNTEITKAPLSASMIKRYDEHHQDLTLLKALVRQQLPEKYKEIFFDQSKNGYAGYIDGGASQEEFYKFIKPILEKMDGTEELLVKLNREDLLRKQRTFDNGSIPHQIHLGELHAILRRQEDFYPFLKDNREKIEKILTFRIPYYVGPLARGNSRFAWMTRKSEETITPWNFEEVVDKGASAQSFIERMTNFDKNLPNEKVLPKHSLLYEYFTVYNELTKVKYVTEGMRKPAFLSGEQKKAIVDLLFKTNRKVTVKQLKEDYFKKIECFDSVEISGVEDRFNASLGTYHDLLKIIKDKDFLDNEENEDILEDIVLTLTLFEDREMIEERLKTYAHLFDDKVMKQLKRRRYTGWGRLSRKLINGIRDKQSGKTILDFLKSDGFANRNFMQLIHDDSLTFKEDIQKAQVSGQGDSLHEHIANLAGSPAIKKGILQTVKVVDELVKVMGRHKPENIVIEMARENQTTQKGQKNSRERMKRIEEGIKELGSQILKEHPVENTQLQNEKLYLYYLQNGRDMYVDQELDINRLSDYDVDHIVPQSFLKDDSIDNKVLTRSDKARGKSDNVPSEEVVKKMKNYWRQLLNAKLITQRKFDNLTKAERGGLSELDKAGFIKRQLVETRQITKHVAQILDSRMNTKYDENDKLIREVKVITLKSKLVSDFRKDFQFYKVREINNYHHAHDAYLNAVVGTALIKKYPKLESEFVYGDYKVYDVRKMIAKSEQEIGKATAKYFFYSNIMNFFKTEITLANGEIRKRPLIETNGETGEIVWDKGRDFATVRKVLSMPQVNIVKKTEVQTGGFSKESILPKRNSDKLIARKKDWDPKKYGGFDSPTVAYSVLVVAKVEKGKSKKLKSVKELLGITIMERSSFEKNPIDFLEAKGYKEVKKDLIIKLPKYSLFELENGRKRMLASAGELQKGNELALPSKYVNFLYLASHYEKLKGSPEDNEQKQLFVEQHKHYLDEIIEQISEFSKRVILADANLDKVLSAYNKHRDKPIREQAENIIHLFTLTNLGAPAAFKYFDTTIDRKRYTSTKEVLDATLIHQSITGLYETRIDLSQLGGDGGGSSGGSPAPGGTLNLEDEYRLYETSAEPEVSPGSTWLSDFPQAWAETGGMGLAVRQAPLIIPLKATSTPVSIKQYPMSQEAKLGIKPHIQRLLDQGILVPCQSPWNTPLLPVKKPGTNDYRPVQDLREVNKRVEDIHPTVPNPYNLLSGLPPSHRWYTVLDLKDAFFCLRLHPTSQPLFAFEWRDPGMGISGQLTWTRLPQGFKNSPTLFNEALHRDLADFRIQHPDLILLQYVDDILLAATSELDCQQGTRALLLTLGNLGYRASAKKAQLCQKQVKYLGYLLKEGQRWLTEARKETVMGQPTPKTPRQLREFLGKAGFCRLFIPGFAEMAAPLYPLTKPGTLFNWGPDQQKAYQEIKQALLTAPALGLPDLTKPFELFVDEKQGYAKGVLTQKLGPWRRPVAYLSKKLDPVAAGWPPCLRMVAAIAVLRKDAGKLTMGQPLVILAPHAVEALVKQPPDRWLSNARMTHYQAMLLDTDRVQFGPVVALNPATLLPLPEEGAPHDCLEILAETHGTRPDLTDQPIPDADHTWYTDGSSFLQEGQRKAGAAVTTETEVIWARALPAGTSAQRAELIALTQALKMAEGKRLNVYTDSRYAFATAHIHGEIYRRRGWLTSEGREIKNKSEILALLKALFLPKRLSIIHCLGHQKGDSAEARGNRLADQAAREAAIKTPPDTSTLLAGKRTADGSEFEKRTADGSEFESPKKKAKVE

SEQ ID NO: 1927 - protein, 2091 aa, synthetic construct
MPAAKRVKLDGGDKKYSIGLDIGTNSVGWAVITDEYKVPSKKFKVLGNTDRHSIKKNLIGALLFDSGETAEATRLKRTARRRYTRRKNRICYLQEIFSNEMAKVDDSFFHRLEESFLVEEDKKHERHPIFGNIVDEVAYHEKYPTIYHLRKKLVDSTDKADLRLIYLALAHMIKFRGHFLIEGDLNPDNSDVDKLFIQLVQTYNQLFEENPINASGVDAKAILSARLSKSRRLENLIAQLPGEKKNGLFGNLIALSLGLTPNFKSNFDLAEDAKLQLSKDTYDDDLDNLLAQIGDQYADLFLAAKNLSDAILLSDILRVNTEITKAPLSASMIKRYDEHHQDLTLLKALVRQQLPEKYKEIFFDQSKNGYAGYIDGGASQEEFYKFIKPILEKMDGTEELLVKLNREDLLRKQRTFDNGSIPHQIHLGELHAILRRQEDFYPFLKDNREKIEKILTFRIPYYVGPLARGNSRFAWMTRKSEETITPWNFEEVVDKGASAQSFIERMTNFDKNLPNEKVLPKHSLLYEYFTVYNELTKVKYVTEGMRKPAFLSGEQKKAIVDLLFKTNRKVTVKQLKEDYFKKIECFDSVEISGVEDRFNASLGTYHDLLKIIKDKDFLDNEENEDILEDIVLTLTLFEDREMIEERLKTYAHLFDDKVMKQLKRRRYTGWGRLSRKLINGIRDKQSGKTILDFLKSDGFANRNFMQLIHDDSLTFKEDIQKAQVSGQGDSLHEHIANLAGSPAIKKGILQTVKVVDELVKVMGRHKPENIVIEMARENQTTQKGQKNSRERMKRIEEGIKELGSQILKEHPVENTQLQNEKLYLYYLQNGRDMYVDQELDINRLSDYDVDHIVPQSFLKDDSIDNKVLTRSDKARGKSDNVPSEEVVKKMKNYWRQLLNAKLITQRKFDNLTKAERGGLSELDKAGFIKRQLVETRQITKHVAQILDSRMNTKYDENDKLIREVKVITLKSKLVSDFRKDFQFYKVREINNYHHAHDAYLNAVVGTALIKKYPKLESEFVYGDYKVYDVRKMIAKSEQEIGKATAKYFFYSNIMNFFKTEITLANGEIRKRPLIETNGETGEIVWDKGRDFATVRKVLSMPQVNIVKKTEVQTGGFSKESILPKRNSDKLIARKKDWDPKKYGGFDSPTVAYSVLVVAKVEKGKSKKLKSVKELLGITIMERSSFEKNPIDFLEAKGYKEVKKDLIIKLPKYSLFELENGRKRMLASAGELQKGNELALPSKYVNFLYLASHYEKLKGSPEDNEQKQLFVEQHKHYLDEIIEQISEFSKRVILADANLDKVLSAYNKHRDKPIREQAENIIHLFTLTNLGAPAAFKYFDTTIDRKRYTSTKEVLDATLIHQSITGLYETRIDLSQLGGDGGGSSGSSGGTLNLEDEYRLYETSAEPEVSPGSTWLSDFPQAWAETGGMGLAVRQAPLIIPLKATSTPVSIKQYPMSQEAKLGIKPHIQRLLDQGILVPCQSPWNTPLLPVKKPGTNDYRPVQDLREVNKRVEDIHPTVPNPYNLLSGLPPSHRWYTVLDLKDAFFCLRLHPTSQPLFAFEWRDPGMGISGQLTWTRLPQGFKNSPTLFNEALHRDLADFRIQHPDLILLQYVDDILLAATSELDCQQGTRALLLTLGNLGYRASAKKAQLCQKQVKYLGYLLKEGQRWLTEARKETVMGQPTPKTPRQLREFLGKAGFCRLFIPGFAEMAAPLYPLTKPGTLFNWGPDQQKAYQEIKQALLTAPALGLPDLTKPFELFVDEKQGYAKGVLTQKLGPWRRPVAYLSKKLDPVAAGWPPCLRMVAAIAVLRKDAGKLTMGQPLVILAPHAVEALVKQPPDRWLSNARMTHYQAMLLDTDRVQFGPVVALNPATLLPLPEEGAPHDCLEILAETHGTRPDLTDQPIPDADHTWYTDGSSFLQEGQRKAGAAVTTETEVIWARALPAGTSAQRAELIALTQALKMAEGKRLNVYTDSRYAFATAHIHGEIYRRRGWLTSEGREIKNKSEILALLKALFLPKRLSIIHCLGHQKGDSAEARGNRLADQAAREAAIKTPPDTSTLLAGKRTADGSEFEKRTADGSEFESPKKKAKVE

SEQ ID NO: 1928 - protein, 2091 aa, synthetic construct
MPAAKRVKLDGGDKKYSIGLDIGTNSVGWAVITDEYKVPSKKFKVLGNTDRHSIKKNLIGALLFDSGETAEATRLKRTARRRYTRRKNRICYLQEIFSNEMAKVDDSFFHRLEESFLVEEDKKHERHPIFGNIVDEVAYHEKYPTIYHLRKKLVDSTDKADLRLIYLALAHMIKFRGHFLIEGDLNPDNSDVDKLFIQLVQTYNQLFEENPINASGVDAKAILSARLSKSRRLENLIAQLPGEKKNGLFGNLIALSLGLTPNFKSNFDLAEDAKLQLSKDTYDDDLDNLLAQIGDQYADLFLAAKNLSDAILLSDILRVNTEITKAPLSASMIKRYDEHHQDLTLLKALVRQQLPEKYKEIFFDQSKNGYAGYIDGGASQEEFYKFIKPILEKMDGTEELLVKLNREDLLRKQRTFDNGSIPHQIHLGELHAILRRQEDFYPFLKDNREKIEKILTFRIPYYVGPLARGNSRFAWMTRKSEETITPWNFEEVVDKGASAQSFIERMTNFDKNLPNEKVLPKHSLLYEYFTVYNELTKVKYVTEGMRKPAFLSGEQKKAIVDLLFKTNRKVTVKQLKEDYFKKIECFDSVEISGVEDRFNASLGTYHDLLKIIKDKDFLDNEENEDILEDIVLTLTLFEDREMIEERLKTYAHLFDDKVMKQLKRRRYTGWGRLSRKLINGIRDKQSGKTILDFLKSDGFANRNFMQLIHDDSLTFKEDIQKAQVSGQGDSLHEHIANLAGSPAIKKGILQTVKVVDELVKVMGRHKPENIVIEMARENQTTQKGQKNSRERMKRIEEGIKELGSQILKEHPVENTQLQNEKLYLYYLQNGRDMYVDQELDINRLSDYDVDHIVPQSFLKDDSIDNKVLTRSDKARGKSDNVPSEEVVKKMKNYWRQLLNAKLITQRKFDNLTKAERGGLSELDKAGFIKRQLVETRQITKHVAQILDSRMNTKYDENDKLIREVKVITLKSKLVSDFRKDFQFYKVREINNYHHAHDAYLNAVVGTALIKKYPKLESEFVYGDYKVYDVRKMIAKSEQEIGKATAKYFFYSNIMNFFKTEITLANGEIRKRPLIETNGETGEIVWDKGRDFATVRKVLSMPQVNIVKKTEVQTGGFSKESILPKRNSDKLIARKKDWDPKKYGGFDSPTVAYSVLVVAKVEKGKSKKLKSVKELLGITIMERSSFEKNPIDFLEAKGYKEVKKDLIIKLPKYSLFELENGRKRMLASAGELQKGNELALPSKYVNFLYLASHYEKLKGSPEDNEQKQLFVEQHKHYLDEIIEQISEFSKRVILADANLDKVLSAYNKHRDKPIREQAENIIHLFTLTNLGAPAAFKYFDTTIDRKRYTSTKEVLDATLIHQSITGLYETRIDLSQLGGDGGGGGGGSGGTLNLEDEYRLYETSAEPEVSPGSTWLSDFPQAWAETGGMGLAVRQAPLIIPLKATSTPVSIKQYPMSQEAKLGIKPHIQRLLDQGILVPCQSPWNTPLLPVKKPGTNDYRPVQDLREVNKRVEDIHPTVPNPYNLLSGLPPSHRWYTVLDLKDAFFCLRLHPTSQPLFAFEWRDPGMGISGQLTWTRLPQGFKNSPTLFNEALHRDLADFRIQHPDLILLQYVDDILLAATSELDCQQGTRALLLTLGNLGYRASAKKAQLCQKQVKYLGYLLKEGQRWLTEARKETVMGQPTPKTPRQLREFLGKAGFCRLFIPGFAEMAAPLYPLTKPGTLFNWGPDQQKAYQEIKQALLTAPALGLPDLTKPFELFVDEKQGYAKGVLTQKLGPWRRPVAYLSKKLDPVAAGWPPCLRMVAAIAVLRKDAGKLTMGQPLVILAPHAVEALVKQPPDRWLSNARMTHYQAMLLDTDRVQFGPVVALNPATLLPLPEEGAPHDCLEILAETHGTRPDLTDQPIPDADHTWYTDGSSFLQEGQRKAGAAVTTETEVIWARALPAGTSAQRAELIALTQALKMAEGKRLNVYTDSRYAFATAHIHGEIYRRRGWLTSEGREIKNKSEILALLKALFLPKRLSIIHCLGHQKGDSAEARGNRLADQAAREAAIKTPPDTSTLLAGKRTADGSEFEKRTADGSEFESPKKKAKVE

SEQ ID NO: 1929 - protein, 2096 aa, synthetic construct
MPAAKRVKLDGGDKKYSIGLDIGTNSVGWAVITDEYKVPSKKFKVLGNTDRHSIKKNLIGALLFDSGETAEATRLKRTARRRYTRRKNRICYLQEIFSNEMAKVDDSFFHRLEESFLVEEDKKHERHPIFGNIVDEVAYHEKYPTIYHLRKKLVDSTDKADLRLIYLALAHMIKFRGHFLIEGDLNPDNSDVDKLFIQLVQTYNQLFEENPINASGVDAKAILSARLSKSRRLENLIAQLPGEKKNGLFGNLIALSLGLTPNFKSNFDLAEDAKLQLSKDTYDDDLDNLLAQIGDQYADLFLAAKNLSDAILLSDILRVNTEITKAPLSASMIKRYDEHHQDLTLLKALVRQQLPEKYKEIFFDQSKNGYAGYIDGGASQEEFYKFIKPILEKMDGTEELLVKLNREDLLRKQRTFDNGSIPHQIHLGELHAILRRQEDFYPFLKDNREKIEKILTFRIPYYVGPLARGNSRFAWMTRKSEETITPWNFEEVVDKGASAQSFIERMTNFDKNLPNEKVLPKHSLLYEYFTVYNELTKVKYVTEGMRKPAFLSGEQKKAIVDLLFKTNRKVTVKQLKEDYFKKIECFDSVEISGVEDRFNASLGTYHDLLKIIKDKDFLDNEENEDILEDIVLTLTLFEDREMIEERLKTYAHLFDDKVMKQLKRRRYTGWGRLSRKLINGIRDKQSGKTILDFLKSDGFANRNFMQLIHDDSLTFKEDIQKAQVSGQGDSLHEHIANLAGSPAIKKGILQTVKVVDELVKVMGRHKPENIVIEMARENQTTQKGQKNSRERMKRIEEGIKELGSQILKEHPVENTQLQNEKLYLYYLQNGRDMYVDQELDINRLSDYDVDHIVPQSFLKDDSIDNKVLTRSDKARGKSDNVPSEEVVKKMKNYWRQLLNAKLITQRKFDNLTKAERGGLSELDKAGFIKRQLVETRQITKHVAQILDSRMNTKYDENDKLIREVKVITLKSKLVSDFRKDFQFYKVREINNYHHAHDAYLNAVVGTALIKKYPKLESEFVYGDYKVYDVRKMIAKSEQEIGKATAKYFFYSNIMNFFKTEITLANGEIRKRPLIETNGETGEIVWDKGRDFATVRKVLSMPQVNIVKKTEVQTGGFSKESILPKRNSDKLIARKKDWDPKKYGGFDSPTVAYSVLVVAKVEKGKSKKLKSVKELLGITIMERSSFEKNPIDFLEAKGYKEVKKDLIIKLPKYSLFELENGRKRMLASAGELQKGNELALPSKYVNFLYLASHYEKLKGSPEDNEQKQLFVEQHKHYLDEIIEQISEFSKRVILADANLDKVLSAYNKHRDKPIREQAENIIHLFTLTNLGAPAAFKYFDTTIDRKRYTSTKEVLDATLIHQSITGLYETRIDLSQLGGDGGGGGPAPEAAAKGGTLNLEDEYRLYETSAEPEVSPGSTWLSDFPQAWAETGGMGLAVRQAPLIIPLKATSTPVSIKQYPMSQEAKLGIKPHIQRLLDQGILVPCQSPWNTPLLPVKKPGTNDYRPVQDLREVNKRVEDIHPTVPNPYNLLSGLPPSHRWYTVLDLKDAFFCLRLHPTSQPLFAFEWRDPGMGISGQLTWTRLPQGFKNSPTLFNEALHRDLADFRIQHPDLILLQYVDDILLAATSELDCQQGTRALLLTLGNLGYRASAKKAQLCQKQVKYLGYLLKEGQRWLTEARKETVMGQPTPKTPRQLREFLGKAGFCRLFIPGFAEMAAPLYPLTKPGTLFNWGPDQQKAYQEIKQALLTAPALGLPDLTKPFELFVDEKQGYAKGVLTQKLGPWRRPVAYLSKKLDPVAAGWPPCLRMVAAIAVLRKDAGKLTMGQPLVILAPHAVEALVKQPPDRWLSNARMTHYQAMLLDTDRVQFGPVVALNPATLLPLPEEGAPHDCLEILAETHGTRPDLTDQPIPDADHTWYTDGSSFLQEGQRKAGAAVTTETEVIWARALPAGTSAQRAELIALTQALKMAEGKRLNVYTDSRYAFATAHIHGEIYRRRGWLTSEGREIKNKSEILALLKALFLPKRLSIIHCLGHQKGDSAEARGNRLADQAAREAAIKTPPDTSTLLAGKRTADGSEFEKRTADGSEFESPKKKAKVE

SEQ ID NO: 1930 - protein, 2091 aa, synthetic construct
MPAAKRVKLDGGDKKYSIGLDIGTNSVGWAVITDEYKVPSKKFKVLGNTDRHSIKKNLIGALLFDSGETAEATRLKRTARRRYTRRKNRICYLQEIFSNEMAKVDDSFFHRLEESFLVEEDKKHERHPIFGNIVDEVAYHEKYPTIYHLRKKLVDSTDKADLRLIYLALAHMIKFRGHFLIEGDLNPDNSDVDKLFIQLVQTYNQLFEENPINASGVDAKAILSARLSKSRRLENLIAQLPGEKKNGLFGNLIALSLGLTPNFKSNFDLAEDAKLQLSKDTYDDDLDNLLAQIGDQYADLFLAAKNLSDAILLSDILRVNTEITKAPLSASMIKRYDEHHQDLTLLKALVRQQLPEKYKEIFFDQSKNGYAGYIDGGASQEEFYKFIKPILEKMDGTEELLVKLNREDLLRKQRTFDNGSIPHQIHLGELHAILRRQEDFYPFLKDNREKIEKILTFRIPYYVGPLARGNSRFAWMTRKSEETITPWNFEEVVDKGASAQSFIERMTNFDKNLPNEKVLPKHSLLYEYFTVYNELTKVKYVTEGMRKPAFLSGEQKKAIVDLLFKTNRKVTVKQLKEDYFKKIECFDSVEISGVEDRFNASLGTYHDLLKIIKDKDFLDNEENEDILEDIVLTLTLFEDREMIEERLKTYAHLFDDKVMKQLKRRRYTGWGRLSRKLINGIRDKQSGKTILDFLKSDGFANRNFMQLIHDDSLTFKEDIQKAQVSGQGDSLHEHIANLAGSPAIKKGILQTVKVVDELVKVMGRHKPENIVIEMARENQTTQKGQKNSRERMKRIEEGIKELGSQILKEHPVENTQLQNEKLYLYYLQNGRDMYVDQELDINRLSDYDVDHIVPQSFLKDDSIDNKVLTRSDKARGKSDNVPSEEVVKKMKNYWRQLLNAKLITQRKFDNLTKAERGGLSELDKAGFIKRQLVETRQITKHVAQILDSRMNTKYDENDKLIREVKVITLKSKLVSDFRKDFQFYKVREINNYHHAHDAYLNAVVGTALIKKYPKLESEFVYGDYKVYDVRKMIAKSEQEIGKATAKYFFYSNIMNFFKTEITLANGEIRKRPLIETNGETGEIVWDKGRDFATVRKVLSMPQVNIVKKTEVQTGGFSKESILPKRNSDKLIARKKDWDPKKYGGFDSPTVAYSVLVVAKVEKGKSKKLKSVKELLGITIMERSSFEKNPIDFLEAKGYKEVKKDLIIKLPKYSLFELENGRKRMLASAGELQKGNELALPSKYVNFLYLASHYEKLKGSPEDNEQKQLFVEQHKHYLDEIIEQISEFSKRVILADANLDKVLSAYNKHRDKPIREQAENIIHLFTLTNLGAPAAFKYFDTTIDRKRYTSTKEVLDATLIHQSITGLYETRIDLSQLGGDGGGGGGSSGGTLNLEDEYRLYETSAEPEVSPGSTWLSDFPQAWAETGGMGLAVRQAPLIIPLKATSTPVSIKQYPMSQEAKLGIKPHIQRLLDQGILVPCQSPWNTPLLPVKKPGTNDYRPVQDLREVNKRVEDIHPTVPNPYNLLSGLPPSHRWYTVLDLKDAFFCLRLHPTSQPLFAFEWRDPGMGISGQLTWTRLPQGFKNSPTLFNEALHRDLADFRIQHPDLILLQYVDDILLAATSELDCQQGTRALLLTLGNLGYRASAKKAQLCQKQVKYLGYLLKEGQRWLTEARKETVMGQPTPKTPRQLREFLGKAGFCRLFIPGFAEMAAPLYPLTKPGTLFNWGPDQQKAYQEIKQALLTAPALGLPDLTKPFELFVDEKQGYAKGVLTQKLGPWRRPVAYLSKKLDPVAAGWPPCLRMVAAIAVLRKDAGKLTMGQPLVILAPHAVEALVKQPPDRWLSNARMTHYQAMLLDTDRVQFGPVVALNPATLLPLPEEGAPHDCLEILAETHGTRPDLTDQPIPDADHTWYTDGSSFLQEGQRKAGAAVTTETEVIWARALPAGTSAQRAELIALTQALKMAEGKRLNVYTDSRYAFATAHIHGEIYRRRGWLTSEGREIKNKSEILALLKALFLPKRLSIIHCLGHQKGDSAEARGNRLADQAAREAAIKTPPDTSTLLAGKRTADGSEFEKRTADGSEFESPKKKAKVE

SEQ ID NO: 1931 - protein, 2091 aa, synthetic construct
MPAAKRVKLDGGDKKYSIGLDIGTNSVGWAVITDEYKVPSKKFKVLGNTDRHSIKKNLIGALLFDSGETAEATRLKRTARRRYTRRKNRICYLQEIFSNEMAKVDDSFFHRLEESFLVEEDKKHERHPIFGNIVDEVAYHEKYPTIYHLRKKLVDSTDKADLRLIYLALAHMIKFRGHFLIEGDLNPDNSDVDKLFIQLVQTYNQLFEENPINASGVDAKAILSARLSKSRRLENLIAQLPGEKKNGLFGNLIALSLGLTPNFKSNFDLAEDAKLQLSKDTYDDDLDNLLAQIGDQYADLFLAAKNLSDAILLSDILRVNTEITKAPLSASMIKRYDEHHQDLTLLKALVRQQLPEKYKEIFFDQSKNGYAGYIDGGASQEEFYKFIKPILEKMDGTEELLVKLNREDLLRKQRTFDNGSIPHQIHLGELHAILRRQEDFYPFLKDNREKIEKILTFRIPYYVGPLARGNSRFAWMTRKSEETITPWNFEEVVDKGASAQSFIERMTNFDKNLPNEKVLPKHSLLYEYFTVYNELTKVKYVTEGMRKPAFLSGEQKKAIVDLLFKTNRKVTVKQLKEDYFKKIECFDSVEISGVEDRFNASLGTYHDLLKIIKDKDFLDNEENEDILEDIVLTLTLFEDREMIEERLKTYAHLFDDKVMKQLKRRRYTGWGRLSRKLINGIRDKQSGKTILDFLKSDGFANRNFMQLIHDDSLTFKEDIQKAQVSGQGDSLHEHIANLAGSPAIKKGILQTVKVVDELVKVMGRHKPENIVIEMARENQTTQKGQKNSRERMKRIEEGIKELGSQILKEHPVENTQLQNEKLYLYYLQNGRDMYVDQELDINRLSDYDVDHIVPQSFLKDDSIDNKVLTRSDKARGKSDNVPSEEVVKKMKNYWRQLLNAKLITQRKFDNLTKAERGGLSELDKAGFIKRQLVETRQITKHVAQILDSRMNTKYDENDKLIREVKVITLKSKLVSDFRKDFQFYKVREINNYHHAHDAYLNAVVGTALIKKYPKLESEFVYGDYKVYDVRKMIAKSEQEIGKATAKYFFYSNIMNFFKTEITLANGEIRKRPLIETNGETGEIVWDKGRDFATVRKVLSMPQVNIVKKTEVQTGGFSKESILPKRNSDKLIARKKDWDPKKYGGFDSPTVAYSVLVVAKVEKGKSKKLKSVKELLGITIMERSSFEKNPIDFLEAKGYKEVKKDLIIKLPKYSLFELENGRKRMLASAGELQKGNELALPSKYVNFLYLASHYEKLKGSPEDNEQKQLFVEQHKHYLDEIIEQISEFSKRVILADANLDKVLSAYNKHRDKPIREQAENIIHLFTLTNLGAPAAFKYFDTTIDRKRYTSTKEVLDATLIHQSITGLYETRIDLSQLGGDGGGSSGGSGGTLNLEDEYRLYETSAEPEVSPGSTWLSDFPQAWAETGGMGLAVRQAPLIIPLKATSTPVSIKQYPMSQEAKLGIKPHIQRLLDQGILVPCQSPWNTPLLPVKKPGTNDYRPVQDLREVNKRVEDIHPTVPNPYNLLSGLPPSHRWYTVLDLKDAFFCLRLHPTSQPLFAFEWRDPGMGISGQLTWTRLPQGFKNSPTLFNEALHRDLADFRIQHPDLILLQYVDDILLAATSELDCQQGTRALLLTLGNLGYRASAKKAQLCQKQVKYLGYLLKEGQRWLTEARKETVMGQPTPKTPRQLREFLGKAGFCRLFIPGFAEMAAPLYPLTKPGTLFNWGPDQQKAYQEIKQALLTAPALGLPDLTKPFELFVDEKQGYAKGVLTQKLGPWRRPVAYLSKKLDPVAAGWPPCLRMVAAIAVLRKDAGKLTMGQPLVILAPHAVEALVKQPPDRWLSNARMTHYQAMLLDTDRVQFGPVVALNPATLLPLPEEGAPHDCLEILAETHGTRPDLTDQPIPDADHTWYTDGSSFLQEGQRKAGAAVTTETEVIWARALPAGTSAQRAELIALTQALKMAEGKRLNVYTDSRYAFATAHIHGEIYRRRGWLTSEGREIKNKSEILALLKALFLPKRLSIIHCLGHQKGDSAEARGNRLADQAAREAAIKTPPDTSTLLAGKRTADGSEFEKRTADGSEFESPKKKAKVE

SEQ ID NO: 1932 - protein, 2094 aa, synthetic construct
MPAAKRVKLDGGDKKYSIGLDIGTNSVGWAVITDEYKVPSKKFKVLGNTDRHSIKKNLIGALLFDSGETAEATRLKRTARRRYTRRKNRICYLQEIFSNEMAKVDDSFFHRLEESFLVEEDKKHERHPIFGNIVDEVAYHEKYPTIYHLRKKLVDSTDKADLRLIYLALAHMIKFRGHFLIEGDLNPDNSDVDKLFIQLVQTYNQLFEENPINASGVDAKAILSARLSKSRRLENLIAQLPGEKKNGLFGNLIALSLGLTPNFKSNFDLAEDAKLQLSKDTYDDDLDNLLAQIGDQYADLFLAAKNLSDAILLSDILRVNTEITKAPLSASMIKRYDEHHQDLTLLKALVRQQLPEKYKEIFFDQSKNGYAGYIDGGASQEEFYKFIKPILEKMDGTEELLVKLNREDLLRKQRTFDNGSIPHQIHLGELHAILRRQEDFYPFLKDNREKIEKILTFRIPYYVGPLARGNSRFAWMTRKSEETITPWNFEEVVDKGASAQSFIERMTNFDKNLPNEKVLPKHSLLYEYFTVYNELTKVKYVTEGMRKPAFLSGEQKKAIVDLLFKTNRKVTVKQLKEDYFKKIECFDSVEISGVEDRFNASLGTYHDLLKIIKDKDFLDNEENEDILEDIVLTLTLFEDREMIEERLKTYAHLFDDKVMKQLKRRRYTGWGRLSRKLINGIRDKQSGKTILDFLKSDGFANRNFMQLIHDDSLTFKEDIQKAQVSGQGDSLHEHIANLAGSPAIKKGILQTVKVVDELVKVMGRHKPENIVIEMARENQTTQKGQKNSRERMKRIEEGIKELGSQILKEHPVENTQLQNEKLYLYYLQNGRDMYVDQELDINRLSDYDVDHIVPQSFLKDDSIDNKVLTRSDKARGKSDNVPSEEVVKKMKNYWRQLLNAKLITQRKFDNLTKAERGGLSELDKAGFIKRQLVETRQITKHVAQILDSRMNTKYDENDKLIREVKVITLKSKLVSDFRKDFQFYKVREINNYHHAHDAYLNAVVGTALIKKYPKLESEFVYGDYKVYDVRKMIAKSEQEIGKATAKYFFYSNIMNFFKTEITLANGEIRKRPLIETNGETGEIVWDKGRDFATVRKVLSMPQVNIVKKTEVQTGGFSKESILPKRNSDKLIARKKDWDPKKYGGFDSPTVAYSVLVVAKVEKGKSKKLKSVKELLGITIMERSSFEKNPIDFLEAKGYKEVKKDLIIKLPKYSLFELENGRKRMLASAGELQKGNELALPSKYVNFLYLASHYEKLKGSPEDNEQKQLFVEQHKHYLDEIIEQISEFSKRVILADANLDKVLSAYNKHRDKPIREQAENIIHLFTLTNLGAPAAFKYFDTTIDRKRYTSTKEVLDATLIHQSITGLYETRIDLSQLGGDGGGSSGGSGGGGGTLNLEDEYRLYETSAEPEVSPGSTWLSDFPQAWAETGGMGLAVRQAPLIIPLKATSTPVSIKQYPMSQEAKLGIKPHIQRLLDQGILVPCQSPWNTPLLPVKKPGTNDYRPVQDLREVNKRVEDIHPTVPNPYNLLSGLPPSHRWYTVLDLKDAFFCLRLHPTSQPLFAFEWRDPGMGISGQLTWTRLPQGFKNSPTLFNEALHRDLADFRIQHPDLILLQYVDDILLAATSELDCQQGTRALLLTLGNLGYRASAKKAQLCQKQVKYLGYLLKEGQRWLTEARKETVMGQPTPKTPRQLREFLGKAGFCRLFIPGFAEMAAPLYPLTKPGTLFNWGPDQQKAYQEIKQALLTAPALGLPDLTKPFELFVDEKQGYAKGVLTQKLGPWRRPVAYLSKKLDPVAAGWPPCLRMVAAIAVLRKDAGKLTMGQPLVILAPHAVEALVKQPPDRWLSNARMTHYQAMLLDTDRVQFGPVVALNPATLLPLPEEGAPHDCLEILAETHGTRPDLTDQPIPDADHTWYTDGSSFLQEGQRKAGAAVTTETEVIWARALPAGTSAQRAELIALTQALKMAEGKRLNVYTDSRYAFATAHIHGEIYRRRGWLTSEGREIKNKSEILALLKALFLPKRLSIIHCLGHQKGDSAEARGNRLADQAAREAAIKTPPDTSTLLAGKRTADGSEFEKRTADGSEFESPKKKAKVE

SEQ ID NO: 1933 - protein, 2092 aa, synthetic construct
MPAAKRVKLDGGDKKYSIGLDIGTNSVGWAVITDEYKVPSKKFKVLGNTDRHSIKKNLIGALLFDSGETAEATRLKRTARRRYTRRKNRICYLQEIFSNEMAKVDDSFFHRLEESFLVEEDKKHERHPIFGNIVDEVAYHEKYPTIYHLRKKLVDSTDKADLRLIYLALAHMIKFRGHFLIEGDLNPDNSDVDKLFIQLVQTYNQLFEENPINASGVDAKAILSARLSKSRRLENLIAQLPGEKKNGLFGNLIALSLGLTPNFKSNFDLAEDAKLQLSKDTYDDDLDNLLAQIGDQYADLFLAAKNLSDAILLSDILRVNTEITKAPLSASMIKRYDEHHQDLTLLKALVRQQLPEKYKEIFFDQSKNGYAGYIDGGASQEEFYKFIKPILEKMDGTEELLVKLNREDLLRKQRTFDNGSIPHQIHLGELHAILRRQEDFYPFLKDNREKIEKILTFRIPYYVGPLARGNSRFAWMTRKSEETITPWNFEEVVDKGASAQSFIERMTNFDKNLPNEKVLPKHSLLYEYFTVYNELTKVKYVTEGMRKPAFLSGEQKKAIVDLLFKTNRKVTVKQLKEDYFKKIECFDSVEISGVEDRFNASLGTYHDLLKIIKDKDFLDNEENEDILEDIVLTLTLFEDREMIEERLKTYAHLFDDKVMKQLKRRRYTGWGRLSRKLINGIRDKQSGKTILDFLKSDGFANRNFMQLIHDDSLTFKEDIQKAQVSGQGDSLHEHIANLAGSPAIKKGILQTVKVVDELVKVMGRHKPENIVIEMARENQTTQKGQKNSRERMKRIEEGIKELGSQILKEHPVENTQLQNEKLYLYYLQNGRDMYVDQELDINRLSDYDVDHIVPQSFLKDDSIDNKVLTRSDKARGKSDNVPSEEVVKKMKNYWRQLLNAKLITQRKFDNLTKAERGGLSELDKAGFIKRQLVETRQITKHVAQILDSRMNTKYDENDKLIREVKVITLKSKLVSDFRKDFQFYKVREINNYHHAHDAYLNAVVGTALIKKYPKLESEFVYGDYKVYDVRKMIAKSEQEIGKATAKYFFYSNIMNFFKTEITLANGEIRKRPLIETNGETGEIVWDKGRDFATVRKVLSMPQVNIVKKTEVQTGGFSKESILPKRNSDKLIARKKDWDPKKYGGFDSPTVAYSVLVVAKVEKGKSKKLKSVKELLGITIMERSSFEKNPIDFLEAKGYKEVKKDLIIKLPKYSLFELENGRKRMLASAGELQKGNELALPSKYVNFLYLASHYEKLKGSPEDNEQKQLFVEQHKHYLDEIIEQISEFSKRVILADANLDKVLSAYNKHRDKPIREQAENIIHLFTLTNLGAPAAFKYFDTTIDRKRYTSTKEVLDATLIHQSITGLYETRIDLSQLGGDGGPAPAPAPGGTLNLEDEYRLYETSAEPEVSPGSTWLSDFPQAWAETGGMGLAVRQAPLIIPLKATSTPVSIKQYPMSQEAKLGIKPHIQRLLDQGILVPCQSPWNTPLLPVKKPGTNDYRPVQDLREVNKRVEDIHPTVPNPYNLLSGLPPSHRWYTVLDLKDAFFCLRLHPTSQPLFAFEWRDPGMGISGQLTWTRLPQGFKNSPTLFNEALHRDLADFRIQHPDLILLQYVDDILLAATSELDCQQGTRALLLTLGNLGYRASAKKAQLCQKQVKYLGYLLKEGQRWLTEARKETVMGQPTPKTPRQLREFLGKAGFCRLFIPGFAEMAAPLYPLTKPGTLFNWGPDQQKAYQEIKQALLTAPALGLPDLTKPFELFVDEKQGYAKGVLTQKLGPWRRPVAYLSKKLDPVAAGWPPCLRMVAAIAVLRKDAGKLTMGQPLVILAPHAVEALVKQPPDRWLSNARMTHYQAMLLDTDRVQFGPVVALNPATLLPLPEEGAPHDCLEILAETHGTRPDLTDQPIPDADHTWYTDGSSFLQEGQRKAGAAVTTETEVIWARALPAGTSAQRAELIALTQALKMAEGKRLNVYTDSRYAFATAHIHGEIYRRRGWLTSEGREIKNKSEILALLKALFLPKRLSIIHCLGHQKGDSAEARGNRLADQAAREAAIKTPPDTSTLLAGKRTADGSEFEKRTADGSEFESPKKKAKVE

SEQ ID NO: 1934 - protein, 2102 aa, synthetic construct
MPAAKRVKLDGGDKKYSIGLDIGTNSVGWAVITDEYKVPSKKFKVLGNTDRHSIKKNLIGALLFDSGETAEATRLKRTARRRYTRRKNRICYLQEIFSNEMAKVDDSFFHRLEESFLVEEDKKHERHPIFGNIVDEVAYHEKYPTIYHLRKKLVDSTDKADLRLIYLALAHMIKFRGHFLIEGDLNPDNSDVDKLFIQLVQTYNQLFEENPINASGVDAKAILSARLSKSRRLENLIAQLPGEKKNGLFGNLIALSLGLTPNFKSNFDLAEDAKLQLSKDTYDDDLDNLLAQIGDQYADLFLAAKNLSDAILLSDILRVNTEITKAPLSASMIKRYDEHHQDLTLLKALVRQQLPEKYKEIFFDQSKNGYAGYIDGGASQEEFYKFIKPILEKMDGTEELLVKLNREDLLRKQRTFDNGSIPHQIHLGELHAILRRQEDFYPFLKDNREKIEKILTFRIPYYVGPLARGNSRFAWMTRKSEETITPWNFEEVVDKGASAQSFIERMTNFDKNLPNEKVLPKHSLLYEYFTVYNELTKVKYVTEGMRKPAFLSGEQKKAIVDLLFKTNRKVTVKQLKEDYFKKIECFDSVEISGVEDRFNASLGTYHDLLKIIKDKDFLDNEENEDILEDIVLTLTLFEDREMIEERLKTYAHLFDDKVMKQLKRRRYTGWGRLSRKLINGIRDKQSGKTILDFLKSDGFANRNFMQLIHDDSLTFKEDIQKAQVSGQGDSLHEHIANLAGSPAIKKGILQTVKVVDELVKVMGRHKPENIVIEMARENQTTQKGQKNSRERMKRIEEGIKELGSQILKEHPVENTQLQNEKLYLYYLQNGRDMYVDQELDINRLSDYDVDHIVPQSFLKDDSIDNKVLTRSDKARGKSDNVPSEEVVKKMKNYWRQLLNAKLITQRKFDNLTKAERGGLSELDKAGFIKRQLVETRQITKHVAQILDSRMNTKYDENDKLIREVKVITLKSKLVSDFRKDFQFYKVREINNYHHAHDAYLNAVVGTALIKKYPKLESEFVYGDYKVYDVRKMIAKSEQEIGKATAKYFFYSNIMNFFKTEITLANGEIRKRPLIETNGETGEIVWDKGRDFATVRKVLSMPQVNIVKKTEVQTGGFSKESILPKRNSDKLIARKKDWDPKKYGGFDSPTVAYSVLVVAKVEKGKSKKLKSVKELLGITIMERSSFEKNPIDFLEAKGYKEVKKDLIIKLPKYSLFELENGRKRMLASAGELQKGNELALPSKYVNFLYLASHYEKLKGSPEDNEQKQLFVEQHKHYLDEIIEQISEFSKRVILADANLDKVLSAYNKHRDKPIREQAENIIHLFTLTNLGAPAAFKYFDTTIDRKRYTSTKEVLDATLIHQSITGLYETRIDLSQLGGDGGPAPAPAPAPAPGGTVSLQDEHRLFDIPVTTSLPDVWLQDFPQAWAETGGLGRAKCQAPIIIDLKPTAVPVSIKQYPMSLEAHMGIRQHIIKFLELGVLRPCRSPWNTPLLPVKKPGTQDYRPVQDLREINKRTVDIHPTVPNPYNLLSTLKPDYSWYTVLDLKDAFFCLPLAPQSQELFAFEWKDPERGISGQLTWTRLPQGFKNSPTLFNEALHRDLTDFRTQHPEVTLLQYVDDLLLAAPTKKACTQGTRHLLQELGEKGYRASAKKAQICQTKVTYLGYILSEGKRWLTPGRIETVARIPPPRNPREVREFLGKAGFCRLFIPGFAELAAPLYALTKPSTPFTWQTEHQLAFEALKKALLSAPALGLPDTSKPFTLFLDERQGIAKGVLTQKLGPWKRPVAYLSKKLDPVAAGWPPCLRIMAATAMLVKDSAKLTLGQPLTVITPHTLEAIVRQPPDRWITNARLTHYQALLLDTDRVQFGPPVTLNPATLLPVPENQPSPHDCRQVLAETHGTREDLKDQELPDADHTWYTDGSSYLDSGTRRAGAAVVDGHNTIWAQSLPPGTSAQKAELIALTKALELSKGKKANIYTDSRYAFATAHTHGSIYERRGWLTSEGKEIKNKAEIIALLKALFLPQEVAIIHCPGHQKGQDPVAVGNRQADRVARQAAMAEVLTLATEPDNTSHITAGKRTADGSEFEKRTADGSEFESPKKKAKVE

SEQ ID NO: 1935 - protein, 2102 aa, synthetic construct
MPAAKRVKLDGGDKKYSIGLDIGTNSVGWAVITDEYKVPSKKFKVLGNTDRHSIKKNLIGALLFDSGETAEATRLKRTARRRYTRRKNRICYLQEIFSNEMAKVDDSFFHRLEESFLVEEDKKHERHPIFGNIVDEVAYHEKYPTIYHLRKKLVDSTDKADLRLIYLALAHMIKFRGHFLIEGDLNPDNSDVDKLFIQLVQTYNQLFEENPINASGVDAKAILSARLSKSRRLENLIAQLPGEKKNGLFGNLIALSLGLTPNFKSNFDLAEDAKLQLSKDTYDDDLDNLLAQIGDQYADLFLAAKNLSDAILLSDILRVNTEITKAPLSASMIKRYDEHHQDLTLLKALVRQQLPEKYKEIFFDQSKNGYAGYIDGGASQEEFYKFIKPILEKMDGTEELLVKLNREDLLRKQRTFDNGSIPHQIHLGELHAILRRQEDFYPFLKDNREKIEKILTFRIPYYVGPLARGNSRFAWMTRKSEETITPWNFEEVVDKGASAQSFIERMTNFDKNLPNEKVLPKHSLLYEYFTVYNELTKVKYVTEGMRKPAFLSGEQKKAIVDLLFKTNRKVTVKQLKEDYFKKIECFDSVEISGVEDRFNASLGTYHDLLKIIKDKDFLDNEENEDILEDIVLTLTLFEDREMIEERLKTYAHLFDDKVMKQLKRRRYTGWGRLSRKLINGIRDKQSGKTILDFLKSDGFANRNFMQLIHDDSLTFKEDIQKAQVSGQGDSLHEHIANLAGSPAIKKGILQTVKVVDELVKVMGRHKPENIVIEMARENQTTQKGQKNSRERMKRIEEGIKELGSQILKEHPVENTQLQNEKLYLYYLQNGRDMYVDQELDINRLSDYDVDHIVPQSFLKDDSIDNKVLTRSDKARGKSDNVPSEEVVKKMKNYWRQLLNAKLITQRKFDNLTKAERGGLSELDKAGFIKRQLVETRQITKHVAQILDSRMNTKYDENDKLIREVKVITLKSKLVSDFRKDFQFYKVREINNYHHAHDAYLNAVVGTALIKKYPKLESEFVYGDYKVYDVRKMIAKSEQEIGKATAKYFFYSNIMNFFKTEITLANGEIRKRPLIETNGETGEIVWDKGRDFATVRKVLSMPQVNIVKKTEVQTGGFSKESILPKRNSDKLIARKKDWDPKKYGGFDSPTVAYSVLVVAKVEKGKSKKLKSVKELLGITIMERSSFEKNPIDFLEAKGYKEVKKDLIIKLPKYSLFELENGRKRMLASAGELQKGNELALPSKYVNFLYLASHYEKLKGSPEDNEQKQLFVEQHKHYLDEIIEQISEFSKRVILADANLDKVLSAYNKHRDKPIREQAENIIHLFTLTNLGAPAAFKYFDTTIDRKRYTSTKEVLDATLIHQSITGLYETRIDLSQLGGDGGEAAAKGGSGGGGGTVSLQDEHRLFDIPVTTSLPDVWLQDFPQAWAETGGLGRAKCQAPIIIDLKPTAVPVSIKQYPMSLEAHMGIRQHIIKFLELGVLRPCRSPWNTPLLPVKKPGTQDYRPVQDLREINKRTVDIHPTVPNPYNLLSTLKPDYSWYTVLDLKDAFFCLPLAPQSQELFAFEWKDPERGISGQLTWTRLPQGFKNSPTLFNEALHRDLTDFRTQHPEVTLLQYVDDLLLAAPTKKACTQGTRHLLQELGEKGYRASAKKAQICQTKVTYLGYILSEGKRWLTPGRIETVARIPPPRNPREVREFLGKAGFCRLFIPGFAELAAPLYALTKPSTPFTWQTEHQLAFEALKKALLSAPALGLPDTSKPFTLFLDERQGIAKGVLTQKLGPWKRPVAYLSKKLDPVAAGWPPCLRIMAATAMLVKDSAKLTLGQPLTVITPHTLEAIVRQPPDRWITNARLTHYQALLLDTDRVQFGPPVTLNPATLLPVPENQPSPHDCRQVLAETHGTREDLKDQELPDADHTWYTDGSSYLDSGTRRAGAAVVDGHNTIWAQSLPPGTSAQKAELIALTKALELSKGKKANIYTDSRYAFATAHTHGSIYERRGWLTSEGKEIKNKAEIIALLKALFLPQEVAIIHCPGHQKGQDPVAVGNRQADRVARQAAMAEVLTLATEPDNTSHITAGKRTADGSEFEKRTADGSEFESPKKKAKVE

SEQ ID NO: 1936 - protein, 2121 aa, synthetic construct
MPAAKRVKLDGGDKKYSIGLDIGTNSVGWAVITDEYKVPSKKFKVLGNTDRHSIKKNLIGALLFDSGETAEATRLKRTARRRYTRRKNRICYLQEIFSNEMAKVDDSFFHRLEESFLVEEDKKHERHPIFGNIVDEVAYHEKYPTIYHLRKKLVDSTDKADLRLIYLALAHMIKFRGHFLIEGDLNPDNSDVDKLFIQLVQTYNQLFEENPINASGVDAKAILSARLSKSRRLENLIAQLPGEKKNGLFGNLIALSLGLTPNFKSNFDLAEDAKLQLSKDTYDDDLDNLLAQIGDQYADLFLAAKNLSDAILLSDILRVNTEITKAPLSASMIKRYDEHHQDLTLLKALVRQQLPEKYKEIFFDQSKNGYAGYIDGGASQEEFYKFIKPILEKMDGTEELLVKLNREDLLRKQRTFDNGSIPHQIHLGELHAILRRQEDFYPFLKDNREKIEKILTFRIPYYVGPLARGNSRFAWMTRKSEETITPWNFEEVVDKGASAQSFIERMTNFDKNLPNEKVLPKHSLLYEYFTVYNELTKVKYVTEGMRKPAFLSGEQKKAIVDLLFKTNRKVTVKQLKEDYFKKIECFDSVEISGVEDRFNASLGTYHDLLKIIKDKDFLDNEENEDILEDIVLTLTLFEDREMIEERLKTYAHLFDDKVMKQLKRRRYTGWGRLSRKLINGIRDKQSGKTILDFLKSDGFANRNFMQLIHDDSLTFKEDIQKAQVSGQGDSLHEHIANLAGSPAIKKGILQTVKVVDELVKVMGRHKPENIVIEMARENQTTQKGQKNSRERMKRIEEGIKELGSQILKEHPVENTQLQNEKLYLYYLQNGRDMYVDQELDINRLSDYDVDHIVPQSFLKDDSIDNKVLTRSDKARGKSDNVPSEEVVKKMKNYWRQLLNAKLITQRKFDNLTKAERGGLSELDKAGFIKRQLVETRQITKHVAQILDSRMNTKYDENDKLIREVKVITLKSKLVSDFRKDFQFYKVREINNYHHAHDAYLNAVVGTALIKKYPKLESEFVYGDYKVYDVRKMIAKSEQEIGKATAKYFFYSNIMNFFKTEITLANGEIRKRPLIETNGETGEIVWDKGRDFATVRKVLSMPQVNIVKKTEVQTGGFSKESILPKRNSDKLIARKKDWDPKKYGGFDSPTVAYSVLVVAKVEKGKSKKLKSVKELLGITIMERSSFEKNPIDFLEAKGYKEVKKDLIIKLPKYSLFELENGRKRMLASAGELQKGNELALPSKYVNFLYLASHYEKLKGSPEDNEQKQLFVEQHKHYLDEIIEQISEFSKRVILADANLDKVLSAYNKHRDKPIREQAENIIHLFTLTNLGAPAAFKYFDTTIDRKRYTSTKEVLDATLIHQSITGLYETRIDLSQLGGDGGGGGGSGGGGSGGGGSGGGGSGGGGSGGGGSGGTVSLQDEHRLFDIPVTTSLPDVWLQDFPQAWAETGGLGRAKCQAPIIIDLKPTAVPVSIKQYPMSLEAHMGIRQHIIKFLELGVLRPCRSPWNTPLLPVKKPGTQDYRPVQDLREINKRTVDIHPTVPNPYNLLSTLKPDYSWYTVLDLKDAFFCLPLAPQSQELFAFEWKDPERGISGQLTWTRLPQGFKNSPTLFNEALHRDLTDFRTQHPEVTLLQYVDDLLLAAPTKKACTQGTRHLLQELGEKGYRASAKKAQICQTKVTYLGYILSEGKRWLTPGRIETVARIPPPRNPREVREFLGKAGFCRLFIPGFAELAAPLYALTKPSTPFTWQTEHQLAFEALKKALLSAPALGLPDTSKPFTLFLDERQGIAKGVLTQKLGPWKRPVAYLSKKLDPVAAGWPPCLRIMAATAMLVKDSAKLTLGQPLTVITPHTLEAIVRQPPDRWITNARLTHYQALLLDTDRVQFGPPVTLNPATLLPVPENQPSPHDCRQVLAETHGTREDLKDQELPDADHTWYTDGSSYLDSGTRRAGAAVVDGHNTIWAQSLPPGTSAQKAELIALTKALELSKGKKANIYTDSRYAFATAHTHGSIYERRGWLTSEGKEIKNKAEIIALLKALFLPQEVAIIHCPGHQKGQDPVAVGNRQADRVARQAAMAEVLTLATEPDNTSHITAGKRTADGSEFEKRTADGSEFESPKKKAKVE

SEQ ID NO: 1937 - protein, 2102 aa, synthetic construct
MPAAKRVKLDGGDKKYSIGLDIGTNSVGWAVITDEYKVPSKKFKVLGNTDRHSIKKNLIGALLFDSGETAEATRLKRTARRRYTRRKNRICYLQEIFSNEMAKVDDSFFHRLEESFLVEEDKKHERHPIFGNIVDEVAYHEKYPTIYHLRKKLVDSTDKADLRLIYLALAHMIKFRGHFLIEGDLNPDNSDVDKLFIQLVQTYNQLFEENPINASGVDAKAILSARLSKSRRLENLIAQLPGEKKNGLFGNLIALSLGLTPNFKSNFDLAEDAKLQLSKDTYDDDLDNLLAQIGDQYADLFLAAKNLSDAILLSDILRVNTEITKAPLSASMIKRYDEHHQDLTLLKALVRQQLPEKYKEIFFDQSKNGYAGYIDGGASQEEFYKFIKPILEKMDGTEELLVKLNREDLLRKQRTFDNGSIPHQIHLGELHAILRRQEDFYPFLKDNREKIEKILTFRIPYYVGPLARGNSRFAWMTRKSEETITPWNFEEVVDKGASAQSFIERMTNFDKNLPNEKVLPKHSLLYEYFTVYNELTKVKYVTEGMRKPAFLSGEQKKAIVDLLFKTNRKVTVKQLKEDYFKKIECFDSVEISGVEDRFNASLGTYHDLLKIIKDKDFLDNEENEDILEDIVLTLTLFEDREMIEERLKTYAHLFDDKVMKQLKRRRYTGWGRLSRKLINGIRDKQSGKTILDFLKSDGFANRNFMQLIHDDSLTFKEDIQKAQVSGQGDSLHEHIANLAGSPAIKKGILQTVKVVDELVKVMGRHKPENIVIEMARENQTTQKGQKNSRERMKRIEEGIKELGSQILKEHPVENTQLQNEKLYLYYLQNGRDMYVDQELDINRLSDYDVDHIVPQSFLKDDSIDNKVLTRSDKARGKSDNVPSEEVVKKMKNYWRQLLNAKLITQRKFDNLTKAERGGLSELDKAGFIKRQLVETRQITKHVAQILDSRMNTKYDENDKLIREVKVITLKSKLVSDFRKDFQFYKVREINNYHHAHDAYLNAVVGTALIKKYPKLESEFVYGDYKVYDVRKMIAKSEQEIGKATAKYFFYSNIMNFFKTEITLANGEIRKRPLIETNGETGEIVWDKGRDFATVRKVLSMPQVNIVKKTEVQTGGFSKESILPKRNSDKLIARKKDWDPKKYGGFDSPTVAYSVLVVAKVEKGKSKKLKSVKELLGITIMERSSFEKNPIDFLEAKGYKEVKKDLIIKLPKYSLFELENGRKRMLASAGELQKGNELALPSKYVNFLYLASHYEKLKGSPEDNEQKQLFVEQHKHYLDEIIEQISEFSKRVILADANLDKVLSAYNKHRDKPIREQAENIIHLFTLTNLGAPAAFKYFDTTIDRKRYTSTKEVLDATLIHQSITGLYETRIDLSQLGGDGGGGGGGSEAAAKGGTVSLQDEHRLFDIPVTTSLPDVWLQDFPQAWAETGGLGRAKCQAPIIIDLKPTAVPVSIKQYPMSLEAHMGIRQHIIKFLELGVLRPCRSPWNTPLLPVKKPGTQDYRPVQDLREINKRTVDIHPTVPNPYNLLSTLKPDYSWYTVLDLKDAFFCLPLAPQSQELFAFEWKDPERGISGQLTWTRLPQGFKNSPTLFNEALHRDLTDFRTQHPEVTLLQYVDDLLLAAPTKKACTQGTRHLLQELGEKGYRASAKKAQICQTKVTYLGYILSEGKRWLTPGRIETVARIPPPRNPREVREFLGKAGFCRLFIPGFAELAAPLYALTKPSTPFTWQTEHQLAFEALKKALLSAPALGLPDTSKPFTLFLDERQGIAKGVLTQKLGPWKRPVAYLSKKLDPVAAGWPPCLRIMAATAMLVKDSAKLTLGQPLTVITPHTLEAIVRQPPDRWITNARLTHYQALLLDTDRVQFGPPVTLNPATLLPVPENQPSPHDCRQVLAETHGTREDLKDQELPDADHTWYTDGSSYLDSGTRRAGAAVVDGHNTIWAQSLPPGTSAQKAELIALTKALELSKGKKANIYTDSRYAFATAHTHGSIYERRGWLTSEGKEIKNKAEIIALLKALFLPQEVAIIHCPGHQKGQDPVAVGNRQADRVARQAAMAEVLTLATEPDNTSHITAGKRTADGSEFEKRTADGSEFESPKKKAKVE

SEQ ID NO: 1938 - protein, 2102 aa, synthetic construct
MPAAKRVKLDGGDKKYSIGLDIGTNSVGWAVITDEYKVPSKKFKVLGNTDRHSIKKNLIGALLFDSGETAEATRLKRTARRRYTRRKNRICYLQEIFSNEMAKVDDSFFHRLEESFLVEEDKKHERHPIFGNIVDEVAYHEKYPTIYHLRKKLVDSTDKADLRLIYLALAHMIKFRGHFLIEGDLNPDNSDVDKLFIQLVQTYNQLFEENPINASGVDAKAILSARLSKSRRLENLIAQLPGEKKNGLFGNLIALSLGLTPNFKSNFDLAEDAKLQLSKDTYDDDLDNLLAQIGDQYADLFLAAKNLSDAILLSDILRVNTEITKAPLSASMIKRYDEHHQDLTLLKALVRQQLPEKYKEIFFDQSKNGYAGYIDGGASQEEFYKFIKPILEKMDGTEELLVKLNREDLLRKQRTFDNGSIPHQIHLGELHAILRRQEDFYPFLKDNREKIEKILTFRIPYYVGPLARGNSRFAWMTRKSEETITPWNFEEVVDKGASAQSFIERMTNFDKNLPNEKVLPKHSLLYEYFTVYNELTKVKYVTEGMRKPAFLSGEQKKAIVDLLFKTNRKVTVKQLKEDYFKKIECFDSVEISGVEDRFNASLGTYHDLLKIIKDKDFLDNEENEDILEDIVLTLTLFEDREMIEERLKTYAHLFDDKVMKQLKRRRYTGWGRLSRKLINGIRDKQSGKTILDFLKSDGFANRNFMQLIHDDSLTFKEDIQKAQVSGQGDSLHEHIANLAGSPAIKKGILQTVKVVDELVKVMGRHKPENIVIEMARENQTTQKGQKNSRERMKRIEEGIKELGSQILKEHPVENTQLQNEKLYLYYLQNGRDMYVDQELDINRLSDYDVDHIVPQSFLKDDSIDNKVLTRSDKARGKSDNVPSEEVVKKMKNYWRQLLNAKLITQRKFDNLTKAERGGLSELDKAGFIKRQLVETRQITKHVAQILDSRMNTKYDENDKLIREVKVITLKSKLVSDFRKDFQFYKVREINNYHHAHDAYLNAVVGTALIKKYPKLESEFVYGDYKVYDVRKMIAKSEQEIGKATAKYFFYSNIMNFFKTEITLANGEIRKRPLIETNGETGEIVWDKGRDFATVRKVLSMPQVNIVKKTEVQTGGFSKESILPKRNSDKLIARKKDWDPKKYGGFDSPTVAYSVLVVAKVEKGKSKKLKSVKELLGITIMERSSFEKNPIDFLEAKGYKEVKKDLIIKLPKYSLFELENGRKRMLASAGELQKGNELALPSKYVNFLYLASHYEKLKGSPEDNEQKQLFVEQHKHYLDEIIEQISEFSKRVILADANLDKVLSAYNKHRDKPIREQAENIIHLFTLTNLGAPAAFKYFDTTIDRKRYTSTKEVLDATLIHQSITGLYETRIDLSQLGGDGGGGGPAPEAAAKGGTVSLQDEHRLFDIPVTTSLPDVWLQDFPQAWAETGGLGRAKCQAPIIIDLKPTAVPVSIKQYPMSLEAHMGIRQHIIKFLELGVLRPCRSPWNTPLLPVKKPGTQDYRPVQDLREINKRTVDIHPTVPNPYNLLSTLKPDYSWYTVLDLKDAFFCLPLAPQSQELFAFEWKDPERGISGQLTWTRLPQGFKNSPTLFNEALHRDLTDFRTQHPEVTLLQYVDDLLLAAPTKKACTQGTRHLLQELGEKGYRASAKKAQICQTKVTYLGYILSEGKRWLTPGRIETVARIPPPRNPREVREFLGKAGFCRLFIPGFAELAAPLYALTKPSTPFTWQTEHQLAFEALKKALLSAPALGLPDTSKPFTLFLDERQGIAKGVLTQKLGPWKRPVAYLSKKLDPVAAGWPPCLRIMAATAMLVKDSAKLTLGQPLTVITPHTLEAIVRQPPDRWITNARLTHYQALLLDTDRVQFGPPVTLNPATLLPVPENQPSPHDCRQVLAETHGTREDLKDQELPDADHTWYTDGSSYLDSGTRRAGAAVVDGHNTIWAQSLPPGTSAQKAELIALTKALELSKGKKANIYTDSRYAFATAHTHGSIYERRGWLTSEGKEIKNKAEIIALLKALFLPQEVAIIHCPGHQKGQDPVAVGNRQADRVARQAAMAEVLTLATEPDNTSHITAGKRTADGSEFEKRTADGSEFESPKKKAKVE

SEQ ID NO: 1939 - protein, 2102 aa, synthetic construct
MPAAKRVKLDGGDKKYSIGLDIGTNSVGWAVITDEYKVPSKKFKVLGNTDRHSIKKNLIGALLFDSGETAEATRLKRTARRRYTRRKNRICYLQEIFSNEMAKVDDSFFHRLEESFLVEEDKKHERHPIFGNIVDEVAYHEKYPTIYHLRKKLVDSTDKADLRLIYLALAHMIKFRGHFLIEGDLNPDNSDVDKLFIQLVQTYNQLFEENPINASGVDAKAILSARLSKSRRLENLIAQLPGEKKNGLFGNLIALSLGLTPNFKSNFDLAEDAKLQLSKDTYDDDLDNLLAQIGDQYADLFLAAKNLSDAILLSDILRVNTEITKAPLSASMIKRYDEHHQDLTLLKALVRQQLPEKYKEIFFDQSKNGYAGYIDGGASQEEFYKFIKPILEKMDGTEELLVKLNREDLLRKQRTFDNGSIPHQIHLGELHAILRRQEDFYPFLKDNREKIEKILTFRIPYYVGPLARGNSRFAWMTRKSEETITPWNFEEVVDKGASAQSFIERMTNFDKNLPNEKVLPKHSLLYEYFTVYNELTKVKYVTEGMRKPAFLSGEQKKAIVDLLFKTNRKVTVKQLKEDYFKKIECFDSVEISGVEDRFNASLGTYHDLLKIIKDKDFLDNEENEDILEDIVLTLTLFEDREMIEERLKTYAHLFDDKVMKQLKRRRYTGWGRLSRKLINGIRDKQSGKTILDFLKSDGFANRNFMQLIHDDSLTFKEDIQKAQVSGQGDSLHEHIANLAGSPAIKKGILQTVKVVDELVKVMGRHKPENIVIEMARENQTTQKGQKNSRERMKRIEEGIKELGSQILKEHPVENTQLQNEKLYLYYLQNGRDMYVDQELDINRLSDYDVDHIVPQSFLKDDSIDNKVLTRSDKARGKSDNVPSEEVVKKMKNYWRQLLNAKLITQRKFDNLTKAERGGLSELDKAGFIKRQLVETRQITKHVAQILDSRMNTKYDENDKLIREVKVITLKSKLVSDFRKDFQFYKVREINNYHHAHDAYLNAVVGTALIKKYPKLESEFVYGDYKVYDVRKMIAKSEQEIGKATAKYFFYSNIMNFFKTEITLANGEIRKRPLIETNGETGEIVWDKGRDFATVRKVLSMPQVNIVKKTEVQTGGFSKESILPKRNSDKLIARKKDWDPKKYGGFDSPTVAYSVLVVAKVEKGKSKKLKSVKELLGITIMERSSFEKNPIDFLEAKGYKEVKKDLIIKLPKYSLFELENGRKRMLASAGELQKGNELALPSKYVNFLYLASHYEKLKGSPEDNEQKQLFVEQHKHYLDEIIEQISEFSKRVILADANLDKVLSAYNKHRDKPIREQAENIIHLFTLTNLGAPAAFKYFDTTIDRKRYTSTKEVLDATLIHQSITGLYETRIDLSQLGGDGGPAPGGSEAAAKGGTVSLQDEHRLFDIPVTTSLPDVWLQDFPQAWAETGGLGRAKCQAPIIIDLKPTAVPVSIKQYPMSLEAHMGIRQHIIKFLELGVLRPCRSPWNTPLLPVKKPGTQDYRPVQDLREINKRTVDIHPTVPNPYNLLSTLKPDYSWYTVLDLKDAFFCLPLAPQSQELFAFEWKDPERGISGQLTWTRLPQGFKNSPTLFNEALHRDLTDFRTQHPEVTLLQYVDDLLLAAPTKKACTQGTRHLLQELGEKGYRASAKKAQICQTKVTYLGYILSEGKRWLTPGRIETVARIPPPRNPREVREFLGKAGFCRLFIPGFAELAAPLYALTKPSTPFTWQTEHQLAFEALKKALLSAPALGLPDTSKPFTLFLDERQGIAKGVLTQKLGPWKRPVAYLSKKLDPVAAGWPPCLRIMAATAMLVKDSAKLTLGQPLTVITPHTLEAIVRQPPDRWITNARLTHYQALLLDTDRVQFGPPVTLNPATLLPVPENQPSPHDCRQVLAETHGTREDLKDQELPDADHTWYTDGSSYLDSGTRRAGAAVVDGHNTIWAQSLPPGTSAQKAELIALTKALELSKGKKANIYTDSRYAFATAHTHGSIYERRGWLTSEGKEIKNKAEIIALLKALFLPQEVAIIHCPGHQKGQDPVAVGNRQADRVARQAAMAEVLTLATEPDNTSHITAGKRTADGSEFEKRTADGSEFESPKKKAKVE

SEQ ID NO: 1940 - protein, 2097 aa, synthetic construct
MPAAKRVKLDGGDKKYSIGLDIGTNSVGWAVITDEYKVPSKKFKVLGNTDRHSIKKNLIGALLFDSGETAEATRLKRTARRRYTRRKNRICYLQEIFSNEMAKVDDSFFHRLEESFLVEEDKKHERHPIFGNIVDEVAYHEKYPTIYHLRKKLVDSTDKADLRLIYLALAHMIKFRGHFLIEGDLNPDNSDVDKLFIQLVQTYNQLFEENPINASGVDAKAILSARLSKSRRLENLIAQLPGEKKNGLFGNLIALSLGLTPNFKSNFDLAEDAKLQLSKDTYDDDLDNLLAQIGDQYADLFLAAKNLSDAILLSDILRVNTEITKAPLSASMIKRYDEHHQDLTLLKALVRQQLPEKYKEIFFDQSKNGYAGYIDGGASQEEFYKFIKPILEKMDGTEELLVKLNREDLLRKQRTFDNGSIPHQIHLGELHAILRRQEDFYPFLKDNREKIEKILTFRIPYYVGPLARGNSRFAWMTRKSEETITPWNFEEVVDKGASAQSFIERMTNFDKNLPNEKVLPKHSLLYEYFTVYNELTKVKYVTEGMRKPAFLSGEQKKAIVDLLFKTNRKVTVKQLKEDYFKKIECFDSVEISGVEDRFNASLGTYHDLLKIIKDKDFLDNEENEDILEDIVLTLTLFEDREMIEERLKTYAHLFDDKVMKQLKRRRYTGWGRLSRKLINGIRDKQSGKTILDFLKSDGFANRNFMQLIHDDSLTFKEDIQKAQVSGQGDSLHEHIANLAGSPAIKKGILQTVKVVDELVKVMGRHKPENIVIEMARENQTTQKGQKNSRERMKRIEEGIKELGSQILKEHPVENTQLQNEKLYLYYLQNGRDMYVDQELDINRLSDYDVDHIVPQSFLKDDSIDNKVLTRSDKARGKSDNVPSEEVVKKMKNYWRQLLNAKLITQRKFDNLTKAERGGLSELDKAGFIKRQLVETRQITKHVAQILDSRMNTKYDENDKLIREVKVITLKSKLVSDFRKDFQFYKVREINNYHHAHDAYLNAVVGTALIKKYPKLESEFVYGDYKVYDVRKMIAKSEQEIGKATAKYFFYSNIMNFFKTEITLANGEIRKRPLIETNGETGEIVWDKGRDFATVRKVLSMPQVNIVKKTEVQTGGFSKESILPKRNSDKLIARKKDWDPKKYGGFDSPTVAYSVLVVAKVEKGKSKKLKSVKELLGITIMERSSFEKNPIDFLEAKGYKEVKKDLIIKLPKYSLFELENGRKRMLASAGELQKGNELALPSKYVNFLYLASHYEKLKGSPEDNEQKQLFVEQHKHYLDEIIEQISEFSKRVILADANLDKVLSAYNKHRDKPIREQAENIIHLFTLTNLGAPAAFKYFDTTIDRKRYTSTKEVLDATLIHQSITGLYETRIDLSQLGGDGGGGSGGGGGTVSLQDEHRLFDIPVTTSLPDVWLQDFPQAWAETGGLGRAKCQAPIIIDLKPTAVPVSIKQYPMSLEAHMGIRQHIIKFLELGVLRPCRSPWNTPLLPVKKPGTQDYRPVQDLREINKRTVDIHPTVPNPYNLLSTLKPDYSWYTVLDLKDAFFCLPLAPQSQELFAFEWKDPERGISGQLTWTRLPQGFKNSPTLFNEALHRDLTDFRTQHPEVTLLQYVDDLLLAAPTKKACTQGTRHLLQELGEKGYRASAKKAQICQTKVTYLGYILSEGKRWLTPGRIETVARIPPPRNPREVREFLGKAGFCRLFIPGFAELAAPLYALTKPSTPFTWQTEHQLAFEALKKALLSAPALGLPDTSKPFTLFLDERQGIAKGVLTQKLGPWKRPVAYLSKKLDPVAAGWPPCLRIMAATAMLVKDSAKLTLGQPLTVITPHTLEAIVRQPPDRWITNARLTHYQALLLDTDRVQFGPPVTLNPATLLPVPENQPSPHDCRQVLAETHGTREDLKDQELPDADHTWYTDGSSYLDSGTRRAGAAVVDGHNTIWAQSLPPGTSAQKAELIALTKALELSKGKKANIYTDSRYAFATAHTHGSIYERRGWLTSEGKEIKNKAEIIALLKALFLPQEVAIIHCPGHQKGQDPVAVGNRQADRVARQAAMAEVLTLATEPDNTSHITAGKRTADGSEFEKRTADGSEFESPKKKAKVE

SEQ ID NO: 1941 - protein, 2111 aa, synthetic construct
MPAAKRVKLDGGDKKYSIGLDIGTNSVGWAVITDEYKVPSKKFKVLGNTDRHSIKKNLIGALLFDSGETAEATRLKRTARRRYTRRKNRICYLQEIFSNEMAKVDDSFFHRLEESFLVEEDKKHERHPIFGNIVDEVAYHEKYPTIYHLRKKLVDSTDKADLRLIYLALAHMIKFRGHFLIEGDLNPDNSDVDKLFIQLVQTYNQLFEENPINASGVDAKAILSARLSKSRRLENLIAQLPGEKKNGLFGNLIALSLGLTPNFKSNFDLAEDAKLQLSKDTYDDDLDNLLAQIGDQYADLFLAAKNLSDAILLSDILRVNTEITKAPLSASMIKRYDEHHQDLTLLKALVRQQLPEKYKEIFFDQSKNGYAGYIDGGASQEEFYKFIKPILEKMDGTEELLVKLNREDLLRKQRTFDNGSIPHQIHLGELHAILRRQEDFYPFLKDNREKIEKILTFRIPYYVGPLARGNSRFAWMTRKSEETITPWNFEEVVDKGASAQSFIERMTNFDKNLPNEKVLPKHSLLYEYFTVYNELTKVKYVTEGMRKPAFLSGEQKKAIVDLLFKTNRKVTVKQLKEDYFKKIECFDSVEISGVEDRFNASLGTYHDLLKIIKDKDFLDNEENEDILEDIVLTLTLFEDREMIEERLKTYAHLFDDKVMKQLKRRRYTGWGRLSRKLINGIRDKQSGKTILDFLKSDGFANRNFMQLIHDDSLTFKEDIQKAQVSGQGDSLHEHIANLAGSPAIKKGILQTVKVVDELVKVMGRHKPENIVIEMARENQTTQKGQKNSRERMKRIEEGIKELGSQILKEHPVENTQLQNEKLYLYYLQNGRDMYVDQELDINRLSDYDVDHIVPQSFLKDDSIDNKVLTRSDKARGKSDNVPSEEVVKKMKNYWRQLLNAKLITQRKFDNLTKAERGGLSELDKAGFIKRQLVETRQITKHVAQILDSRMNTKYDENDKLIREVKVITLKSKLVSDFRKDFQFYKVREINNYHHAHDAYLNAVVGTALIKKYPKLESEFVYGDYKVYDVRKMIAKSEQEIGKATAKYFFYSNIMNFFKTEITLANGEIRKRPLIETNGETGEIVWDKGRDFATVRKVLSMPQVNIVKKTEVQTGGFSKESILPKRNSDKLIARKKDWDPKKYGGFDSPTVAYSVLVVAKVEKGKSKKLKSVKELLGITIMERSSFEKNPIDFLEAKGYKEVKKDLIIKLPKYSLFELENGRKRMLASAGELQKGNELALPSKYVNFLYLASHYEKLKGSPEDNEQKQLFVEQHKHYLDEIIEQISEFSKRVILADANLDKVLSAYNKHRDKPIREQAENIIHLFTLTNLGAPAAFKYFDTTIDRKRYTSTKEVLDATLIHQSITGLYETRIDLSQLGGDGGEAAAKEAAAKEAAAKEAAAKGGTVSLQDEHRLFDIPVTTSLPDVWLQDFPQAWAETGGLGRAKCQAPIIIDLKPTAVPVSIKQYPMSLEAHMGIRQHIIKFLELGVLRPCRSPWNTPLLPVKKPGTQDYRPVQDLREINKRTVDIHPTVPNPYNLLSTLKPDYSWYTVLDLKDAFFCLPLAPQSQELFAFEWKDPERGISGQLTWTRLPQGFKNSPTLFNEALHRDLTDFRTQHPEVTLLQYVDDLLLAAPTKKACTQGTRHLLQELGEKGYRASAKKAQICQTKVTYLGYILSEGKRWLTPGRIETVARIPPPRNPREVREFLGKAGFCRLFIPGFAELAAPLYALTKPSTPFTWQTEHQLAFEALKKALLSAPALGLPDTSKPFTLFLDERQGIAKGVLTQKLGPWKRPVAYLSKKLDPVAAGWPPCLRIMAATAMLVKDSAKLTLGQPLTVITPHTLEAIVRQPPDRWITNARLTHYQALLLDTDRVQFGPPVTLNPATLLPVPENQPSPHDCRQVLAETHGTREDLKDQELPDADHTWYTDGSSYLDSGTRRAGAAVVDGHNTIWAQSLPPGTSAQKAELIALTKALELSKGKKANIYTDSRYAFATAHTHGSIYERRGWLTSEGKEIKNKAEIIALLKALFLPQEVAIIHCPGHQKGQDPVAVGNRQADRVARQAAMAEVLTLATEPDNTSHITAGKRTADGSEFEKRTADGSEFESPKKKAKVE

SEQ ID NO: 1942 - protein, 2100 aa, synthetic construct
MPAAKRVKLDGGDKKYSIGLDIGTNSVGWAVITDEYKVPSKKFKVLGNTDRHSIKKNLIGALLFDSGETAEATRLKRTARRRYTRRKNRICYLQEIFSNEMAKVDDSFFHRLEESFLVEEDKKHERHPIFGNIVDEVAYHEKYPTIYHLRKKLVDSTDKADLRLIYLALAHMIKFRGHFLIEGDLNPDNSDVDKLFIQLVQTYNQLFEENPINASGVDAKAILSARLSKSRRLENLIAQLPGEKKNGLFGNLIALSLGLTPNFKSNFDLAEDAKLQLSKDTYDDDLDNLLAQIGDQYADLFLAAKNLSDAILLSDILRVNTEITKAPLSASMIKRYDEHHQDLTLLKALVRQQLPEKYKEIFFDQSKNGYAGYIDGGASQEEFYKFIKPILEKMDGTEELLVKLNREDLLRKQRTFDNGSIPHQIHLGELHAILRRQEDFYPFLKDNREKIEKILTFRIPYYVGPLARGNSRFAWMTRKSEETITPWNFEEVVDKGASAQSFIERMTNFDKNLPNEKVLPKHSLLYEYFTVYNELTKVKYVTEGMRKPAFLSGEQKKAIVDLLFKTNRKVTVKQLKEDYFKKIECFDSVEISGVEDRFNASLGTYHDLLKIIKDKDFLDNEENEDILEDIVLTLTLFEDREMIEERLKTYAHLFDDKVMKQLKRRRYTGWGRLSRKLINGIRDKQSGKTILDFLKSDGFANRNFMQLIHDDSLTFKEDIQKAQVSGQGDSLHEHIANLAGSPAIKKGILQTVKVVDELVKVMGRHKPENIVIEMARENQTTQKGQKNSRERMKRIEEGIKELGSQILKEHPVENTQLQNEKLYLYYLQNGRDMYVDQELDINRLSDYDVDHIVPQSFLKDDSIDNKVLTRSDKARGKSDNVPSEEVVKKMKNYWRQLLNAKLITQRKFDNLTKAERGGLSELDKAGFIKRQLVETRQITKHVAQILDSRMNTKYDENDKLIREVKVITLKSKLVSDFRKDFQFYKVREINNYHHAHDAYLNAVVGTALIKKYPKLESEFVYGDYKVYDVRKMIAKSEQEIGKATAKYFFYSNIMNFFKTEITLANGEIRKRPLIETNGETGEIVWDKGRDFATVRKVLSMPQVNIVKKTEVQTGGFSKESILPKRNSDKLIARKKDWDPKKYGGFDSPTVAYSVLVVAKVEKGKSKKLKSVKELLGITIMERSSFEKNPIDFLEAKGYKEVKKDLIIKLPKYSLFELENGRKRMLASAGELQKGNELALPSKYVNFLYLASHYEKLKGSPEDNEQKQLFVEQHKHYLDEIIEQISEFSKRVILADANLDKVLSAYNKHRDKPIREQAENIIHLFTLTNLGAPAAFKYFDTTIDRKRYTSTKEVLDATLIHQSITGLYETRIDLSQLGGDGGGGSGGGPAPGGTVSLQDEHRLFDIPVTTSLPDVWLQDFPQAWAETGGLGRAKCQAPIIIDLKPTAVPVSIKQYPMSLEAHMGIRQHIIKFLELGVLRPCRSPWNTPLLPVKKPGTQDYRPVQDLREINKRTVDIHPTVPNPYNLLSTLKPDYSWYTVLDLKDAFFCLPLAPQSQELFAFEWKDPERGISGQLTWTRLPQGFKNSPTLFNEALHRDLTDFRTQHPEVTLLQYVDDLLLAAPTKKACTQGTRHLLQELGEKGYRASAKKAQICQTKVTYLGYILSEGKRWLTPGRIETVARIPPPRNPREVREFLGKAGFCRLFIPGFAELAAPLYALTKPSTPFTWQTEHQLAFEALKKALLSAPALGLPDTSKPFTLFLDERQGIAKGVLTQKLGPWKRPVAYLSKKLDPVAAGWPPCLRIMAATAMLVKDSAKLTLGQPLTVITPHTLEAIVRQPPDRWITNARLTHYQALLLDTDRVQFGPPVTLNPATLLPVPENQPSPHDCRQVLAETHGTREDLKDQELPDADHTWYTDGSSYLDSGTRRAGAAVVDGHNTIWAQSLPPGTSAQKAELIALTKALELSKGKKANIYTDSRYAFATAHTHGSIYERRGWLTSEGKEIKNKAEIIALLKALFLPQEVAIIHCPGHQKGQDPVAVGNRQADRVARQAAMAEVLTLATEPDNTSHITAGKRTADGSEFEKRTADGSEFESPKKKAKVE

SEQ ID NO: 1943 - protein, 2102 aa, synthetic construct
MPAAKRVKLDGGDKKYSIGLDIGTNSVGWAVITDEYKVPSKKFKVLGNTDRHSIKKNLIGALLFDSGETAEATRLKRTARRRYTRRKNRICYLQEIFSNEMAKVDDSFFHRLEESFLVEEDKKHERHPIFGNIVDEVAYHEKYPTIYHLRKKLVDSTDKADLRLIYLALAHMIKFRGHFLIEGDLNPDNSDVDKLFIQLVQTYNQLFEENPINASGVDAKAILSARLSKSRRLENLIAQLPGEKKNGLFGNLIALSLGLTPNFKSNFDLAEDAKLQLSKDTYDDDLDNLLAQIGDQYADLFLAAKNLSDAILLSDILRVNTEITKAPLSASMIKRYDEHHQDLTLLKALVRQQLPEKYKEIFFDQSKNGYAGYIDGGASQEEFYKFIKPILEKMDGTEELLVKLNREDLLRKQRTFDNGSIPHQIHLGELHAILRRQEDFYPFLKDNREKIEKILTFRIPYYVGPLARGNSRFAWMTRKSEETITPWNFEEVVDKGASAQSFIERMTNFDKNLPNEKVLPKHSLLYEYFTVYNELTKVKYVTEGMRKPAFLSGEQKKAIVDLLFKTNRKVTVKQLKEDYFKKIECFDSVEISGVEDRFNASLGTYHDLLKIIKDKDFLDNEENEDILEDIVLTLTLFEDREMIEERLKTYAHLFDDKVMKQLKRRRYTGWGRLSRKLINGIRDKQSGKTILDFLKSDGFANRNFMQLIHDDSLTFKEDIQKAQVSGQGDSLHEHIANLAGSPAIKKGILQTVKVVDELVKVMGRHKPENIVIEMARENQTTQKGQKNSRERMKRIEEGIKELGSQILKEHPVENTQLQNEKLYLYYLQNGRDMYVDQELDINRLSDYDVDHIVPQSFLKDDSIDNKVLTRSDKARGKSDNVPSEEVVKKMKNYWRQLLNAKLITQRKFDNLTKAERGGLSELDKAGFIKRQLVETRQITKHVAQILDSRMNTKYDENDKLIREVKVITLKSKLVSDFRKDFQFYKVREINNYHHAHDAYLNAVVGTALIKKYPKLESEFVYGDYKVYDVRKMIAKSEQEIGKATAKYFFYSNIMNFFKTEITLANGEIRKRPLIETNGETGEIVWDKGRDFATVRKVLSMPQVNIVKKTEVQTGGFSKESILPKRNSDKLIARKKDWDPKKYGGFDSPTVAYSVLVVAKVEKGKSKKLKSVKELLGITIMERSSFEKNPIDFLEAKGYKEVKKDLIIKLPKYSLFELENGRKRMLASAGELQKGNELALPSKYVNFLYLASHYEKLKGSPEDNEQKQLFVEQHKHYLDEIIEQISEFSKRVILADANLDKVLSAYNKHRDKPIREQAENIIHLFTLTNLGAPAAFKYFDTTIDRKRYTSTKEVLDATLIHQSITGLYETRIDLSQLGGDGGGGGEAAAKGGSGGTVSLQDEHRLFDIPVTTSLPDVWLQDFPQAWAETGGLGRAKCQAPIIIDLKPTAVPVSIKQYPMSLEAHMGIRQHIIKFLELGVLRPCRSPWNTPLLPVKKPGTQDYRPVQDLREINKRTVDIHPTVPNPYNLLSTLKPDYSWYTVLDLKDAFFCLPLAPQSQELFAFEWKDPERGISGQLTWTRLPQGFKNSPTLFNEALHRDLTDFRTQHPEVTLLQYVDDLLLAAPTKKACTQGTRHLLQELGEKGYRASAKKAQICQTKVTYLGYILSEGKRWLTPGRIETVARIPPPRNPREVREFLGKAGFCRLFIPGFAELAAPLYALTKPSTPFTWQTEHQLAFEALKKALLSAPALGLPDTSKPFTLFLDERQGIAKGVLTQKLGPWKRPVAYLSKKLDPVAAGWPPCLRIMAATAMLVKDSAKLTLGQPLTVITPHTLEAIVRQPPDRWITNARLTHYQALLLDTDRVQFGPPVTLNPATLLPVPENQPSPHDCRQVLAETHGTREDLKDQELPDADHTWYTDGSSYLDSGTRRAGAAVVDGHNTIWAQSLPPGTSAQKAELIALTKALELSKGKKANIYTDSRYAFATAHTHGSIYERRGWLTSEGKEIKNKAEIIALLKALFLPQEVAIIHCPGHQKGQDPVAVGNRQADRVARQAAMAEVLTLATEPDNTSHITAGKRTADGSEFEKRTADGSEFESPKKKAKVE

SEQ ID NO: 1944 - protein, 2116 aa, synthetic construct
MPAAKRVKLDGGDKKYSIGLDIGTNSVGWAVITDEYKVPSKKFKVLGNTDRHSIKKNLIGALLFDSGETAEATRLKRTARRRYTRRKNRICYLQEIFSNEMAKVDDSFFHRLEESFLVEEDKKHERHPIFGNIVDEVAYHEKYPTIYHLRKKLVDSTDKADLRLIYLALAHMIKFRGHFLIEGDLNPDNSDVDKLFIQLVQTYNQLFEENPINASGVDAKAILSARLSKSRRLENLIAQLPGEKKNGLFGNLIALSLGLTPNFKSNFDLAEDAKLQLSKDTYDDDLDNLLAQIGDQYADLFLAAKNLSDAILLSDILRVNTEITKAPLSASMIKRYDEHHQDLTLLKALVRQQLPEKYKEIFFDQSKNGYAGYIDGGASQEEFYKFIKPILEKMDGTEELLVKLNREDLLRKQRTFDNGSIPHQIHLGELHAILRRQEDFYPFLKDNREKIEKILTFRIPYYVGPLARGNSRFAWMTRKSEETITPWNFEEVVDKGASAQSFIERMTNFDKNLPNEKVLPKHSLLYEYFTVYNELTKVKYVTEGMRKPAFLSGEQKKAIVDLLFKTNRKVTVKQLKEDYFKKIECFDSVEISGVEDRFNASLGTYHDLLKIIKDKDFLDNEENEDILEDIVLTLTLFEDREMIEERLKTYAHLFDDKVMKQLKRRRYTGWGRLSRKLINGIRDKQSGKTILDFLKSDGFANRNFMQLIHDDSLTFKEDIQKAQVSGQGDSLHEHIANLAGSPAIKKGILQTVKVVDELVKVMGRHKPENIVIEMARENQTTQKGQKNSRERMKRIEEGIKELGSQILKEHPVENTQLQNEKLYLYYLQNGRDMYVDQELDINRLSDYDVDHIVPQSFLKDDSIDNKVLTRSDKARGKSDNVPSEEVVKKMKNYWRQLLNAKLITQRKFDNLTKAERGGLSELDKAGFIKRQLVETRQITKHVAQILDSRMNTKYDENDKLIREVKVITLKSKLVSDFRKDFQFYKVREINNYHHAHDAYLNAVVGTALIKKYPKLESEFVYGDYKVYDVRKMIAKSEQEIGKATAKYFFYSNIMNFFKTEITLANGEIRKRPLIETNGETGEIVWDKGRDFATVRKVLSMPQVNIVKKTEVQTGGFSKESILPKRNSDKLIARKKDWDPKKYGGFDSPTVAYSVLVVAKVEKGKSKKLKSVKELLGITIMERSSFEKNPIDFLEAKGYKEVKKDLIIKLPKYSLFELENGRKRMLASAGELQKGNELALPSKYVNFLYLASHYEKLKGSPEDNEQKQLFVEQHKHYLDEIIEQISEFSKRVILADANLDKVLSAYNKHRDKPIREQAENIIHLFTLTNLGAPAAFKYFDTTIDRKRYTSTKEVLDATLIHQSITGLYETRIDLSQLGGDGGGGGGSGGGGSGGGGSGGGGSGGGGSGGTVSLQDEHRLFDIPVTTSLPDVWLQDFPQAWAETGGLGRAKCQAPIIIDLKPTAVPVSIKQYPMSLEAHMGIRQHIIKFLELGVLRPCRSPWNTPLLPVKKPGTQDYRPVQDLREINKRTVDIHPTVPNPYNLLSTLKPDYSWYTVLDLKDAFFCLPLAPQSQELFAFEWKDPERGISGQLTWTRLPQGFKNSPTLFNEALHRDLTDFRTQHPEVTLLQYVDDLLLAAPTKKACTQGTRHLLQELGEKGYRASAKKAQICQTKVTYLGYILSEGKRWLTPGRIETVARIPPPRNPREVREFLGKAGFCRLFIPGFAELAAPLYALTKPSTPFTWQTEHQLAFEALKKALLSAPALGLPDTSKPFTLFLDERQGIAKGVLTQKLGPWKRPVAYLSKKLDPVAAGWPPCLRIMAATAMLVKDSAKLTLGQPLTVITPHTLEAIVRQPPDRWITNARLTHYQALLLDTDRVQFGPPVTLNPATLLPVPENQPSPHDCRQVLAETHGTREDLKDQELPDADHTWYTDGSSYLDSGTRRAGAAVVDGHNTIWAQSLPPGTSAQKAELIALTKALELSKGKKANIYTDSRYAFATAHTHGSIYERRGWLTSEGKEIKNKAEIIALLKALFLPQEVAIIHCPGHQKGQDPVAVGNRQADRVARQAAMAEVLTLATEPDNTSHITAGKRTADGSEFEKRTADGSEFESPKKKAKVE

SEQ ID NO: 1945 - protein, 2096 aa, synthetic construct
MPAAKRVKLDGGDKKYSIGLDIGTNSVGWAVITDEYKVPSKKFKVLGNTDRHSIKKNLIGALLFDSGETAEATRLKRTARRRYTRRKNRICYLQEIFSNEMAKVDDSFFHRLEESFLVEEDKKHERHPIFGNIVDEVAYHEKYPTIYHLRKKLVDSTDKADLRLIYLALAHMIKFRGHFLIEGDLNPDNSDVDKLFIQLVQTYNQLFEENPINASGVDAKAILSARLSKSRRLENLIAQLPGEKKNGLFGNLIALSLGLTPNFKSNFDLAEDAKLQLSKDTYDDDLDNLLAQIGDQYADLFLAAKNLSDAILLSDILRVNTEITKAPLSASMIKRYDEHHQDLTLLKALVRQQLPEKYKEIFFDQSKNGYAGYIDGGASQEEFYKFIKPILEKMDGTEELLVKLNREDLLRKQRTFDNGSIPHQIHLGELHAILRRQEDFYPFLKDNREKIEKILTFRIPYYVGPLARGNSRFAWMTRKSEETITPWNFEEVVDKGASAQSFIERMTNFDKNLPNEKVLPKHSLLYEYFTVYNELTKVKYVTEGMRKPAFLSGEQKKAIVDLLFKTNRKVTVKQLKEDYFKKIECFDSVEISGVEDRFNASLGTYHDLLKIIKDKDFLDNEENEDILEDIVLTLTLFEDREMIEERLKTYAHLFDDKVMKQLKRRRYTGWGRLSRKLINGIRDKQSGKTILDFLKSDGFANRNFMQLIHDDSLTFKEDIQKAQVSGQGDSLHEHIANLAGSPAIKKGILQTVKVVDELVKVMGRHKPENIVIEMARENQTTQKGQKNSRERMKRIEEGIKELGSQILKEHPVENTQLQNEKLYLYYLQNGRDMYVDQELDINRLSDYDVDHIVPQSFLKDDSIDNKVLTRSDKARGKSDNVPSEEVVKKMKNYWRQLLNAKLITQRKFDNLTKAERGGLSELDKAGFIKRQLVETRQITKHVAQILDSRMNTKYDENDKLIREVKVITLKSKLVSDFRKDFQFYKVREINNYHHAHDAYLNAVVGTALIKKYPKLESEFVYGDYKVYDVRKMIAKSEQEIGKATAKYFFYSNIMNFFKTEITLANGEIRKRPLIETNGETGEIVWDKGRDFATVRKVLSMPQVNIVKKTEVQTGGFSKESILPKRNSDKLIARKKDWDPKKYGGFDSPTVAYSVLVVAKVEKGKSKKLKSVKELLGITIMERSSFEKNPIDFLEAKGYKEVKKDLIIKLPKYSLFELENGRKRMLASAGELQKGNELALPSKYVNFLYLASHYEKLKGSPEDNEQKQLFVEQHKHYLDEIIEQISEFSKRVILADANLDKVLSAYNKHRDKPIREQAENIIHLFTLTNLGAPAAFKYFDTTIDRKRYTSTKEVLDATLIHQSITGLYETRIDLSQLGGDGGPAPAPGGTVSLQDEHRLFDIPVTTSLPDVWLQDFPQAWAETGGLGRAKCQAPIIIDLKPTAVPVSIKQYPMSLEAHMGIRQHIIKFLELGVLRPCRSPWNTPLLPVKKPGTQDYRPVQDLREINKRTVDIHPTVPNPYNLLSTLKPDYSWYTVLDLKDAFFCLPLAPQSQELFAFEWKDPERGISGQLTWTRLPQGFKNSPTLFNEALHRDLTDFRTQHPEVTLLQYVDDLLLAAPTKKACTQGTRHLLQELGEKGYRASAKKAQICQTKVTYLGYILSEGKRWLTPGRIETVARIPPPRNPREVREFLGKAGFCRLFIPGFAELAAPLYALTKPSTPFTWQTEHQLAFEALKKALLSAPALGLPDTSKPFTLFLDERQGIAKGVLTQKLGPWKRPVAYLSKKLDPVAAGWPPCLRIMAATAMLVKDSAKLTLGQPLTVITPHTLEAIVRQPPDRWITNARLTHYQALLLDTDRVQFGPPVTLNPATLLPVPENQPSPHDCRQVLAETHGTREDLKDQELPDADHTWYTDGSSYLDSGTRRAGAAVVDGHNTIWAQSLPPGTSAQKAELIALTKALELSKGKKANIYTDSRYAFATAHTHGSIYERRGWLTSEGKEIKNKAEIIALLKALFLPQEVAIIHCPGHQKGQDPVAVGNRQADRVARQAAMAEVLTLATEPDNTSHITAGKRTADGSEFEKRTADGSEFESPKKKAKVE

SEQ ID NO: 1946 - protein, 2116 aa, synthetic construct
MPAAKRVKLDGGDKKYSIGLDIGTNSVGWAVITDEYKVPSKKFKVLGNTDRHSIKKNLIGALLFDSGETAEATRLKRTARRRYTRRKNRICYLQEIFSNEMAKVDDSFFHRLEESFLVEEDKKHERHPIFGNIVDEVAYHEKYPTIYHLRKKLVDSTDKADLRLIYLALAHMIKFRGHFLIEGDLNPDNSDVDKLFIQLVQTYNQLFEENPINASGVDAKAILSARLSKSRRLENLIAQLPGEKKNGLFGNLIALSLGLTPNFKSNFDLAEDAKLQLSKDTYDDDLDNLLAQIGDQYADLFLAAKNLSDAILLSDILRVNTEITKAPLSASMIKRYDEHHQDLTLLKALVRQQLPEKYKEIFFDQSKNGYAGYIDGGASQEEFYKFIKPILEKMDGTEELLVKLNREDLLRKQRTFDNGSIPHQIHLGELHAILRRQEDFYPFLKDNREKIEKILTFRIPYYVGPLARGNSRFAWMTRKSEETITPWNFEEVVDKGASAQSFIERMTNFDKNLPNEKVLPKHSLLYEYFTVYNELTKVKYVTEGMRKPAFLSGEQKKAIVDLLFKTNRKVTVKQLKEDYFKKIECFDSVEISGVEDRFNASLGTYHDLLKIIKDKDFLDNEENEDILEDIVLTLTLFEDREMIEERLKTYAHLFDDKVMKQLKRRRYTGWGRLSRKLINGIRDKQSGKTILDFLKSDGFANRNFMQLIHDDSLTFKEDIQKAQVSGQGDSLHEHIANLAGSPAIKKGILQTVKVVDELVKVMGRHKPENIVIEMARENQTTQKGQKNSRERMKRIEEGIKELGSQILKEHPVENTQLQNEKLYLYYLQNGRDMYVDQELDINRLSDYDVDHIVPQSFLKDDSIDNKVLTRSDKARGKSDNVPSEEVVKKMKNYWRQLLNAKLITQRKFDNLTKAERGGLSELDKAGFIKRQLVETRQITKHVAQILDSRMNTKYDENDKLIREVKVITLKSKLVSDFRKDFQFYKVREINNYHHAHDAYLNAVVGTALIKKYPKLESEFVYGDYKVYDVRKMIAKSEQEIGKATAKYFFYSNIMNFFKTEITLANGEIRKRPLIETNGETGEIVWDKGRDFATVRKVLSMPQVNIVKKTEVQTGGFSKESILPKRNSDKLIARKKDWDPKKYGGFDSPTVAYSVLVVAKVEKGKSKKLKSVKELLGITIMERSSFEKNPIDFLEAKGYKEVKKDLIIKLPKYSLFELENGRKRMLASAGELQKGNELALPSKYVNFLYLASHYEKLKGSPEDNEQKQLFVEQHKHYLDEIIEQISEFSKRVILADANLDKVLSAYNKHRDKPIREQAENIIHLFTLTNLGAPAAFKYFDTTIDRKRYTSTKEVLDATLIHQSITGLYETRIDLSQLGGDGGEAAAKEAAAKEAAAKEAAAKEAAAKGGTVSLQDEHRLFDIPVTTSLPDVWLQDFPQAWAETGGLGRAKCQAPIIIDLKPTAVPVSIKQYPMSLEAHMGIRQHIIKFLELGVLRPCRSPWNTPLLPVKKPGTQDYRPVQDLREINKRTVDIHPTVPNPYNLLSTLKPDYSWYTVLDLKDAFFCLPLAPQSQELFAFEWKDPERGISGQLTWTRLPQGFKNSPTLFNEALHRDLTDFRTQHPEVTLLQYVDDLLLAAPTKKACTQGTRHLLQELGEKGYRASAKKAQICQTKVTYLGYILSEGKRWLTPGRIETVARIPPPRNPREVREFLGKAGFCRLFIPGFAELAAPLYALTKPSTPFTWQTEHQLAFEALKKALLSAPALGLPDTSKPFTLFLDERQGIAKGVLTQKLGPWKRPVAYLSKKLDPVAAGWPPCLRIMAATAMLVKDSAKLTLGQPLTVITPHTLEAIVRQPPDRWITNARLTHYQALLLDTDRVQFGPPVTLNPATLLPVPENQPSPHDCRQVLAETHGTREDLKDQELPDADHTWYTDGSSYLDSGTRRAGAAVVDGHNTIWAQSLPPGTSAQKAELIALTKALELSKGKKANIYTDSRYAFATAHTHGSIYERRGWLTSEGKEIKNKAEIIALLKALFLPQEVAIIHCPGHQKGQDPVAVGNRQADRVARQAAMAEVLTLATEPDNTSHITAGKRTADGSEFEKRTADGSEFESPKKKAKVE

SEQ ID NO: 1947 - protein, 2106 aa, synthetic construct
MPAAKRVKLDGGDKKYSIGLDIGTNSVGWAVITDEYKVPSKKFKVLGNTDRHSIKKNLIGALLFDSGETAEATRLKRTARRRYTRRKNRICYLQEIFSNEMAKVDDSFFHRLEESFLVEEDKKHERHPIFGNIVDEVAYHEKYPTIYHLRKKLVDSTDKADLRLIYLALAHMIKFRGHFLIEGDLNPDNSDVDKLFIQLVQTYNQLFEENPINASGVDAKAILSARLSKSRRLENLIAQLPGEKKNGLFGNLIALSLGLTPNFKSNFDLAEDAKLQLSKDTYDDDLDNLLAQIGDQYADLFLAAKNLSDAILLSDILRVNTEITKAPLSASMIKRYDEHHQDLTLLKALVRQQLPEKYKEIFFDQSKNGYAGYIDGGASQEEFYKFIKPILEKMDGTEELLVKLNREDLLRKQRTFDNGSIPHQIHLGELHAILRRQEDFYPFLKDNREKIEKILTFRIPYYVGPLARGNSRFAWMTRKSEETITPWNFEEVVDKGASAQSFIERMTNFDKNLPNEKVLPKHSLLYEYFTVYNELTKVKYVTEGMRKPAFLSGEQKKAIVDLLFKTNRKVTVKQLKEDYFKKIECFDSVEISGVEDRFNASLGTYHDLLKIIKDKDFLDNEENEDILEDIVLTLTLFEDREMIEERLKTYAHLFDDKVMKQLKRRRYTGWGRLSRKLINGIRDKQSGKTILDFLKSDGFANRNFMQLIHDDSLTFKEDIQKAQVSGQGDSLHEHIANLAGSPAIKKGILQTVKVVDELVKVMGRHKPENIVIEMARENQTTQKGQKNSRERMKRIEEGIKELGSQILKEHPVENTQLQNEKLYLYYLQNGRDMYVDQELDINRLSDYDVDHIVPQSFLKDDSIDNKVLTRSDKARGKSDNVPSEEVVKKMKNYWRQLLNAKLITQRKFDNLTKAERGGLSELDKAGFIKRQLVETRQITKHVAQILDSRMNTKYDENDKLIREVKVITLKSKLVSDFRKDFQFYKVREINNYHHAHDAYLNAVVGTALIKKYPKLESEFVYGDYKVYDVRKMIAKSEQEIGKATAKYFFYSNIMNFFKTEITLANGEIRKRPLIETNGETGEIVWDKGRDFATVRKVLSMPQVNIVKKTEVQTGGFSKESILPKRNSDKLIARKKDWDPKKYGGFDSPTVAYSVLVVAKVEKGKSKKLKSVKELLGITIMERSSFEKNPIDFLEAKGYKEVKKDLIIKLPKYSLFELENGRKRMLASAGELQKGNELALPSKYVNFLYLASHYEKLKGSPEDNEQKQLFVEQHKHYLDEIIEQISEFSKRVILADANLDKVLSAYNKHRDKPIREQAENIIHLFTLTNLGAPAAFKYFDTTIDRKRYTSTKEVLDATLIHQSITGLYETRIDLSQLGGDGGEAAAKGGGGSEAAAKGGTVSLQDEHRLFDIPVTTSLPDVWLQDFPQAWAETGGLGRAKCQAPIIIDLKPTAVPVSIKQYPMSLEAHMGIRQHIIKFLELGVLRPCRSPWNTPLLPVKKPGTQDYRPVQDLREINKRTVDIHPTVPNPYNLLSTLKPDYSWYTVLDLKDAFFCLPLAPQSQELFAFEWKDPERGISGQLTWTRLPQGFKNSPTLFNEALHRDLTDFRTQHPEVTLLQYVDDLLLAAPTKKACTQGTRHLLQELGEKGYRASAKKAQICQTKVTYLGYILSEGKRWLTPGRIETVARIPPPRNPREVREFLGKAGFCRLFIPGFAELAAPLYALTKPSTPFTWQTEHQLAFEALKKALLSAPALGLPDTSKPFTLFLDERQGIAKGVLTQKLGPWKRPVAYLSKKLDPVAAGWPPCLRIMAATAMLVKDSAKLTLGQPLTVITPHTLEAIVRQPPDRWITNARLTHYQALLLDTDRVQFGPPVTLNPATLLPVPENQPSPHDCRQVLAETHGTREDLKDQELPDADHTWYTDGSSYLDSGTRRAGAAVVDGHNTIWAQSLPPGTSAQKAELIALTKALELSKGKKANIYTDSRYAFATAHTHGSIYERRGWLTSEGKEIKNKAEIIALLKALFLPQEVAIIHCPGHQKGQDPVAVGNRQADRVARQAAMAEVLTLATEPDNTSHITAGKRTADGSEFEKRTADGSEFESPKKKAKVE

SEQ ID NO: 1948 - protein, 2106 aa, synthetic construct
MPAAKRVKLDGGDKKYSIGLDIGTNSVGWAVITDEYKVPSKKFKVLGNTDRHSIKKNLIGALLFDSGETAEATRLKRTARRRYTRRKNRICYLQEIFSNEMAKVDDSFFHRLEESFLVEEDKKHERHPIFGNIVDEVAYHEKYPTIYHLRKKLVDSTDKADLRLIYLALAHMIKFRGHFLIEGDLNPDNSDVDKLFIQLVQTYNQLFEENPINASGVDAKAILSARLSKSRRLENLIAQLPGEKKNGLFGNLIALSLGLTPNFKSNFDLAEDAKLQLSKDTYDDDLDNLLAQIGDQYADLFLAAKNLSDAILLSDILRVNTEITKAPLSASMIKRYDEHHQDLTLLKALVRQQLPEKYKEIFFDQSKNGYAGYIDGGASQEEFYKFIKPILEKMDGTEELLVKLNREDLLRKQRTFDNGSIPHQIHLGELHAILRRQEDFYPFLKDNREKIEKILTFRIPYYVGPLARGNSRFAWMTRKSEETITPWNFEEVVDKGASAQSFIERMTNFDKNLPNEKVLPKHSLLYEYFTVYNELTKVKYVTEGMRKPAFLSGEQKKAIVDLLFKTNRKVTVKQLKEDYFKKIECFDSVEISGVEDRFNASLGTYHDLLKIIKDKDFLDNEENEDILEDIVLTLTLFEDREMIEERLKTYAHLFDDKVMKQLKRRRYTGWGRLSRKLINGIRDKQSGKTILDFLKSDGFANRNFMQLIHDDSLTFKEDIQKAQVSGQGDSLHEHIANLAGSPAIKKGILQTVKVVDELVKVMGRHKPENIVIEMARENQTTQKGQKNSRERMKRIEEGIKELGSQILKEHPVENTQLQNEKLYLYYLQNGRDMYVDQELDINRLSDYDVDHIVPQSFLKDDSIDNKVLTRSDKARGKSDNVPSEEVVKKMKNYWRQLLNAKLITQRKFDNLTKAERGGLSELDKAGFIKRQLVETRQITKHVAQILDSRMNTKYDENDKLIREVKVITLKSKLVSDFRKDFQFYKVREINNYHHAHDAYLNAVVGTALIKKYPKLESEFVYGDYKVYDVRKMIAKSEQEIGKATAKYFFYSNIMNFFKTEITLANGEIRKRPLIETNGETGEIVWDKGRDFATVRKVLSMPQVNIVKKTEVQTGGFSKESILPKRNSDKLIARKKDWDPKKYGGFDSPTVAYSVLVVAKVEKGKSKKLKSVKELLGITIMERSSFEKNPIDFLEAKGYKEVKKDLIIKLPKYSLFELENGRKRMLASAGELQKGNELALPSKYVNFLYLASHYEKLKGSPEDNEQKQLFVEQHKHYLDEIIEQISEFSKRVILADANLDKVLSAYNKHRDKPIREQAENIIHLFTLTNLGAPAAFKYFDTTIDRKRYTSTKEVLDATLIHQSITGLYETRIDLSQLGGDGGGSSGSSGSSGSSGSSGGTVSLQDEHRLFDIPVTTSLPDVWLQDFPQAWAETGGLGRAKCQAPIIIDLKPTAVPVSIKQYPMSLEAHMGIRQHIIKFLELGVLRPCRSPWNTPLLPVKKPGTQDYRPVQDLREINKRTVDIHPTVPNPYNLLSTLKPDYSWYTVLDLKDAFFCLPLAPQSQELFAFEWKDPERGISGQLTWTRLPQGFKNSPTLFNEALHRDLTDFRTQHPEVTLLQYVDDLLLAAPTKKACTQGTRHLLQELGEKGYRASAKKAQICQTKVTYLGYILSEGKRWLTPGRIETVARIPPPRNPREVREFLGKAGFCRLFIPGFAELAAPLYALTKPSTPFTWQTEHQLAFEALKKALLSAPALGLPDTSKPFTLFLDERQGIAKGVLTQKLGPWKRPVAYLSKKLDPVAAGWPPCLRIMAATAMLVKDSAKLTLGQPLTVITPHTLEAIVRQPPDRWITNARLTHYQALLLDTDRVQFGPPVTLNPATLLPVPENQPSPHDCRQVLAETHGTREDLKDQELPDADHTWYTDGSSYLDSGTRRAGAAVVDGHNTIWAQSLPPGTSAQKAELIALTKALELSKGKKANIYTDSRYAFATAHTHGSIYERRGWLTSEGKEIKNKAEIIALLKALFLPQEVAIIHCPGHQKGQDPVAVGNRQADRVARQAAMAEVLTLATEPDNTSHITAGKRTADGSEFEKRTADGSEFESPKKKAKVE

SEQ ID NO: 1949 - protein, 2106 aa, synthetic construct
MPAAKRVKLDGGDKKYSIGLDIGTNSVGWAVITDEYKVPSKKFKVLGNTDRHSIKKNLIGALLFDSGETAEATRLKRTARRRYTRRKNRICYLQEIFSNEMAKVDDSFFHRLEESFLVEEDKKHERHPIFGNIVDEVAYHEKYPTIYHLRKKLVDSTDKADLRLIYLALAHMIKFRGHFLIEGDLNPDNSDVDKLFIQLVQTYNQLFEENPINASGVDAKAILSARLSKSRRLENLIAQLPGEKKNGLFGNLIALSLGLTPNFKSNFDLAEDAKLQLSKDTYDDDLDNLLAQIGDQYADLFLAAKNLSDAILLSDILRVNTEITKAPLSASMIKRYDEHHQDLTLLKALVRQQLPEKYKEIFFDQSKNGYAGYIDGGASQEEFYKFIKPILEKMDGTEELLVKLNREDLLRKQRTFDNGSIPHQIHLGELHAILRRQEDFYPFLKDNREKIEKILTFRIPYYVGPLARGNSRFAWMTRKSEETITPWNFEEVVDKGASAQSFIERMTNFDKNLPNEKVLPKHSLLYEYFTVYNELTKVKYVTEGMRKPAFLSGEQKKAIVDLLFKTNRKVTVKQLKEDYFKKIECFDSVEISGVEDRFNASLGTYHDLLKIIKDKDFLDNEENEDILEDIVLTLTLFEDREMIEERLKTYAHLFDDKVMKQLKRRRYTGWGRLSRKLINGIRDKQSGKTILDFLKSDGFANRNFMQLIHDDSLTFKEDIQKAQVSGQGDSLHEHIANLAGSPAIKKGILQTVKVVDELVKVMGRHKPENIVIEMARENQTTQKGQKNSRERMKRIEEGIKELGSQILKEHPVENTQLQNEKLYLYYLQNGRDMYVDQELDINRLSDYDVDHIVPQSFLKDDSIDNKVLTRSDKARGKSDNVPSEEVVKKMKNYWRQLLNAKLITQRKFDNLTKAERGGLSELDKAGFIKRQLVETRQITKHVAQILDSRMNTKYDENDKLIREVKVITLKSKLVSDFRKDFQFYKVREINNYHHAHDAYLNAVVGTALIKKYPKLESEFVYGDYKVYDVRKMIAKSEQEIGKATAKYFFYSNIMNFFKTEITLANGEIRKRPLIETNGETGEIVWDKGRDFATVRKVLSMPQVNIVKKTEVQTGGFSKESILPKRNSDKLIARKKDWDPKKYGGFDSPTVAYSVLVVAKVEKGKSKKLKSVKELLGITIMERSSFEKNPIDFLEAKGYKEVKKDLIIKLPKYSLFELENGRKRMLASAGELQKGNELALPSKYVNFLYLASHYEKLKGSPEDNEQKQLFVEQHKHYLDEIIEQISEFSKRVILADANLDKVLSAYNKHRDKPIREQAENIIHLFTLTNLGAPAAFKYFDTTIDRKRYTSTKEVLDATLIHQSITGLYETRIDLSQLGGDGGGGGGSEAAAKGGGGSGGTVSLQDEHRLFDIPVTTSLPDVWLQDFPQAWAETGGLGRAKCQAPIIIDLKPTAVPVSIKQYPMSLEAHMGIRQHIIKFLELGVLRPCRSPWNTPLLPVKKPGTQDYRPVQDLREINKRTVDIHPTVPNPYNLLSTLKPDYSWYTVLDLKDAFFCLPLAPQSQELFAFEWKDPERGISGQLTWTRLPQGFKNSPTLFNEALHRDLTDFRTQHPEVTLLQYVDDLLLAAPTKKACTQGTRHLLQELGEKGYRASAKKAQICQTKVTYLGYILSEGKRWLTPGRIETVARIPPPRNPREVREFLGKAGFCRLFIPGFAELAAPLYALTKPSTPFTWQTEHQLAFEALKKALLSAPALGLPDTSKPFTLFLDERQGIAKGVLTQKLGPWKRPVAYLSKKLDPVAAGWPPCLRIMAATAMLVKDSAKLTLGQPLTVITPHTLEAIVRQPPDRWITNARLTHYQALLLDTDRVQFGPPVTLNPATLLPVPENQPSPHDCRQVLAETHGTREDLKDQELPDADHTWYTDGSSYLDSGTRRAGAAVVDGHNTIWAQSLPPGTSAQKAELIALTKALELSKGKKANIYTDSRYAFATAHTHGSIYERRGWLTSEGKEIKNKAEIIALLKALFLPQEVAIIHCPGHQKGQDPVAVGNRQADRVARQAAMAEVLTLATEPDNTSHITAGKRTADGSEFEKRTADGSEFESPKKKAKVE

SEQ ID NO: 1950 - protein, 2097 aa, synthetic construct
MPAAKRVKLDGGDKKYSIGLDIGTNSVGWAVITDEYKVPSKKFKVLGNTDRHSIKKNLIGALLFDSGETAEATRLKRTARRRYTRRKNRICYLQEIFSNEMAKVDDSFFHRLEESFLVEEDKKHERHPIFGNIVDEVAYHEKYPTIYHLRKKLVDSTDKADLRLIYLALAHMIKFRGHFLIEGDLNPDNSDVDKLFIQLVQTYNQLFEENPINASGVDAKAILSARLSKSRRLENLIAQLPGEKKNGLFGNLIALSLGLTPNFKSNFDLAEDAKLQLSKDTYDDDLDNLLAQIGDQYADLFLAAKNLSDAILLSDILRVNTEITKAPLSASMIKRYDEHHQDLTLLKALVRQQLPEKYKEIFFDQSKNGYAGYIDGGASQEEFYKFIKPILEKMDGTEELLVKLNREDLLRKQRTFDNGSIPHQIHLGELHAILRRQEDFYPFLKDNREKIEKILTFRIPYYVGPLARGNSRFAWMTRKSEETITPWNFEEVVDKGASAQSFIERMTNFDKNLPNEKVLPKHSLLYEYFTVYNELTKVKYVTEGMRKPAFLSGEQKKAIVDLLFKTNRKVTVKQLKEDYFKKIECFDSVEISGVEDRFNASLGTYHDLLKIIKDKDFLDNEENEDILEDIVLTLTLFEDREMIEERLKTYAHLFDDKVMKQLKRRRYTGWGRLSRKLINGIRDKQSGKTILDFLKSDGFANRNFMQLIHDDSLTFKEDIQKAQVSGQGDSLHEHIANLAGSPAIKKGILQTVKVVDELVKVMGRHKPENIVIEMARENQTTQKGQKNSRERMKRIEEGIKELGSQILKEHPVENTQLQNEKLYLYYLQNGRDMYVDQELDINRLSDYDVDHIVPQSFLKDDSIDNKVLTRSDKARGKSDNVPSEEVVKKMKNYWRQLLNAKLITQRKFDNLTKAERGGLSELDKAGFIKRQLVETRQITKHVAQILDSRMNTKYDENDKLIREVKVITLKSKLVSDFRKDFQFYKVREINNYHHAHDAYLNAVVGTALIKKYPKLESEFVYGDYKVYDVRKMIAKSEQEIGKATAKYFFYSNIMNFFKTEITLANGEIRKRPLIETNGETGEIVWDKGRDFATVRKVLSMPQVNIVKKTEVQTGGFSKESILPKRNSDKLIARKKDWDPKKYGGFDSPTVAYSVLVVAKVEKGKSKKLKSVKELLGITIMERSSFEKNPIDFLEAKGYKEVKKDLIIKLPKYSLFELENGRKRMLASAGELQKGNELALPSKYVNFLYLASHYEKLKGSPEDNEQKQLFVEQHKHYLDEIIEQISEFSKRVILADANLDKVLSAYNKHRDKPIREQAENIIHLFTLTNLGAPAAFKYFDTTIDRKRYTSTKEVLDATLIHQSITGLYETRIDLSQLGGDGGGGGGSSGGTVSLQDEHRLFDIPVTTSLPDVWLQDFPQAWAETGGLGRAKCQAPIIIDLKPTAVPVSIKQYPMSLEAHMGIRQHIIKFLELGVLRPCRSPWNTPLLPVKKPGTQDYRPVQDLREINKRTVDIHPTVPNPYNLLSTLKPDYSWYTVLDLKDAFFCLPLAPQSQELFAFEWKDPERGISGQLTWTRLPQGFKNSPTLFNEALHRDLTDFRTQHPEVTLLQYVDDLLLAAPTKKACTQGTRHLLQELGEKGYRASAKKAQICQTKVTYLGYILSEGKRWLTPGRIETVARIPPPRNPREVREFLGKAGFCRLFIPGFAELAAPLYALTKPSTPFTWQTEHQLAFEALKKALLSAPALGLPDTSKPFTLFLDERQGIAKGVLTQKLGPWKRPVAYLSKKLDPVAAGWPPCLRIMAATAMLVKDSAKLTLGQPLTVITPHTLEAIVRQPPDRWITNARLTHYQALLLDTDRVQFGPPVTLNPATLLPVPENQPSPHDCRQVLAETHGTREDLKDQELPDADHTWYTDGSSYLDSGTRRAGAAVVDGHNTIWAQSLPPGTSAQKAELIALTKALELSKGKKANIYTDSRYAFATAHTHGSIYERRGWLTSEGKEIKNKAEIIALLKALFLPQEVAIIHCPGHQKGQDPVAVGNRQADRVARQAAMAEVLTLATEPDNTSHITAGKRTADGSEFEKRTADGSEFESPKKKAKVE

SEQ ID NO: 1951 - protein, 2102 aa, synthetic construct
MPAAKRVKLDGGDKKYSIGLDIGTNSVGWAVITDEYKVPSKKFKVLGNTDRHSIKKNLIGALLFDSGETAEATRLKRTARRRYTRRKNRICYLQEIFSNEMAKVDDSFFHRLEESFLVEEDKKHERHPIFGNIVDEVAYHEKYPTIYHLRKKLVDSTDKADLRLIYLALAHMIKFRGHFLIEGDLNPDNSDVDKLFIQLVQTYNQLFEENPINASGVDAKAILSARLSKSRRLENLIAQLPGEKKNGLFGNLIALSLGLTPNFKSNFDLAEDAKLQLSKDTYDDDLDNLLAQIGDQYADLFLAAKNLSDAILLSDILRVNTEITKAPLSASMIKRYDEHHQDLTLLKALVRQQLPEKYKEIFFDQSKNGYAGYIDGGASQEEFYKFIKPILEKMDGTEELLVKLNREDLLRKQRTFDNGSIPHQIHLGELHAILRRQEDFYPFLKDNREKIEKILTFRIPYYVGPLARGNSRFAWMTRKSEETITPWNFEEVVDKGASAQSFIERMTNFDKNLPNEKVLPKHSLLYEYFTVYNELTKVKYVTEGMRKPAFLSGEQKKAIVDLLFKTNRKVTVKQLKEDYFKKIECFDSVEISGVEDRFNASLGTYHDLLKIIKDKDFLDNEENEDILEDIVLTLTLFEDREMIEERLKTYAHLFDDKVMKQLKRRRYTGWGRLSRKLINGIRDKQSGKTILDFLKSDGFANRNFMQLIHDDSLTFKEDIQKAQVSGQGDSLHEHIANLAGSPAIKKGILQTVKVVDELVKVMGRHKPENIVIEMARENQTTQKGQKNSRERMKRIEEGIKELGSQILKEHPVENTQLQNEKLYLYYLQNGRDMYVDQELDINRLSDYDVDHIVPQSFLKDDSIDNKVLTRSDKARGKSDNVPSEEVVKKMKNYWRQLLNAKLITQRKFDNLTKAERGGLSELDKAGFIKRQLVETRQITKHVAQILDSRMNTKYDENDKLIREVKVITLKSKLVSDFRKDFQFYKVREINNYHHAHDAYLNAVVGTALIKKYPKLESEFVYGDYKVYDVRKMIAKSEQEIGKATAKYFFYSNIMNFFKTEITLANGEIRKRPLIETNGETGEIVWDKGRDFATVRKVLSMPQVNIVKKTEVQTGGFSKESILPKRNSDKLIARKKDWDPKKYGGFDSPTVAYSVLVVAKVEKGKSKKLKSVKELLGITIMERSSFEKNPIDFLEAKGYKEVKKDLIIKLPKYSLFELENGRKRMLASAGELQKGNELALPSKYVNFLYLASHYEKLKGSPEDNEQKQLFVEQHKHYLDEIIEQISEFSKRVILADANLDKVLSAYNKHRDKPIREQAENIIHLFTLTNLGAPAAFKYFDTTIDRKRYTSTKEVLDATLIHQSITGLYETRIDLSQLGGDGGGGSGSSEAAAKGGTVSLQDEHRLFDIPVTTSLPDVWLQDFPQAWAETGGLGRAKCQAPIIIDLKPTAVPVSIKQYPMSLEAHMGIRQHIIKFLELGVLRPCRSPWNTPLLPVKKPGTQDYRPVQDLREINKRTVDIHPTVPNPYNLLSTLKPDYSWYTVLDLKDAFFCLPLAPQSQELFAFEWKDPERGISGQLTWTRLPQGFKNSPTLFNEALHRDLTDFRTQHPEVTLLQYVDDLLLAAPTKKACTQGTRHLLQELGEKGYRASAKKAQICQTKVTYLGYILSEGKRWLTPGRIETVARIPPPRNPREVREFLGKAGFCRLFIPGFAELAAPLYALTKPSTPFTWQTEHQLAFEALKKALLSAPALGLPDTSKPFTLFLDERQGIAKGVLTQKLGPWKRPVAYLSKKLDPVAAGWPPCLRIMAATAMLVKDSAKLTLGQPLTVITPHTLEAIVRQPPDRWITNARLTHYQALLLDTDRVQFGPPVTLNPATLLPVPENQPSPHDCRQVLAETHGTREDLKDQELPDADHTWYTDGSSYLDSGTRRAGAAVVDGHNTIWAQSLPPGTSAQKAELIALTKALELSKGKKANIYTDSRYAFATAHTHGSIYERRGWLTSEGKEIKNKAEIIALLKALFLPQEVAIIHCPGHQKGQDPVAVGNRQADRVARQAAMAEVLTLATEPDNTSHITAGKRTADGSEFEKRTADGSEFESPKKKAKVE

SEQ ID NO: 1952 - protein, 2102 aa, synthetic construct
MPAAKRVKLDGGDKKYSIGLDIGTNSVGWAVITDEYKVPSKKFKVLGNTDRHSIKKNLIGALLFDSGETAEATRLKRTARRRYTRRKNRICYLQEIFSNEMAKVDDSFFHRLEESFLVEEDKKHERHPIFGNIVDEVAYHEKYPTIYHLRKKLVDSTDKADLRLIYLALAHMIKFRGHFLIEGDLNPDNSDVDKLFIQLVQTYNQLFEENPINASGVDAKAILSARLSKSRRLENLIAQLPGEKKNGLFGNLIALSLGLTPNFKSNFDLAEDAKLQLSKDTYDDDLDNLLAQIGDQYADLFLAAKNLSDAILLSDILRVNTEITKAPLSASMIKRYDEHHQDLTLLKALVRQQLPEKYKEIFFDQSKNGYAGYIDGGASQEEFYKFIKPILEKMDGTEELLVKLNREDLLRKQRTFDNGSIPHQIHLGELHAILRRQEDFYPFLKDNREKIEKILTFRIPYYVGPLARGNSRFAWMTRKSEETITPWNFEEVVDKGASAQSFIERMTNFDKNLPNEKVLPKHSLLYEYFTVYNELTKVKYVTEGMRKPAFLSGEQKKAIVDLLFKTNRKVTVKQLKEDYFKKIECFDSVEISGVEDRFNASLGTYHDLLKIIKDKDFLDNEENEDILEDIVLTLTLFEDREMIEERLKTYAHLFDDKVMKQLKRRRYTGWGRLSRKLINGIRDKQSGKTILDFLKSDGFANRNFMQLIHDDSLTFKEDIQKAQVSGQGDSLHEHIANLAGSPAIKKGILQTVKVVDELVKVMGRHKPENIVIEMARENQTTQKGQKNSRERMKRIEEGIKELGSQILKEHPVENTQLQNEKLYLYYLQNGRDMYVDQELDINRLSDYDVDHIVPQSFLKDDSIDNKVLTRSDKARGKSDNVPSEEVVKKMKNYWRQLLNAKLITQRKFDNLTKAERGGLSELDKAGFIKRQLVETRQITKHVAQILDSRMNTKYDENDKLIREVKVITLKSKLVSDFRKDFQFYKVREINNYHHAHDAYLNAVVGTALIKKYPKLESEFVYGDYKVYDVRKMIAKSEQEIGKATAKYFFYSNIMNFFKTEITLANGEIRKRPLIETNGETGEIVWDKGRDFATVRKVLSMPQVNIVKKTEVQTGGFSKESILPKRNSDKLIARKKDWDPKKYGGFDSPTVAYSVLVVAKVEKGKSKKLKSVKELLGITIMERSSFEKNPIDFLEAKGYKEVKKDLIIKLPKYSLFELENGRKRMLASAGELQKGNELALPSKYVNFLYLASHYEKLKGSPEDNEQKQLFVEQHKHYLDEIIEQISEFSKRVILADANLDKVLSAYNKHRDKPIREQAENIIHLFTLTNLGAPAAFKYFDTTIDRKRYTSTKEVLDATLIHQSITGLYETRIDLSQLGGDGGGSSGGGEAAAKGGTVSLQDEHRLFDIPVTTSLPDVWLQDFPQAWAETGGLGRAKCQAPIIIDLKPTAVPVSIKQYPMSLEAHMGIRQHIIKFLELGVLRPCRSPWNTPLLPVKKPGTQDYRPVQDLREINKRTVDIHPTVPNPYNLLSTLKPDYSWYTVLDLKDAFFCLPLAPQSQELFAFEWKDPERGISGQLTWTRLPQGFKNSPTLFNEALHRDLTDFRTQHPEVTLLQYVDDLLLAAPTKKACTQGTRHLLQELGEKGYRASAKKAQICQTKVTYLGYILSEGKRWLTPGRIETVARIPPPRNPREVREFLGKAGFCRLFIPGFAELAAPLYALTKPSTPFTWQTEHQLAFEALKKALLSAPALGLPDTSKPFTLFLDERQGIAKGVLTQKLGPWKRPVAYLSKKLDPVAAGWPPCLRIMAATAMLVKDSAKLTLGQPLTVITPHTLEAIVRQPPDRWITNARLTHYQALLLDTDRVQFGPPVTLNPATLLPVPENQPSPHDCRQVLAETHGTREDLKDQELPDADHTWYTDGSSYLDSGTRRAGAAVVDGHNTIWAQSLPPGTSAQKAELIALTKALELSKGKKANIYTDSRYAFATAHTHGSIYERRGWLTSEGKEIKNKAEIIALLKALFLPQEVAIIHCPGHQKGQDPVAVGNRQADRVARQAAMAEVLTLATEPDNTSHITAGKRTADGSEFEKRTADGSEFESPKKKAKVE

SEQ ID NO: 1953 - protein, 2098 aa, synthetic construct
MPAAKRVKLDGGDKKYSIGLDIGTNSVGWAVITDEYKVPSKKFKVLGNTDRHSIKKNLIGALLFDSGETAEATRLKRTARRRYTRRKNRICYLQEIFSNEMAKVDDSFFHRLEESFLVEEDKKHERHPIFGNIVDEVAYHEKYPTIYHLRKKLVDSTDKADLRLIYLALAHMIKFRGHFLIEGDLNPDNSDVDKLFIQLVQTYNQLFEENPINASGVDAKAILSARLSKSRRLENLIAQLPGEKKNGLFGNLIALSLGLTPNFKSNFDLAEDAKLQLSKDTYDDDLDNLLAQIGDQYADLFLAAKNLSDAILLSDILRVNTEITKAPLSASMIKRYDEHHQDLTLLKALVRQQLPEKYKEIFFDQSKNGYAGYIDGGASQEEFYKFIKPILEKMDGTEELLVKLNREDLLRKQRTFDNGSIPHQIHLGELHAILRRQEDFYPFLKDNREKIEKILTFRIPYYVGPLARGNSRFAWMTRKSEETITPWNFEEVVDKGASAQSFIERMTNFDKNLPNEKVLPKHSLLYEYFTVYNELTKVKYVTEGMRKPAFLSGEQKKAIVDLLFKTNRKVTVKQLKEDYFKKIECFDSVEISGVEDRFNASLGTYHDLLKIIKDKDFLDNEENEDILEDIVLTLTLFEDREMIEERLKTYAHLFDDKVMKQLKRRRYTGWGRLSRKLINGIRDKQSGKTILDFLKSDGFANRNFMQLIHDDSLTFKEDIQKAQVSGQGDSLHEHIANLAGSPAIKKGILQTVKVVDELVKVMGRHKPENIVIEMARENQTTQKGQKNSRERMKRIEEGIKELGSQILKEHPVENTQLQNEKLYLYYLQNGRDMYVDQELDINRLSDYDVDHIVPQSFLKDDSIDNKVLTRSDKARGKSDNVPSEEVVKKMKNYWRQLLNAKLITQRKFDNLTKAERGGLSELDKAGFIKRQLVETRQITKHVAQILDSRMNTKYDENDKLIREVKVITLKSKLVSDFRKDFQFYKVREINNYHHAHDAYLNAVVGTALIKKYPKLESEFVYGDYKVYDVRKMIAKSEQEIGKATAKYFFYSNIMNFFKTEITLANGEIRKRPLIETNGETGEIVWDKGRDFATVRKVLSMPQVNIVKKTEVQTGGFSKESILPKRNSDKLIARKKDWDPKKYGGFDSPTVAYSVLVVAKVEKGKSKKLKSVKELLGITIMERSSFEKNPIDFLEAKGYKEVKKDLIIKLPKYSLFELENGRKRMLASAGELQKGNELALPSKYVNFLYLASHYEKLKGSPEDNEQKQLFVEQHKHYLDEIIEQISEFSKRVILADANLDKVLSAYNKHRDKPIREQAENIIHLFTLTNLGAPAAFKYFDTTIDRKRYTSTKEVLDATLIHQSITGLYETRIDLSQLGGDGGPAPAPAPGGTVSLQDEHRLFDIPVTTSLPDVWLQDFPQAWAETGGLGRAKCQAPIIIDLKPTAVPVSIKQYPMSLEAHMGIRQHIIKFLELGVLRPCRSPWNTPLLPVKKPGTQDYRPVQDLREINKRTVDIHPTVPNPYNLLSTLKPDYSWYTVLDLKDAFFCLPLAPQSQELFAFEWKDPERGISGQLTWTRLPQGFKNSPTLFNEALHRDLTDFRTQHPEVTLLQYVDDLLLAAPTKKACTQGTRHLLQELGEKGYRASAKKAQICQTKVTYLGYILSEGKRWLTPGRIETVARIPPPRNPREVREFLGKAGFCRLFIPGFAELAAPLYALTKPSTPFTWQTEHQLAFEALKKALLSAPALGLPDTSKPFTLFLDERQGIAKGVLTQKLGPWKRPVAYLSKKLDPVAAGWPPCLRIMAATAMLVKDSAKLTLGQPLTVITPHTLEAIVRQPPDRWITNARLTHYQALLLDTDRVQFGPPVTLNPATLLPVPENQPSPHDCRQVLAETHGTREDLKDQELPDADHTWYTDGSSYLDSGTRRAGAAVVDGHNTIWAQSLPPGTSAQKAELIALTKALELSKGKKANIYTDSRYAFATAHTHGSIYERRGWLTSEGKEIKNKAEIIALLKALFLPQEVAIIHCPGHQKGQDPVAVGNRQADRVARQAAMAEVLTLATEPDNTSHITAGKRTADGSEFEKRTADGSEFESPKKKAKVE

SEQ ID NO: 1954 - protein, 2102 aa, synthetic construct
MPAAKRVKLDGGDKKYSIGLDIGTNSVGWAVITDEYKVPSKKFKVLGNTDRHSIKKNLIGALLFDSGETAEATRLKRTARRRYTRRKNRICYLQEIFSNEMAKVDDSFFHRLEESFLVEEDKKHERHPIFGNIVDEVAYHEKYPTIYHLRKKLVDSTDKADLRLIYLALAHMIKFRGHFLIEGDLNPDNSDVDKLFIQLVQTYNQLFEENPINASGVDAKAILSARLSKSRRLENLIAQLPGEKKNGLFGNLIALSLGLTPNFKSNFDLAEDAKLQLSKDTYDDDLDNLLAQIGDQYADLFLAAKNLSDAILLSDILRVNTEITKAPLSASMIKRYDEHHQDLTLLKALVRQQLPEKYKEIFFDQSKNGYAGYIDGGASQEEFYKFIKPILEKMDGTEELLVKLNREDLLRKQRTFDNGSIPHQIHLGELHAILRRQEDFYPFLKDNREKIEKILTFRIPYYVGPLARGNSRFAWMTRKSEETITPWNFEEVVDKGASAQSFIERMTNFDKNLPNEKVLPKHSLLYEYFTVYNELTKVKYVTEGMRKPAFLSGEQKKAIVDLLFKTNRKVTVKQLKEDYFKKIECFDSVEISGVEDRFNASLGTYHDLLKIIKDKDFLDNEENEDILEDIVLTLTLFEDREMIEERLKTYAHLFDDKVMKQLKRRRYTGWGRLSRKLINGIRDKQSGKTILDFLKSDGFANRNFMQLIHDDSLTFKEDIQKAQVSGQGDSLHEHIANLAGSPAIKKGILQTVKVVDELVKVMGRHKPENIVIEMARENQTTQKGQKNSRERMKRIEEGIKELGSQILKEHPVENTQLQNEKLYLYYLQNGRDMYVDQELDINRLSDYDVDHIVPQSFLKDDSIDNKVLTRSDKARGKSDNVPSEEVVKKMKNYWRQLLNAKLITQRKFDNLTKAERGGLSELDKAGFIKRQLVETRQITKHVAQILDSRMNTKYDENDKLIREVKVITLKSKLVSDFRKDFQFYKVREINNYHHAHDAYLNAVVGTALIKKYPKLESEFVYGDYKVYDVRKMIAKSEQEIGKATAKYFFYSNIMNFFKTEITLANGEIRKRPLIETNGETGEIVWDKGRDFATVRKVLSMPQVNIVKKTEVQTGGFSKESILPKRNSDKLIARKKDWDPKKYGGFDSPTVAYSVLVVAKVEKGKSKKLKSVKELLGITIMERSSFEKNPIDFLEAKGYKEVKKDLIIKLPKYSLFELENGRKRMLASAGELQKGNELALPSKYVNFLYLASHYEKLKGSPEDNEQKQLFVEQHKHYLDEIIEQISEFSKRVILADANLDKVLSAYNKHRDKPIREQAENIIHLFTLTNLGAPAAFKYFDTTIDRKRYTSTKEVLDATLIHQSITGLYETRIDLSQLGGDGGGGSPAPEAAAKGGTVSLQDEHRLFDIPVTTSLPDVWLQDFPQAWAETGGLGRAKCQAPIIIDLKPTAVPVSIKQYPMSLEAHMGIRQHIIKFLELGVLRPCRSPWNTPLLPVKKPGTQDYRPVQDLREINKRTVDIHPTVPNPYNLLSTLKPDYSWYTVLDLKDAFFCLPLAPQSQELFAFEWKDPERGISGQLTWTRLPQGFKNSPTLFNEALHRDLTDFRTQHPEVTLLQYVDDLLLAAPTKKACTQGTRHLLQELGEKGYRASAKKAQICQTKVTYLGYILSEGKRWLTPGRIETVARIPPPRNPREVREFLGKAGFCRLFIPGFAELAAPLYALTKPSTPFTWQTEHQLAFEALKKALLSAPALGLPDTSKPFTLFLDERQGIAKGVLTQKLGPWKRPVAYLSKKLDPVAAGWPPCLRIMAATAMLVKDSAKLTLGQPLTVITPHTLEAIVRQPPDRWITNARLTHYQALLLDTDRVQFGPPVTLNPATLLPVPENQPSPHDCRQVLAETHGTREDLKDQELPDADHTWYTDGSSYLDSGTRRAGAAVVDGHNTIWAQSLPPGTSAQKAELIALTKALELSKGKKANIYTDSRYAFATAHTHGSIYERRGWLTSEGKEIKNKAEIIALLKALFLPQEVAIIHCPGHQKGQDPVAVGNRQADRVARQAAMAEVLTLATEPDNTSHITAGKRTADGSEFEKRTADGSEFESPKKKAKVE

SEQ ID NO: 1955 - protein, 2103 aa, synthetic construct
MPAAKRVKLDGGDKKYSIGLDIGTNSVGWAVITDEYKVPSKKFKVLGNTDRHSIKKNLIGALLFDSGETAEATRLKRTARRRYTRRKNRICYLQEIFSNEMAKVDDSFFHRLEESFLVEEDKKHERHPIFGNIVDEVAYHEKYPTIYHLRKKLVDSTDKADLRLIYLALAHMIKFRGHFLIEGDLNPDNSDVDKLFIQLVQTYNQLFEENPINASGVDAKAILSARLSKSRRLENLIAQLPGEKKNGLFGNLIALSLGLTPNFKSNFDLAEDAKLQLSKDTYDDDLDNLLAQIGDQYADLFLAAKNLSDAILLSDILRVNTEITKAPLSASMIKRYDEHHQDLTLLKALVRQQLPEKYKEIFFDQSKNGYAGYIDGGASQEEFYKFIKPILEKMDGTEELLVKLNREDLLRKQRTFDNGSIPHQIHLGELHAILRRQEDFYPFLKDNREKIEKILTFRIPYYVGPLARGNSRFAWMTRKSEETITPWNFEEVVDKGASAQSFIERMTNFDKNLPNEKVLPKHSLLYEYFTVYNELTKVKYVTEGMRKPAFLSGEQKKAIVDLLFKTNRKVTVKQLKEDYFKKIECFDSVEISGVEDRFNASLGTYHDLLKIIKDKDFLDNEENEDILEDIVLTLTLFEDREMIEERLKTYAHLFDDKVMKQLKRRRYTGWGRLSRKLINGIRDKQSGKTILDFLKSDGFANRNFMQLIHDDSLTFKEDIQKAQVSGQGDSLHEHIANLAGSPAIKKGILQTVKVVDELVKVMGRHKPENIVIEMARENQTTQKGQKNSRERMKRIEEGIKELGSQILKEHPVENTQLQNEKLYLYYLQNGRDMYVDQELDINRLSDYDVDHIVPQSFLKDDSIDNKVLTRSDKARGKSDNVPSEEVVKKMKNYWRQLLNAKLITQRKFDNLTKAERGGLSELDKAGFIKRQLVETRQITKHVAQILDSRMNTKYDENDKLIREVKVITLKSKLVSDFRKDFQFYKVREINNYHHAHDAYLNAVVGTALIKKYPKLESEFVYGDYKVYDVRKMIAKSEQEIGKATAKYFFYSNIMNFFKTEITLANGEIRKRPLIETNGETGEIVWDKGRDFATVRKVLSMPQVNIVKKTEVQTGGFSKESILPKRNSDKLIARKKDWDPKKYGGFDSPTVAYSVLVVAKVEKGKSKKLKSVKELLGITIMERSSFEKNPIDFLEAKGYKEVKKDLIIKLPKYSLFELENGRKRMLASAGELQKGNELALPSKYVNFLYLASHYEKLKGSPEDNEQKQLFVEQHKHYLDEIIEQISEFSKRVILADANLDKVLSAYNKHRDKPIREQAENIIHLFTLTNLGAPAAFKYFDTTIDRKRYTSTKEVLDATLIHQSITGLYETRIDLSQLGGDGGGGSGGSGGSGGSGGTVSLQDEHRLFDIPVTTSLPDVWLQDFPQAWAETGGLGRAKCQAPIIIDLKPTAVPVSIKQYPMSLEAHMGIRQHIIKFLELGVLRPCRSPWNTPLLPVKKPGTQDYRPVQDLREINKRTVDIHPTVPNPYNLLSTLKPDYSWYTVLDLKDAFFCLPLAPQSQELFAFEWKDPERGISGQLTWTRLPQGFKNSPTLFNEALHRDLTDFRTQHPEVTLLQYVDDLLLAAPTKKACTQGTRHLLQELGEKGYRASAKKAQICQTKVTYLGYILSEGKRWLTPGRIETVARIPPPRNPREVREFLGKAGFCRLFIPGFAELAAPLYALTKPSTPFTWQTEHQLAFEALKKALLSAPALGLPDTSKPFTLFLDERQGIAKGVLTQKLGPWKRPVAYLSKKLDPVAAGWPPCLRIMAATAMLVKDSAKLTLGQPLTVITPHTLEAIVRQPPDRWITNARLTHYQALLLDTDRVQFGPPVTLNPATLLPVPENQPSPHDCRQVLAETHGTREDLKDQELPDADHTWYTDGSSYLDSGTRRAGAAVVDGHNTIWAQSLPPGTSAQKAELIALTKALELSKGKKANIYTDSRYAFATAHTHGSIYERRGWLTSEGKEIKNKAEIIALLKALFLPQEVAIIHCPGHQKGQDPVAVGNRQADRVARQAAMAEVLTLATEPDNTSHITAGKRTADGSEFEKRTADGSEFESPKKKAKVE

SEQ ID NO: 1956 - protein, 2097 aa, synthetic construct
MPAAKRVKLDGGDKKYSIGLDIGTNSVGWAVITDEYKVPSKKFKVLGNTDRHSIKKNLIGALLFDSGETAEATRLKRTARRRYTRRKNRICYLQEIFSNEMAKVDDSFFHRLEESFLVEEDKKHERHPIFGNIVDEVAYHEKYPTIYHLRKKLVDSTDKADLRLIYLALAHMIKFRGHFLIEGDLNPDNSDVDKLFIQLVQTYNQLFEENPINASGVDAKAILSARLSKSRRLENLIAQLPGEKKNGLFGNLIALSLGLTPNFKSNFDLAEDAKLQLSKDTYDDDLDNLLAQIGDQYADLFLAAKNLSDAILLSDILRVNTEITKAPLSASMIKRYDEHHQDLTLLKALVRQQLPEKYKEIFFDQSKNGYAGYIDGGASQEEFYKFIKPILEKMDGTEELLVKLNREDLLRKQRTFDNGSIPHQIHLGELHAILRRQEDFYPFLKDNREKIEKILTFRIPYYVGPLARGNSRFAWMTRKSEETITPWNFEEVVDKGASAQSFIERMTNFDKNLPNEKVLPKHSLLYEYFTVYNELTKVKYVTEGMRKPAFLSGEQKKAIVDLLFKTNRKVTVKQLKEDYFKKIECFDSVEISGVEDRFNASLGTYHDLLKIIKDKDFLDNEENEDILEDIVLTLTLFEDREMIEERLKTYAHLFDDKVMKQLKRRRYTGWGRLSRKLINGIRDKQSGKTILDFLKSDGFANRNFMQLIHDDSLTFKEDIQKAQVSGQGDSLHEHIANLAGSPAIKKGILQTVKVVDELVKVMGRHKPENIVIEMARENQTTQKGQKNSRERMKRIEEGIKELGSQILKEHPVENTQLQNEKLYLYYLQNGRDMYVDQELDINRLSDYDVDHIVPQSFLKDDSIDNKVLTRSDKARGKSDNVPSEEVVKKMKNYWRQLLNAKLITQRKFDNLTKAERGGLSELDKAGFIKRQLVETRQITKHVAQILDSRMNTKYDENDKLIREVKVITLKSKLVSDFRKDFQFYKVREINNYHHAHDAYLNAVVGTALIKKYPKLESEFVYGDYKVYDVRKMIAKSEQEIGKATAKYFFYSNIMNFFKTEITLANGEIRKRPLIETNGETGEIVWDKGRDFATVRKVLSMPQVNIVKKTEVQTGGFSKESILPKRNSDKLIARKKDWDPKKYGGFDSPTVAYSVLVVAKVEKGKSKKLKSVKELLGITIMERSSFEKNPIDFLEAKGYKEVKKDLIIKLPKYSLFELENGRKRMLASAGELQKGNELALPSKYVNFLYLASHYEKLKGSPEDNEQKQLFVEQHKHYLDEIIEQISEFSKRVILADANLDKVLSAYNKHRDKPIREQAENIIHLFTLTNLGAPAAFKYFDTTIDRKRYTSTKEVLDATLIHQSITGLYETRIDLSQLGGDGGGGGGGGGGTVSLQDEHRLFDIPVTTSLPDVWLQDFPQAWAETGGLGRAKCQAPIIIDLKPTAVPVSIKQYPMSLEAHMGIRQHIIKFLELGVLRPCRSPWNTPLLPVKKPGTQDYRPVQDLREINKRTVDIHPTVPNPYNLLSTLKPDYSWYTVLDLKDAFFCLPLAPQSQELFAFEWKDPERGISGQLTWTRLPQGFKNSPTLFNEALHRDLTDFRTQHPEVTLLQYVDDLLLAAPTKKACTQGTRHLLQELGEKGYRASAKKAQICQTKVTYLGYILSEGKRWLTPGRIETVARIPPPRNPREVREFLGKAGFCRLFIPGFAELAAPLYALTKPSTPFTWQTEHQLAFEALKKALLSAPALGLPDTSKPFTLFLDERQGIAKGVLTQKLGPWKRPVAYLSKKLDPVAAGWPPCLRIMAATAMLVKDSAKLTLGQPLTVITPHTLEAIVRQPPDRWITNARLTHYQALLLDTDRVQFGPPVTLNPATLLPVPENQPSPHDCRQVLAETHGTREDLKDQELPDADHTWYTDGSSYLDSGTRRAGAAVVDGHNTIWAQSLPPGTSAQKAELIALTKALELSKGKKANIYTDSRYAFATAHTHGSIYERRGWLTSEGKEIKNKAEIIALLKALFLPQEVAIIHCPGHQKGQDPVAVGNRQADRVARQAAMAEVLTLATEPDNTSHITAGKRTADGSEFEKRTADGSEFESPKKKAKVE

SEQ ID NO: 1957 - protein, 2109 aa, synthetic construct
MPAAKRVKLDGGDKKYSIGLDIGTNSVGWAVITDEYKVPSKKFKVLGNTDRHSIKKNLIGALLFDSGETAEATRLKRTARRRYTRRKNRICYLQEIFSNEMAKVDDSFFHRLEESFLVEEDKKHERHPIFGNIVDEVAYHEKYPTIYHLRKKLVDSTDKADLRLIYLALAHMIKFRGHFLIEGDLNPDNSDVDKLFIQLVQTYNQLFEENPINASGVDAKAILSARLSKSRRLENLIAQLPGEKKNGLFGNLIALSLGLTPNFKSNFDLAEDAKLQLSKDTYDDDLDNLLAQIGDQYADLFLAAKNLSDAILLSDILRVNTEITKAPLSASMIKRYDEHHQDLTLLKALVRQQLPEKYKEIFFDQSKNGYAGYIDGGASQEEFYKFIKPILEKMDGTEELLVKLNREDLLRKQRTFDNGSIPHQIHLGELHAILRRQEDFYPFLKDNREKIEKILTFRIPYYVGPLARGNSRFAWMTRKSEETITPWNFEEVVDKGASAQSFIERMTNFDKNLPNEKVLPKHSLLYEYFTVYNELTKVKYVTEGMRKPAFLSGEQKKAIVDLLFKTNRKVTVKQLKEDYFKKIECFDSVEISGVEDRFNASLGTYHDLLKIIKDKDFLDNEENEDILEDIVLTLTLFEDREMIEERLKTYAHLFDDKVMKQLKRRRYTGWGRLSRKLINGIRDKQSGKTILDFLKSDGFANRNFMQLIHDDSLTFKEDIQKAQVSGQGDSLHEHIANLAGSPAIKKGILQTVKVVDELVKVMGRHKPENIVIEMARENQTTQKGQKNSRERMKRIEEGIKELGSQILKEHPVENTQLQNEKLYLYYLQNGRDMYVDQELDINRLSDYDVDHIVPQSFLKDDSIDNKVLTRSDKARGKSDNVPSEEVVKKMKNYWRQLLNAKLITQRKFDNLTKAERGGLSELDKAGFIKRQLVETRQITKHVAQILDSRMNTKYDENDKLIREVKVITLKSKLVSDFRKDFQFYKVREINNYHHAHDAYLNAVVGTALIKKYPKLESEFVYGDYKVYDVRKMIAKSEQEIGKATAKYFFYSNIMNFFKTEITLANGEIRKRPLIETNGETGEIVWDKGRDFATVRKVLSMPQVNIVKKTEVQTGGFSKESILPKRNSDKLIARKKDWDPKKYGGFDSPTVAYSVLVVAKVEKGKSKKLKSVKELLGITIMERSSFEKNPIDFLEAKGYKEVKKDLIIKLPKYSLFELENGRKRMLASAGELQKGNELALPSKYVNFLYLASHYEKLKGSPEDNEQKQLFVEQHKHYLDEIIEQISEFSKRVILADANLDKVLSAYNKHRDKPIREQAENIIHLFTLTNLGAPAAFKYFDTTIDRKRYTSTKEVLDATLIHQSITGLYETRIDLSQLGGDGGGGSGGSGGSGGSGGSGGSGGTVSLQDEHRLFDIPVTTSLPDVWLQDFPQAWAETGGLGRAKCQAPIIIDLKPTAVPVSIKQYPMSLEAHMGIRQHIIKFLELGVLRPCRSPWNTPLLPVKKPGTQDYRPVQDLREINKRTVDIHPTVPNPYNLLSTLKPDYSWYTVLDLKDAFFCLPLAPQSQELFAFEWKDPERGISGQLTWTRLPQGFKNSPTLFNEALHRDLTDFRTQHPEVTLLQYVDDLLLAAPTKKACTQGTRHLLQELGEKGYRASAKKAQICQTKVTYLGYILSEGKRWLTPGRIETVARIPPPRNPREVREFLGKAGFCRLFIPGFAELAAPLYALTKPSTPFTWQTEHQLAFEALKKALLSAPALGLPDTSKPFTLFLDERQGIAKGVLTQKLGPWKRPVAYLSKKLDPVAAGWPPCLRIMAATAMLVKDSAKLTLGQPLTVITPHTLEAIVRQPPDRWITNARLTHYQALLLDTDRVQFGPPVTLNPATLLPVPENQPSPHDCRQVLAETHGTREDLKDQELPDADHTWYTDGSSYLDSGTRRAGAAVVDGHNTIWAQSLPPGTSAQKAELIALTKALELSKGKKANIYTDSRYAFATAHTHGSIYERRGWLTSEGKEIKNKAEIIALLKALFLPQEVAIIHCPGHQKGQDPVAVGNRQADRVARQAAMAEVLTLATEPDNTSHITAGKRTADGSEFEKRTADGSEFESPKKKAKVE

SEQ ID NO: 1958 - protein, 2100 aa, synthetic construct
MPAAKRVKLDGGDKKYSIGLDIGTNSVGWAVITDEYKVPSKKFKVLGNTDRHSIKKNLIGALLFDSGETAEATRLKRTARRRYTRRKNRICYLQEIFSNEMAKVDDSFFHRLEESFLVEEDKKHERHPIFGNIVDEVAYHEKYPTIYHLRKKLVDSTDKADLRLIYLALAHMIKFRGHFLIEGDLNPDNSDVDKLFIQLVQTYNQLFEENPINASGVDAKAILSARLSKSRRLENLIAQLPGEKKNGLFGNLIALSLGLTPNFKSNFDLAEDAKLQLSKDTYDDDLDNLLAQIGDQYADLFLAAKNLSDAILLSDILRVNTEITKAPLSASMIKRYDEHHQDLTLLKALVRQQLPEKYKEIFFDQSKNGYAGYIDGGASQEEFYKFIKPILEKMDGTEELLVKLNREDLLRKQRTFDNGSIPHQIHLGELHAILRRQEDFYPFLKDNREKIEKILTFRIPYYVGPLARGNSRFAWMTRKSEETITPWNFEEVVDKGASAQSFIERMTNFDKNLPNEKVLPKHSLLYEYFTVYNELTKVKYVTEGMRKPAFLSGEQKKAIVDLLFKTNRKVTVKQLKEDYFKKIECFDSVEISGVEDRFNASLGTYHDLLKIIKDKDFLDNEENEDILEDIVLTLTLFEDREMIEERLKTYAHLFDDKVMKQLKRRRYTGWGRLSRKLINGIRDKQSGKTILDFLKSDGFANRNFMQLIHDDSLTFKEDIQKAQVSGQGDSLHEHIANLAGSPAIKKGILQTVKVVDELVKVMGRHKPENIVIEMARENQTTQKGQKNSRERMKRIEEGIKELGSQILKEHPVENTQLQNEKLYLYYLQNGRDMYVDQELDINRLSDYDVDHIVPQSFLKDDSIDNKVLTRSDKARGKSDNVPSEEVVKKMKNYWRQLLNAKLITQRKFDNLTKAERGGLSELDKAGFIKRQLVETRQITKHVAQILDSRMNTKYDENDKLIREVKVITLKSKLVSDFRKDFQFYKVREINNYHHAHDAYLNAVVGTALIKKYPKLESEFVYGDYKVYDVRKMIAKSEQEIGKATAKYFFYSNIMNFFKTEITLANGEIRKRPLIETNGETGEIVWDKGRDFATVRKVLSMPQVNIVKKTEVQTGGFSKESILPKRNSDKLIARKKDWDPKKYGGFDSPTVAYSVLVVAKVEKGKSKKLKSVKELLGITIMERSSFEKNPIDFLEAKGYKEVKKDLIIKLPKYSLFELENGRKRMLASAGELQKGNELALPSKYVNFLYLASHYEKLKGSPEDNEQKQLFVEQHKHYLDEIIEQISEFSKRVILADANLDKVLSAYNKHRDKPIREQAENIIHLFTLTNLGAPAAFKYFDTTIDRKRYTSTKEVLDATLIHQSITGLYETRIDLSQLGGDGGGGSGSSPAPGGTVSLQDEHRLFDIPVTTSLPDVWLQDFPQAWAETGGLGRAKCQAPIIIDLKPTAVPVSIKQYPMSLEAHMGIRQHIIKFLELGVLRPCRSPWNTPLLPVKKPGTQDYRPVQDLREINKRTVDIHPTVPNPYNLLSTLKPDYSWYTVLDLKDAFFCLPLAPQSQELFAFEWKDPERGISGQLTWTRLPQGFKNSPTLFNEALHRDLTDFRTQHPEVTLLQYVDDLLLAAPTKKACTQGTRHLLQELGEKGYRASAKKAQICQTKVTYLGYILSEGKRWLTPGRIETVARIPPPRNPREVREFLGKAGFCRLFIPGFAELAAPLYALTKPSTPFTWQTEHQLAFEALKKALLSAPALGLPDTSKPFTLFLDERQGIAKGVLTQKLGPWKRPVAYLSKKLDPVAAGWPPCLRIMAATAMLVKDSAKLTLGQPLTVITPHTLEAIVRQPPDRWITNARLTHYQALLLDTDRVQFGPPVTLNPATLLPVPENQPSPHDCRQVLAETHGTREDLKDQELPDADHTWYTDGSSYLDSGTRRAGAAVVDGHNTIWAQSLPPGTSAQKAELIALTKALELSKGKKANIYTDSRYAFATAHTHGSIYERRGWLTSEGKEIKNKAEIIALLKALFLPQEVAIIHCPGHQKGQDPVAVGNRQADRVARQAAMAEVLTLATEPDNTSHITAGKRTADGSEFEKRTADGSEFESPKKKAKVE

SEQ ID NO: 1959 - protein, 2102 aa, synthetic construct
MPAAKRVKLDGGDKKYSIGLDIGTNSVGWAVITDEYKVPSKKFKVLGNTDRHSIKKNLIGALLFDSGETAEATRLKRTARRRYTRRKNRICYLQEIFSNEMAKVDDSFFHRLEESFLVEEDKKHERHPIFGNIVDEVAYHEKYPTIYHLRKKLVDSTDKADLRLIYLALAHMIKFRGHFLIEGDLNPDNSDVDKLFIQLVQTYNQLFEENPINASGVDAKAILSARLSKSRRLENLIAQLPGEKKNGLFGNLIALSLGLTPNFKSNFDLAEDAKLQLSKDTYDDDLDNLLAQIGDQYADLFLAAKNLSDAILLSDILRVNTEITKAPLSASMIKRYDEHHQDLTLLKALVRQQLPEKYKEIFFDQSKNGYAGYIDGGASQEEFYKFIKPILEKMDGTEELLVKLNREDLLRKQRTFDNGSIPHQIHLGELHAILRRQEDFYPFLKDNREKIEKILTFRIPYYVGPLARGNSRFAWMTRKSEETITPWNFEEVVDKGASAQSFIERMTNFDKNLPNEKVLPKHSLLYEYFTVYNELTKVKYVTEGMRKPAFLSGEQKKAIVDLLFKTNRKVTVKQLKEDYFKKIECFDSVEISGVEDRFNASLGTYHDLLKIIKDKDFLDNEENEDILEDIVLTLTLFEDREMIEERLKTYAHLFDDKVMKQLKRRRYTGWGRLSRKLINGIRDKQSGKTILDFLKSDGFANRNFMQLIHDDSLTFKEDIQKAQVSGQGDSLHEHIANLAGSPAIKKGILQTVKVVDELVKVMGRHKPENIVIEMARENQTTQKGQKNSRERMKRIEEGIKELGSQILKEHPVENTQLQNEKLYLYYLQNGRDMYVDQELDINRLSDYDVDHIVPQSFLKDDSIDNKVLTRSDKARGKSDNVPSEEVVKKMKNYWRQLLNAKLITQRKFDNLTKAERGGLSELDKAGFIKRQLVETRQITKHVAQILDSRMNTKYDENDKLIREVKVITLKSKLVSDFRKDFQFYKVREINNYHHAHDAYLNAVVGTALIKKYPKLESEFVYGDYKVYDVRKMIAKSEQEIGKATAKYFFYSNIMNFFKTEITLANGEIRKRPLIETNGETGEIVWDKGRDFATVRKVLSMPQVNIVKKTEVQTGGFSKESILPKRNSDKLIARKKDWDPKKYGGFDSPTVAYSVLVVAKVEKGKSKKLKSVKELLGITIMERSSFEKNPIDFLEAKGYKEVKKDLIIKLPKYSLFELENGRKRMLASAGELQKGNELALPSKYVNFLYLASHYEKLKGSPEDNEQKQLFVEQHKHYLDEIIEQISEFSKRVILADANLDKVLSAYNKHRDKPIREQAENIIHLFTLTNLGAPAAFKYFDTTIDRKRYTSTKEVLDATLIHQSITGLYETRIDLSQLGGDGGGSSEAAAKGGSGGTVSLQDEHRLFDIPVTTSLPDVWLQDFPQAWAETGGLGRAKCQAPIIIDLKPTAVPVSIKQYPMSLEAHMGIRQHIIKFLELGVLRPCRSPWNTPLLPVKKPGTQDYRPVQDLREINKRTVDIHPTVPNPYNLLSTLKPDYSWYTVLDLKDAFFCLPLAPQSQELFAFEWKDPERGISGQLTWTRLPQGFKNSPTLFNEALHRDLTDFRTQHPEVTLLQYVDDLLLAAPTKKACTQGTRHLLQELGEKGYRASAKKAQICQTKVTYLGYILSEGKRWLTPGRIETVARIPPPRNPREVREFLGKAGFCRLFIPGFAELAAPLYALTKPSTPFTWQTEHQLAFEALKKALLSAPALGLPDTSKPFTLFLDERQGIAKGVLTQKLGPWKRPVAYLSKKLDPVAAGWPPCLRIMAATAMLVKDSAKLTLGQPLTVITPHTLEAIVRQPPDRWITNARLTHYQALLLDTDRVQFGPPVTLNPATLLPVPENQPSPHDCRQVLAETHGTREDLKDQELPDADHTWYTDGSSYLDSGTRRAGAAVVDGHNTIWAQSLPPGTSAQKAELIALTKALELSKGKKANIYTDSRYAFATAHTHGSIYERRGWLTSEGKEIKNKAEIIALLKALFLPQEVAIIHCPGHQKGQDPVAVGNRQADRVARQAAMAEVLTLATEPDNTSHITAGKRTADGSEFEKRTADGSEFESPKKKAKVE

SEQ ID NO: 1960 - protein, 2099 aa, synthetic construct
MPAAKRVKLDGGDKKYSIGLDIGTNSVGWAVITDEYKVPSKKFKVLGNTDRHSIKKNLIGALLFDSGETAEATRLKRTARRRYTRRKNRICYLQEIFSNEMAKVDDSFFHRLEESFLVEEDKKHERHPIFGNIVDEVAYHEKYPTIYHLRKKLVDSTDKADLRLIYLALAHMIKFRGHFLIEGDLNPDNSDVDKLFIQLVQTYNQLFEENPINASGVDAKAILSARLSKSRRLENLIAQLPGEKKNGLFGNLIALSLGLTPNFKSNFDLAEDAKLQLSKDTYDDDLDNLLAQIGDQYADLFLAAKNLSDAILLSDILRVNTEITKAPLSASMIKRYDEHHQDLTLLKALVRQQLPEKYKEIFFDQSKNGYAGYIDGGASQEEFYKFIKPILEKMDGTEELLVKLNREDLLRKQRTFDNGSIPHQIHLGELHAILRRQEDFYPFLKDNREKIEKILTFRIPYYVGPLARGNSRFAWMTRKSEETITPWNFEEVVDKGASAQSFIERMTNFDKNLPNEKVLPKHSLLYEYFTVYNELTKVKYVTEGMRKPAFLSGEQKKAIVDLLFKTNRKVTVKQLKEDYFKKIECFDSVEISGVEDRFNASLGTYHDLLKIIKDKDFLDNEENEDILEDIVLTLTLFEDREMIEERLKTYAHLFDDKVMKQLKRRRYTGWGRLSRKLINGIRDKQSGKTILDFLKSDGFANRNFMQLIHDDSLTFKEDIQKAQVSGQGDSLHEHIANLAGSPAIKKGILQTVKVVDELVKVMGRHKPENIVIEMARENQTTQKGQKNSRERMKRIEEGIKELGSQILKEHPVENTQLQNEKLYLYYLQNGRDMYVDQELDINRLSDYDVDHIVPQSFLKDDSIDNKVLTRSDKARGKSDNVPSEEVVKKMKNYWRQLLNAKLITQRKFDNLTKAERGGLSELDKAGFIKRQLVETRQITKHVAQILDSRMNTKYDENDKLIREVKVITLKSKLVSDFRKDFQFYKVREINNYHHAHDAYLNAVVGTALIKKYPKLESEFVYGDYKVYDVRKMIAKSEQEIGKATAKYFFYSNIMNFFKTEITLANGEIRKRPLIETNGETGEIVWDKGRDFATVRKVLSMPQVNIVKKTEVQTGGFSKESILPKRNSDKLIARKKDWDPKKYGGFDSPTVAYSVLVVAKVEKGKSKKLKSVKELLGITIMERSSFEKNPIDFLEAKGYKEVKKDLIIKLPKYSLFELENGRKRMLASAGELQKGNELALPSKYVNFLYLASHYEKLKGSPEDNEQKQLFVEQHKHYLDEIIEQISEFSKRVILADANLDKVLSAYNKHRDKPIREQAENIIHLFTLTNLGAPAAFKYFDTTIDRKRYTSTKEVLDATLIHQSITGLYETRIDLSQLGGDGGEAAAKPAPGGTVSLQDEHRLFDIPVTTSLPDVWLQDFPQAWAETGGLGRAKCQAPIIIDLKPTAVPVSIKQYPMSLEAHMGIRQHIIKFLELGVLRPCRSPWNTPLLPVKKPGTQDYRPVQDLREINKRTVDIHPTVPNPYNLLSTLKPDYSWYTVLDLKDAFFCLPLAPQSQELFAFEWKDPERGISGQLTWTRLPQGFKNSPTLFNEALHRDLTDFRTQHPEVTLLQYVDDLLLAAPTKKACTQGTRHLLQELGEKGYRASAKKAQICQTKVTYLGYILSEGKRWLTPGRIETVARIPPPRNPREVREFLGKAGFCRLFIPGFAELAAPLYALTKPSTPFTWQTEHQLAFEALKKALLSAPALGLPDTSKPFTLFLDERQGIAKGVLTQKLGPWKRPVAYLSKKLDPVAAGWPPCLRIMAATAMLVKDSAKLTLGQPLTVITPHTLEAIVRQPPDRWITNARLTHYQALLLDTDRVQFGPPVTLNPATLLPVPENQPSPHDCRQVLAETHGTREDLKDQELPDADHTWYTDGSSYLDSGTRRAGAAVVDGHNTIWAQSLPPGTSAQKAELIALTKALELSKGKKANIYTDSRYAFATAHTHGSIYERRGWLTSEGKEIKNKAEIIALLKALFLPQEVAIIHCPGHQKGQDPVAVGNRQADRVARQAAMAEVLTLATEPDNTSHITAGKRTADGSEFEKRTADGSEFESPKKKAKVE

SEQ ID NO: 1961 - protein, 2100 aa, synthetic construct
MPAAKRVKLDGGDKKYSIGLDIGTNSVGWAVITDEYKVPSKKFKVLGNTDRHSIKKNLIGALLFDSGETAEATRLKRTARRRYTRRKNRICYLQEIFSNEMAKVDDSFFHRLEESFLVEEDKKHERHPIFGNIVDEVAYHEKYPTIYHLRKKLVDSTDKADLRLIYLALAHMIKFRGHFLIEGDLNPDNSDVDKLFIQLVQTYNQLFEENPINASGVDAKAILSARLSKSRRLENLIAQLPGEKKNGLFGNLIALSLGLTPNFKSNFDLAEDAKLQLSKDTYDDDLDNLLAQIGDQYADLFLAAKNLSDAILLSDILRVNTEITKAPLSASMIKRYDEHHQDLTLLKALVRQQLPEKYKEIFFDQSKNGYAGYIDGGASQEEFYKFIKPILEKMDGTEELLVKLNREDLLRKQRTFDNGSIPHQIHLGELHAILRRQEDFYPFLKDNREKIEKILTFRIPYYVGPLARGNSRFAWMTRKSEETITPWNFEEVVDKGASAQSFIERMTNFDKNLPNEKVLPKHSLLYEYFTVYNELTKVKYVTEGMRKPAFLSGEQKKAIVDLLFKTNRKVTVKQLKEDYFKKIECFDSVEISGVEDRFNASLGTYHDLLKIIKDKDFLDNEENEDILEDIVLTLTLFEDREMIEERLKTYAHLFDDKVMKQLKRRRYTGWGRLSRKLINGIRDKQSGKTILDFLKSDGFANRNFMQLIHDDSLTFKEDIQKAQVSGQGDSLHEHIANLAGSPAIKKGILQTVKVVDELVKVMGRHKPENIVIEMARENQTTQKGQKNSRERMKRIEEGIKELGSQILKEHPVENTQLQNEKLYLYYLQNGRDMYVDQELDINRLSDYDVDHIVPQSFLKDDSIDNKVLTRSDKARGKSDNVPSEEVVKKMKNYWRQLLNAKLITQRKFDNLTKAERGGLSELDKAGFIKRQLVETRQITKHVAQILDSRMNTKYDENDKLIREVKVITLKSKLVSDFRKDFQFYKVREINNYHHAHDAYLNAVVGTALIKKYPKLESEFVYGDYKVYDVRKMIAKSEQEIGKATAKYFFYSNIMNFFKTEITLANGEIRKRPLIETNGETGEIVWDKGRDFATVRKVLSMPQVNIVKKTEVQTGGFSKESILPKRNSDKLIARKKDWDPKKYGGFDSPTVAYSVLVVAKVEKGKSKKLKSVKELLGITIMERSSFEKNPIDFLEAKGYKEVKKDLIIKLPKYSLFELENGRKRMLASAGELQKGNELALPSKYVNFLYLASHYEKLKGSPEDNEQKQLFVEQHKHYLDEIIEQISEFSKRVILADANLDKVLSAYNKHRDKPIREQAENIIHLFTLTNLGAPAAFKYFDTTIDRKRYTSTKEVLDATLIHQSITGLYETRIDLSQLGGDGGPAPGSSGGSGGTVSLQDEHRLFDIPVTTSLPDVWLQDFPQAWAETGGLGRAKCQAPIIIDLKPTAVPVSIKQYPMSLEAHMGIRQHIIKFLELGVLRPCRSPWNTPLLPVKKPGTQDYRPVQDLREINKRTVDIHPTVPNPYNLLSTLKPDYSWYTVLDLKDAFFCLPLAPQSQELFAFEWKDPERGISGQLTWTRLPQGFKNSPTLFNEALHRDLTDFRTQHPEVTLLQYVDDLLLAAPTKKACTQGTRHLLQELGEKGYRASAKKAQICQTKVTYLGYILSEGKRWLTPGRIETVARIPPPRNPREVREFLGKAGFCRLFIPGFAELAAPLYALTKPSTPFTWQTEHQLAFEALKKALLSAPALGLPDTSKPFTLFLDERQGIAKGVLTQKLGPWKRPVAYLSKKLDPVAAGWPPCLRIMAATAMLVKDSAKLTLGQPLTVITPHTLEAIVRQPPDRWITNARLTHYQALLLDTDRVQFGPPVTLNPATLLPVPENQPSPHDCRQVLAETHGTREDLKDQELPDADHTWYTDGSSYLDSGTRRAGAAVVDGHNTIWAQSLPPGTSAQKAELIALTKALELSKGKKANIYTDSRYAFATAHTHGSIYERRGWLTSEGKEIKNKAEIIALLKALFLPQEVAIIHCPGHQKGQDPVAVGNRQADRVARQAAMAEVLTLATEPDNTSHITAGKRTADGSEFEKRTADGSEFESPKKKAKVE

SEQ ID NO: 1962 - protein, 2100 aa, synthetic construct
MPAAKRVKLDGGDKKYSIGLDIGTNSVGWAVITDEYKVPSKKFKVLGNTDRHSIKKNLIGALLFDSGETAEATRLKRTARRRYTRRKNRICYLQEIFSNEMAKVDDSFFHRLEESFLVEEDKKHERHPIFGNIVDEVAYHEKYPTIYHLRKKLVDSTDKADLRLIYLALAHMIKFRGHFLIEGDLNPDNSDVDKLFIQLVQTYNQLFEENPINASGVDAKAILSARLSKSRRLENLIAQLPGEKKNGLFGNLIALSLGLTPNFKSNFDLAEDAKLQLSKDTYDDDLDNLLAQIGDQYADLFLAAKNLSDAILLSDILRVNTEITKAPLSASMIKRYDEHHQDLTLLKALVRQQLPEKYKEIFFDQSKNGYAGYIDGGASQEEFYKFIKPILEKMDGTEELLVKLNREDLLRKQRTFDNGSIPHQIHLGELHAILRRQEDFYPFLKDNREKIEKILTFRIPYYVGPLARGNSRFAWMTRKSEETITPWNFEEVVDKGASAQSFIERMTNFDKNLPNEKVLPKHSLLYEYFTVYNELTKVKYVTEGMRKPAFLSGEQKKAIVDLLFKTNRKVTVKQLKEDYFKKIECFDSVEISGVEDRFNASLGTYHDLLKIIKDKDFLDNEENEDILEDIVLTLTLFEDREMIEERLKTYAHLFDDKVMKQLKRRRYTGWGRLSRKLINGIRDKQSGKTILDFLKSDGFANRNFMQLIHDDSLTFKEDIQKAQVSGQGDSLHEHIANLAGSPAIKKGILQTVKVVDELVKVMGRHKPENIVIEMARENQTTQKGQKNSRERMKRIEEGIKELGSQILKEHPVENTQLQNEKLYLYYLQNGRDMYVDQELDINRLSDYDVDHIVPQSFLKDDSIDNKVLTRSDKARGKSDNVPSEEVVKKMKNYWRQLLNAKLITQRKFDNLTKAERGGLSELDKAGFIKRQLVETRQITKHVAQILDSRMNTKYDENDKLIREVKVITLKSKLVSDFRKDFQFYKVREINNYHHAHDAYLNAVVGTALIKKYPKLESEFVYGDYKVYDVRKMIAKSEQEIGKATAKYFFYSNIMNFFKTEITLANGEIRKRPLIETNGETGEIVWDKGRDFATVRKVLSMPQVNIVKKTEVQTGGFSKESILPKRNSDKLIARKKDWDPKKYGGFDSPTVAYSVLVVAKVEKGKSKKLKSVKELLGITIMERSSFEKNPIDFLEAKGYKEVKKDLIIKLPKYSLFELENGRKRMLASAGELQKGNELALPSKYVNFLYLASHYEKLKGSPEDNEQKQLFVEQHKHYLDEIIEQISEFSKRVILADANLDKVLSAYNKHRDKPIREQAENIIHLFTLTNLGAPAAFKYFDTTIDRKRYTSTKEVLDATLIHQSITGLYETRIDLSQLGGDGGGSSPAPGGGGGTVSLQDEHRLFDIPVTTSLPDVWLQDFPQAWAETGGLGRAKCQAPIIIDLKPTAVPVSIKQYPMSLEAHMGIRQHIIKFLELGVLRPCRSPWNTPLLPVKKPGTQDYRPVQDLREINKRTVDIHPTVPNPYNLLSTLKPDYSWYTVLDLKDAFFCLPLAPQSQELFAFEWKDPERGISGQLTWTRLPQGFKNSPTLFNEALHRDLTDFRTQHPEVTLLQYVDDLLLAAPTKKACTQGTRHLLQELGEKGYRASAKKAQICQTKVTYLGYILSEGKRWLTPGRIETVARIPPPRNPREVREFLGKAGFCRLFIPGFAELAAPLYALTKPSTPFTWQTEHQLAFEALKKALLSAPALGLPDTSKPFTLFLDERQGIAKGVLTQKLGPWKRPVAYLSKKLDPVAAGWPPCLRIMAATAMLVKDSAKLTLGQPLTVITPHTLEAIVRQPPDRWITNARLTHYQALLLDTDRVQFGPPVTLNPATLLPVPENQPSPHDCRQVLAETHGTREDLKDQELPDADHTWYTDGSSYLDSGTRRAGAAVVDGHNTIWAQSLPPGTSAQKAELIALTKALELSKGKKANIYTDSRYAFATAHTHGSIYERRGWLTSEGKEIKNKAEIIALLKALFLPQEVAIIHCPGHQKGQDPVAVGNRQADRVARQAAMAEVLTLATEPDNTSHITAGKRTADGSEFEKRTADGSEFESPKKKAKVE

SEQ ID NO: 1963 - protein, 2101 aa, synthetic construct
MPAAKRVKLDGGDKKYSIGLDIGTNSVGWAVITDEYKVPSKKFKVLGNTDRHSIKKNLIGALLFDSGETAEATRLKRTARRRYTRRKNRICYLQEIFSNEMAKVDDSFFHRLEESFLVEEDKKHERHPIFGNIVDEVAYHEKYPTIYHLRKKLVDSTDKADLRLIYLALAHMIKFRGHFLIEGDLNPDNSDVDKLFIQLVQTYNQLFEENPINASGVDAKAILSARLSKSRRLENLIAQLPGEKKNGLFGNLIALSLGLTPNFKSNFDLAEDAKLQLSKDTYDDDLDNLLAQIGDQYADLFLAAKNLSDAILLSDILRVNTEITKAPLSASMIKRYDEHHQDLTLLKALVRQQLPEKYKEIFFDQSKNGYAGYIDGGASQEEFYKFIKPILEKMDGTEELLVKLNREDLLRKQRTFDNGSIPHQIHLGELHAILRRQEDFYPFLKDNREKIEKILTFRIPYYVGPLARGNSRFAWMTRKSEETITPWNFEEVVDKGASAQSFIERMTNFDKNLPNEKVLPKHSLLYEYFTVYNELTKVKYVTEGMRKPAFLSGEQKKAIVDLLFKTNRKVTVKQLKEDYFKKIECFDSVEISGVEDRFNASLGTYHDLLKIIKDKDFLDNEENEDILEDIVLTLTLFEDREMIEERLKTYAHLFDDKVMKQLKRRRYTGWGRLSRKLINGIRDKQSGKTILDFLKSDGFANRNFMQLIHDDSLTFKEDIQKAQVSGQGDSLHEHIANLAGSPAIKKGILQTVKVVDELVKVMGRHKPENIVIEMARENQTTQKGQKNSRERMKRIEEGIKELGSQILKEHPVENTQLQNEKLYLYYLQNGRDMYVDQELDINRLSDYDVDHIVPQSFLKDDSIDNKVLTRSDKARGKSDNVPSEEVVKKMKNYWRQLLNAKLITQRKFDNLTKAERGGLSELDKAGFIKRQLVETRQITKHVAQILDSRMNTKYDENDKLIREVKVITLKSKLVSDFRKDFQFYKVREINNYHHAHDAYLNAVVGTALIKKYPKLESEFVYGDYKVYDVRKMIAKSEQEIGKATAKYFFYSNIMNFFKTEITLANGEIRKRPLIETNGETGEIVWDKGRDFATVRKVLSMPQVNIVKKTEVQTGGFSKESILPKRNSDKLIARKKDWDPKKYGGFDSPTVAYSVLVVAKVEKGKSKKLKSVKELLGITIMERSSFEKNPIDFLEAKGYKEVKKDLIIKLPKYSLFELENGRKRMLASAGELQKGNELALPSKYVNFLYLASHYEKLKGSPEDNEQKQLFVEQHKHYLDEIIEQISEFSKRVILADANLDKVLSAYNKHRDKPIREQAENIIHLFTLTNLGAPAAFKYFDTTIDRKRYTSTKEVLDATLIHQSITGLYETRIDLSQLGGDGGEAAAKEAAAKGGTVSLQDEHRLFDIPVTTSLPDVWLQDFPQAWAETGGLGRAKCQAPIIIDLKPTAVPVSIKQYPMSLEAHMGIRQHIIKFLELGVLRPCRSPWNTPLLPVKKPGTQDYRPVQDLREINKRTVDIHPTVPNPYNLLSTLKPDYSWYTVLDLKDAFFCLPLAPQSQELFAFEWKDPERGISGQLTWTRLPQGFKNSPTLFNEALHRDLTDFRTQHPEVTLLQYVDDLLLAAPTKKACTQGTRHLLQELGEKGYRASAKKAQICQTKVTYLGYILSEGKRWLTPGRIETVARIPPPRNPREVREFLGKAGFCRLFIPGFAELAAPLYALTKPSTPFTWQTEHQLAFEALKKALLSAPALGLPDTSKPFTLFLDERQGIAKGVLTQKLGPWKRPVAYLSKKLDPVAAGWPPCLRIMAATAMLVKDSAKLTLGQPLTVITPHTLEAIVRQPPDRWITNARLTHYQALLLDTDRVQFGPPVTLNPATLLPVPENQPSPHDCRQVLAETHGTREDLKDQELPDADHTWYTDGSSYLDSGTRRAGAAVVDGHNTIWAQSLPPGTSAQKAELIALTKALELSKGKKANIYTDSRYAFATAHTHGSIYERRGWLTSEGKEIKNKAEIIALLKALFLPQEVAIIHCPGHQKGQDPVAVGNRQADRVARQAAMAEVLTLATEPDNTSHITAGKRTADGSEFEKRTADGSEFESPKKKAKVE

SEQ ID NO: 1964 - protein, 2100 aa, synthetic construct
MPAAKRVKLDGGDKKYSIGLDIGTNSVGWAVITDEYKVPSKKFKVLGNTDRHSIKKNLIGALLFDSGETAEATRLKRTARRRYTRRKNRICYLQEIFSNEMAKVDDSFFHRLEESFLVEEDKKHERHPIFGNIVDEVAYHEKYPTIYHLRKKLVDSTDKADLRLIYLALAHMIKFRGHFLIEGDLNPDNSDVDKLFIQLVQTYNQLFEENPINASGVDAKAILSARLSKSRRLENLIAQLPGEKKNGLFGNLIALSLGLTPNFKSNFDLAEDAKLQLSKDTYDDDLDNLLAQIGDQYADLFLAAKNLSDAILLSDILRVNTEITKAPLSASMIKRYDEHHQDLTLLKALVRQQLPEKYKEIFFDQSKNGYAGYIDGGASQEEFYKFIKPILEKMDGTEELLVKLNREDLLRKQRTFDNGSIPHQIHLGELHAILRRQEDFYPFLKDNREKIEKILTFRIPYYVGPLARGNSRFAWMTRKSEETITPWNFEEVVDKGASAQSFIERMTNFDKNLPNEKVLPKHSLLYEYFTVYNELTKVKYVTEGMRKPAFLSGEQKKAIVDLLFKTNRKVTVKQLKEDYFKKIECFDSVEISGVEDRFNASLGTYHDLLKIIKDKDFLDNEENEDILEDIVLTLTLFEDREMIEERLKTYAHLFDDKVMKQLKRRRYTGWGRLSRKLINGIRDKQSGKTILDFLKSDGFANRNFMQLIHDDSLTFKEDIQKAQVSGQGDSLHEHIANLAGSPAIKKGILQTVKVVDELVKVMGRHKPENIVIEMARENQTTQKGQKNSRERMKRIEEGIKELGSQILKEHPVENTQLQNEKLYLYYLQNGRDMYVDQELDINRLSDYDVDHIVPQSFLKDDSIDNKVLTRSDKARGKSDNVPSEEVVKKMKNYWRQLLNAKLITQRKFDNLTKAERGGLSELDKAGFIKRQLVETRQITKHVAQILDSRMNTKYDENDKLIREVKVITLKSKLVSDFRKDFQFYKVREINNYHHAHDAYLNAVVGTALIKKYPKLESEFVYGDYKVYDVRKMIAKSEQEIGKATAKYFFYSNIMNFFKTEITLANGEIRKRPLIETNGETGEIVWDKGRDFATVRKVLSMPQVNIVKKTEVQTGGFSKESILPKRNSDKLIARKKDWDPKKYGGFDSPTVAYSVLVVAKVEKGKSKKLKSVKELLGITIMERSSFEKNPIDFLEAKGYKEVKKDLIIKLPKYSLFELENGRKRMLASAGELQKGNELALPSKYVNFLYLASHYEKLKGSPEDNEQKQLFVEQHKHYLDEIIEQISEFSKRVILADANLDKVLSAYNKHRDKPIREQAENIIHLFTLTNLGAPAAFKYFDTTIDRKRYTSTKEVLDATLIHQSITGLYETRIDLSQLGGDGGGGSPAPGSSGGTVSLQDEHRLFDIPVTTSLPDVWLQDFPQAWAETGGLGRAKCQAPIIIDLKPTAVPVSIKQYPMSLEAHMGIRQHIIKFLELGVLRPCRSPWNTPLLPVKKPGTQDYRPVQDLREINKRTVDIHPTVPNPYNLLSTLKPDYSWYTVLDLKDAFFCLPLAPQSQELFAFEWKDPERGISGQLTWTRLPQGFKNSPTLFNEALHRDLTDFRTQHPEVTLLQYVDDLLLAAPTKKACTQGTRHLLQELGEKGYRASAKKAQICQTKVTYLGYILSEGKRWLTPGRIETVARIPPPRNPREVREFLGKAGFCRLFIPGFAELAAPLYALTKPSTPFTWQTEHQLAFEALKKALLSAPALGLPDTSKPFTLFLDERQGIAKGVLTQKLGPWKRPVAYLSKKLDPVAAGWPPCLRIMAATAMLVKDSAKLTLGQPLTVITPHTLEAIVRQPPDRWITNARLTHYQALLLDTDRVQFGPPVTLNPATLLPVPENQPSPHDCRQVLAETHGTREDLKDQELPDADHTWYTDGSSYLDSGTRRAGAAVVDGHNTIWAQSLPPGTSAQKAELIALTKALELSKGKKANIYTDSRYAFATAHTHGSIYERRGWLTSEGKEIKNKAEIIALLKALFLPQEVAIIHCPGHQKGQDPVAVGNRQADRVARQAAMAEVLTLATEPDNTSHITAGKRTADGSEFEKRTADGSEFESPKKKAKVE

SEQ ID NO: 1965 - protein, 2099 aa, synthetic construct
MPAAKRVKLDGGDKKYSIGLDIGTNSVGWAVITDEYKVPSKKFKVLGNTDRHSIKKNLIGALLFDSGETAEATRLKRTARRRYTRRKNRICYLQEIFSNEMAKVDDSFFHRLEESFLVEEDKKHERHPIFGNIVDEVAYHEKYPTIYHLRKKLVDSTDKADLRLIYLALAHMIKFRGHFLIEGDLNPDNSDVDKLFIQLVQTYNQLFEENPINASGVDAKAILSARLSKSRRLENLIAQLPGEKKNGLFGNLIALSLGLTPNFKSNFDLAEDAKLQLSKDTYDDDLDNLLAQIGDQYADLFLAAKNLSDAILLSDILRVNTEITKAPLSASMIKRYDEHHQDLTLLKALVRQQLPEKYKEIFFDQSKNGYAGYIDGGASQEEFYKFIKPILEKMDGTEELLVKLNREDLLRKQRTFDNGSIPHQIHLGELHAILRRQEDFYPFLKDNREKIEKILTFRIPYYVGPLARGNSRFAWMTRKSEETITPWNFEEVVDKGASAQSFIERMTNFDKNLPNEKVLPKHSLLYEYFTVYNELTKVKYVTEGMRKPAFLSGEQKKAIVDLLFKTNRKVTVKQLKEDYFKKIECFDSVEISGVEDRFNASLGTYHDLLKIIKDKDFLDNEENEDILEDIVLTLTLFEDREMIEERLKTYAHLFDDKVMKQLKRRRYTGWGRLSRKLINGIRDKQSGKTILDFLKSDGFANRNFMQLIHDDSLTFKEDIQKAQVSGQGDSLHEHIANLAGSPAIKKGILQTVKVVDELVKVMGRHKPENIVIEMARENQTTQKGQKNSRERMKRIEEGIKELGSQILKEHPVENTQLQNEKLYLYYLQNGRDMYVDQELDINRLSDYDVDHIVPQSFLKDDSIDNKVLTRSDKARGKSDNVPSEEVVKKMKNYWRQLLNAKLITQRKFDNLTKAERGGLSELDKAGFIKRQLVETRQITKHVAQILDSRMNTKYDENDKLIREVKVITLKSKLVSDFRKDFQFYKVREINNYHHAHDAYLNAVVGTALIKKYPKLESEFVYGDYKVYDVRKMIAKSEQEIGKATAKYFFYSNIMNFFKTEITLANGEIRKRPLIETNGETGEIVWDKGRDFATVRKVLSMPQVNIVKKTEVQTGGFSKESILPKRNSDKLIARKKDWDPKKYGGFDSPTVAYSVLVVAKVEKGKSKKLKSVKELLGITIMERSSFEKNPIDFLEAKGYKEVKKDLIIKLPKYSLFELENGRKRMLASAGELQKGNELALPSKYVNFLYLASHYEKLKGSPEDNEQKQLFVEQHKHYLDEIIEQISEFSKRVILADANLDKVLSAYNKHRDKPIREQAENIIHLFTLTNLGAPAAFKYFDTTIDRKRYTSTKEVLDATLIHQSITGLYETRIDLSQLGGDGGGSSEAAAKGGTVSLQDEHRLFDIPVTTSLPDVWLQDFPQAWAETGGLGRAKCQAPIIIDLKPTAVPVSIKQYPMSLEAHMGIRQHIIKFLELGVLRPCRSPWNTPLLPVKKPGTQDYRPVQDLREINKRTVDIHPTVPNPYNLLSTLKPDYSWYTVLDLKDAFFCLPLAPQSQELFAFEWKDPERGISGQLTWTRLPQGFKNSPTLFNEALHRDLTDFRTQHPEVTLLQYVDDLLLAAPTKKACTQGTRHLLQELGEKGYRASAKKAQICQTKVTYLGYILSEGKRWLTPGRIETVARIPPPRNPREVREFLGKAGFCRLFIPGFAELAAPLYALTKPSTPFTWQTEHQLAFEALKKALLSAPALGLPDTSKPFTLFLDERQGIAKGVLTQKLGPWKRPVAYLSKKLDPVAAGWPPCLRIMAATAMLVKDSAKLTLGQPLTVITPHTLEAIVRQPPDRWITNARLTHYQALLLDTDRVQFGPPVTLNPATLLPVPENQPSPHDCRQVLAETHGTREDLKDQELPDADHTWYTDGSSYLDSGTRRAGAAVVDGHNTIWAQSLPPGTSAQKAELIALTKALELSKGKKANIYTDSRYAFATAHTHGSIYERRGWLTSEGKEIKNKAEIIALLKALFLPQEVAIIHCPGHQKGQDPVAVGNRQADRVARQAAMAEVLTLATEPDNTSHITAGKRTADGSEFEKRTADGSEFESPKKKAKVE

SEQ ID NO: 1966 - protein, 2111 aa, synthetic construct
MPAAKRVKLDGGDKKYSIGLDIGTNSVGWAVITDEYKVPSKKFKVLGNTDRHSIKKNLIGALLFDSGETAEATRLKRTARRRYTRRKNRICYLQEIFSNEMAKVDDSFFHRLEESFLVEEDKKHERHPIFGNIVDEVAYHEKYPTIYHLRKKLVDSTDKADLRLIYLALAHMIKFRGHFLIEGDLNPDNSDVDKLFIQLVQTYNQLFEENPINASGVDAKAILSARLSKSRRLENLIAQLPGEKKNGLFGNLIALSLGLTPNFKSNFDLAEDAKLQLSKDTYDDDLDNLLAQIGDQYADLFLAAKNLSDAILLSDILRVNTEITKAPLSASMIKRYDEHHQDLTLLKALVRQQLPEKYKEIFFDQSKNGYAGYIDGGASQEEFYKFIKPILEKMDGTEELLVKLNREDLLRKQRTFDNGSIPHQIHLGELHAILRRQEDFYPFLKDNREKIEKILTFRIPYYVGPLARGNSRFAWMTRKSEETITPWNFEEVVDKGASAQSFIERMTNFDKNLPNEKVLPKHSLLYEYFTVYNELTKVKYVTEGMRKPAFLSGEQKKAIVDLLFKTNRKVTVKQLKEDYFKKIECFDSVEISGVEDRFNASLGTYHDLLKIIKDKDFLDNEENEDILEDIVLTLTLFEDREMIEERLKTYAHLFDDKVMKQLKRRRYTGWGRLSRKLINGIRDKQSGKTILDFLKSDGFANRNFMQLIHDDSLTFKEDIQKAQVSGQGDSLHEHIANLAGSPAIKKGILQTVKVVDELVKVMGRHKPENIVIEMARENQTTQKGQKNSRERMKRIEEGIKELGSQILKEHPVENTQLQNEKLYLYYLQNGRDMYVDQELDINRLSDYDVDHIVPQSFLKDDSIDNKVLTRSDKARGKSDNVPSEEVVKKMKNYWRQLLNAKLITQRKFDNLTKAERGGLSELDKAGFIKRQLVETRQITKHVAQILDSRMNTKYDENDKLIREVKVITLKSKLVSDFRKDFQFYKVREINNYHHAHDAYLNAVVGTALIKKYPKLESEFVYGDYKVYDVRKMIAKSEQEIGKATAKYFFYSNIMNFFKTEITLANGEIRKRPLIETNGETGEIVWDKGRDFATVRKVLSMPQVNIVKKTEVQTGGFSKESILPKRNSDKLIARKKDWDPKKYGGFDSPTVAYSVLVVAKVEKGKSKKLKSVKELLGITIMERSSFEKNPIDFLEAKGYKEVKKDLIIKLPKYSLFELENGRKRMLASAGELQKGNELALPSKYVNFLYLASHYEKLKGSPEDNEQKQLFVEQHKHYLDEIIEQISEFSKRVILADANLDKVLSAYNKHRDKPIREQAENIIHLFTLTNLGAPAAFKYFDTTIDRKRYTSTKEVLDATLIHQSITGLYETRIDLSQLGGDGGGGGGSGGGGSGGGGSGGGGSGGTVSLQDEHRLFDIPVTTSLPDVWLQDFPQAWAETGGLGRAKCQAPIIIDLKPTAVPVSIKQYPMSLEAHMGIRQHIIKFLELGVLRPCRSPWNTPLLPVKKPGTQDYRPVQDLREINKRTVDIHPTVPNPYNLLSTLKPDYSWYTVLDLKDAFFCLPLAPQSQELFAFEWKDPERGISGQLTWTRLPQGFKNSPTLFNEALHRDLTDFRTQHPEVTLLQYVDDLLLAAPTKKACTQGTRHLLQELGEKGYRASAKKAQICQTKVTYLGYILSEGKRWLTPGRIETVARIPPPRNPREVREFLGKAGFCRLFIPGFAELAAPLYALTKPSTPFTWQTEHQLAFEALKKALLSAPALGLPDTSKPFTLFLDERQGIAKGVLTQKLGPWKRPVAYLSKKLDPVAAGWPPCLRIMAATAMLVKDSAKLTLGQPLTVITPHTLEAIVRQPPDRWITNARLTHYQALLLDTDRVQFGPPVTLNPATLLPVPENQPSPHDCRQVLAETHGTREDLKDQELPDADHTWYTDGSSYLDSGTRRAGAAVVDGHNTIWAQSLPPGTSAQKAELIALTKALELSKGKKANIYTDSRYAFATAHTHGSIYERRGWLTSEGKEIKNKAEIIALLKALFLPQEVAIIHCPGHQKGQDPVAVGNRQADRVARQAAMAEVLTLATEPDNTSHITAGKRTADGSEFEKRTADGSEFESPKKKAKVE

SEQ ID NO: 1967 - protein, 2137 aa, synthetic construct
MPAAKRVKLDGGDKKYSIGLDIGTNSVGWAVITDEYKVPSKKFKVLGNTDRHSIKKNLIGALLFDSGETAEATRLKRTARRRYTRRKNRICYLQEIFSNEMAKVDDSFFHRLEESFLVEEDKKHERHPIFGNIVDEVAYHEKYPTIYHLRKKLVDSTDKADLRLIYLALAHMIKFRGHFLIEGDLNPDNSDVDKLFIQLVQTYNQLFEENPINASGVDAKAILSARLSKSRRLENLIAQLPGEKKNGLFGNLIALSLGLTPNFKSNFDLAEDAKLQLSKDTYDDDLDNLLAQIGDQYADLFLAAKNLSDAILLSDILRVNTEITKAPLSASMIKRYDEHHQDLTLLKALVRQQLPEKYKEIFFDQSKNGYAGYIDGGASQEEFYKFIKPILEKMDGTEELLVKLNREDLLRKQRTFDNGSIPHQIHLGELHAILRRQEDFYPFLKDNREKIEKILTFRIPYYVGPLARGNSRFAWMTRKSEETITPWNFEEVVDKGASAQSFIERMTNFDKNLPNEKVLPKHSLLYEYFTVYNELTKVKYVTEGMRKPAFLSGEQKKAIVDLLFKTNRKVTVKQLKEDYFKKIECFDSVEISGVEDRFNASLGTYHDLLKIIKDKDFLDNEENEDILEDIVLTLTLFEDREMIEERLKTYAHLFDDKVMKQLKRRRYTGWGRLSRKLINGIRDKQSGKTILDFLKSDGFANRNFMQLIHDDSLTFKEDIQKAQVSGQGDSLHEHIANLAGSPAIKKGILQTVKVVDELVKVMGRHKPENIVIEMARENQTTQKGQKNSRERMKRIEEGIKELGSQILKEHPVENTQLQNEKLYLYYLQNGRDMYVDQELDINRLSDYDVDHIVPQSFLKDDSIDNKVLTRSDKARGKSDNVPSEEVVKKMKNYWRQLLNAKLITQRKFDNLTKAERGGLSELDKAGFIKRQLVETRQITKHVAQILDSRMNTKYDENDKLIREVKVITLKSKLVSDFRKDFQFYKVREINNYHHAHDAYLNAVVGTALIKKYPKLESEFVYGDYKVYDVRKMIAKSEQEIGKATAKYFFYSNIMNFFKTEITLANGEIRKRPLIETNGETGEIVWDKGRDFATVRKVLSMPQVNIVKKTEVQTGGFSKESILPKRNSDKLIARKKDWDPKKYGGFDSPTVAYSVLVVAKVEKGKSKKLKSVKELLGITIMERSSFEKNPIDFLEAKGYKEVKKDLIIKLPKYSLFELENGRKRMLASAGELQKGNELALPSKYVNFLYLASHYEKLKGSPEDNEQKQLFVEQHKHYLDEIIEQISEFSKRVILADANLDKVLSAYNKHRDKPIREQAENIIHLFTLTNLGAPAAFKYFDTTIDRKRYTSTKEVLDATLIHQSITGLYETRIDLSQLGGDGGAEAAAKEAAAKEAAAKEAAAKALEAEAAAKEAAAKEAAAKEAAAKAGGTVSLQDEHRLFDIPVTTSLPDVWLQDFPQAWAETGGLGRAKCQAPIIIDLKPTAVPVSIKQYPMSLEAHMGIRQHIIKFLELGVLRPCRSPWNTPLLPVKKPGTQDYRPVQDLREINKRTVDIHPTVPNPYNLLSTLKPDYSWYTVLDLKDAFFCLPLAPQSQELFAFEWKDPERGISGQLTWTRLPQGFKNSPTLFNEALHRDLTDFRTQHPEVTLLQYVDDLLLAAPTKKACTQGTRHLLQELGEKGYRASAKKAQICQTKVTYLGYILSEGKRWLTPGRIETVARIPPPRNPREVREFLGKAGFCRLFIPGFAELAAPLYALTKPSTPFTWQTEHQLAFEALKKALLSAPALGLPDTSKPFTLFLDERQGIAKGVLTQKLGPWKRPVAYLSKKLDPVAAGWPPCLRIMAATAMLVKDSAKLTLGQPLTVITPHTLEAIVRQPPDRWITNARLTHYQALLLDTDRVQFGPPVTLNPATLLPVPENQPSPHDCRQVLAETHGTREDLKDQELPDADHTWYTDGSSYLDSGTRRAGAAVVDGHNTIWAQSLPPGTSAQKAELIALTKALELSKGKKANIYTDSRYAFATAHTHGSIYERRGWLTSEGKEIKNKAEIIALLKALFLPQEVAIIHCPGHQKGQDPVAVGNRQADRVARQAAMAEVLTLATEPDNTSHITAGKRTADGSEFEKRTADGSEFESPKKKAKVE

SEQ ID NO: 1968 - protein, 2102 aa, synthetic construct
MPAAKRVKLDGGDKKYSIGLDIGTNSVGWAVITDEYKVPSKKFKVLGNTDRHSIKKNLIGALLFDSGETAEATRLKRTARRRYTRRKNRICYLQEIFSNEMAKVDDSFFHRLEESFLVEEDKKHERHPIFGNIVDEVAYHEKYPTIYHLRKKLVDSTDKADLRLIYLALAHMIKFRGHFLIEGDLNPDNSDVDKLFIQLVQTYNQLFEENPINASGVDAKAILSARLSKSRRLENLIAQLPGEKKNGLFGNLIALSLGLTPNFKSNFDLAEDAKLQLSKDTYDDDLDNLLAQIGDQYADLFLAAKNLSDAILLSDILRVNTEITKAPLSASMIKRYDEHHQDLTLLKALVRQQLPEKYKEIFFDQSKNGYAGYIDGGASQEEFYKFIKPILEKMDGTEELLVKLNREDLLRKQRTFDNGSIPHQIHLGELHAILRRQEDFYPFLKDNREKIEKILTFRIPYYVGPLARGNSRFAWMTRKSEETITPWNFEEVVDKGASAQSFIERMTNFDKNLPNEKVLPKHSLLYEYFTVYNELTKVKYVTEGMRKPAFLSGEQKKAIVDLLFKTNRKVTVKQLKEDYFKKIECFDSVEISGVEDRFNASLGTYHDLLKIIKDKDFLDNEENEDILEDIVLTLTLFEDREMIEERLKTYAHLFDDKVMKQLKRRRYTGWGRLSRKLINGIRDKQSGKTILDFLKSDGFANRNFMQLIHDDSLTFKEDIQKAQVSGQGDSLHEHIANLAGSPAIKKGILQTVKVVDELVKVMGRHKPENIVIEMARENQTTQKGQKNSRERMKRIEEGIKELGSQILKEHPVENTQLQNEKLYLYYLQNGRDMYVDQELDINRLSDYDVDHIVPQSFLKDDSIDNKVLTRSDKARGKSDNVPSEEVVKKMKNYWRQLLNAKLITQRKFDNLTKAERGGLSELDKAGFIKRQLVETRQITKHVAQILDSRMNTKYDENDKLIREVKVITLKSKLVSDFRKDFQFYKVREINNYHHAHDAYLNAVVGTALIKKYPKLESEFVYGDYKVYDVRKMIAKSEQEIGKATAKYFFYSNIMNFFKTEITLANGEIRKRPLIETNGETGEIVWDKGRDFATVRKVLSMPQVNIVKKTEVQTGGFSKESILPKRNSDKLIARKKDWDPKKYGGFDSPTVAYSVLVVAKVEKGKSKKLKSVKELLGITIMERSSFEKNPIDFLEAKGYKEVKKDLIIKLPKYSLFELENGRKRMLASAGELQKGNELALPSKYVNFLYLASHYEKLKGSPEDNEQKQLFVEQHKHYLDEIIEQISEFSKRVILADANLDKVLSAYNKHRDKPIREQAENIIHLFTLTNLGAPAAFKYFDTTIDRKRYTSTKEVLDATLIHQSITGLYETRIDLSQLGGDGGPAPGSSEAAAKGGTVSLQDEHRLFDIPVTTSLPDVWLQDFPQAWAETGGLGRAKCQAPIIIDLKPTAVPVSIKQYPMSLEAHMGIRQHIIKFLELGVLRPCRSPWNTPLLPVKKPGTQDYRPVQDLREINKRTVDIHPTVPNPYNLLSTLKPDYSWYTVLDLKDAFFCLPLAPQSQELFAFEWKDPERGISGQLTWTRLPQGFKNSPTLFNEALHRDLTDFRTQHPEVTLLQYVDDLLLAAPTKKACTQGTRHLLQELGEKGYRASAKKAQICQTKVTYLGYILSEGKRWLTPGRIETVARIPPPRNPREVREFLGKAGFCRLFIPGFAELAAPLYALTKPSTPFTWQTEHQLAFEALKKALLSAPALGLPDTSKPFTLFLDERQGIAKGVLTQKLGPWKRPVAYLSKKLDPVAAGWPPCLRIMAATAMLVKDSAKLTLGQPLTVITPHTLEAIVRQPPDRWITNARLTHYQALLLDTDRVQFGPPVTLNPATLLPVPENQPSPHDCRQVLAETHGTREDLKDQELPDADHTWYTDGSSYLDSGTRRAGAAVVDGHNTIWAQSLPPGTSAQKAELIALTKALELSKGKKANIYTDSRYAFATAHTHGSIYERRGWLTSEGKEIKNKAEIIALLKALFLPQEVAIIHCPGHQKGQDPVAVGNRQADRVARQAAMAEVLTLATEPDNTSHITAGKRTADGSEFEKRTADGSEFESPKKKAKVE

SEQ ID NO: 1969 - protein, 2102 aa, synthetic construct
MPAAKRVKLDGGDKKYSIGLDIGTNSVGWAVITDEYKVPSKKFKVLGNTDRHSIKKNLIGALLFDSGETAEATRLKRTARRRYTRRKNRICYLQEIFSNEMAKVDDSFFHRLEESFLVEEDKKHERHPIFGNIVDEVAYHEKYPTIYHLRKKLVDSTDKADLRLIYLALAHMIKFRGHFLIEGDLNPDNSDVDKLFIQLVQTYNQLFEENPINASGVDAKAILSARLSKSRRLENLIAQLPGEKKNGLFGNLIALSLGLTPNFKSNFDLAEDAKLQLSKDTYDDDLDNLLAQIGDQYADLFLAAKNLSDAILLSDILRVNTEITKAPLSASMIKRYDEHHQDLTLLKALVRQQLPEKYKEIFFDQSKNGYAGYIDGGASQEEFYKFIKPILEKMDGTEELLVKLNREDLLRKQRTFDNGSIPHQIHLGELHAILRRQEDFYPFLKDNREKIEKILTFRIPYYVGPLARGNSRFAWMTRKSEETITPWNFEEVVDKGASAQSFIERMTNFDKNLPNEKVLPKHSLLYEYFTVYNELTKVKYVTEGMRKPAFLSGEQKKAIVDLLFKTNRKVTVKQLKEDYFKKIECFDSVEISGVEDRFNASLGTYHDLLKIIKDKDFLDNEENEDILEDIVLTLTLFEDREMIEERLKTYAHLFDDKVMKQLKRRRYTGWGRLSRKLINGIRDKQSGKTILDFLKSDGFANRNFMQLIHDDSLTFKEDIQKAQVSGQGDSLHEHIANLAGSPAIKKGILQTVKVVDELVKVMGRHKPENIVIEMARENQTTQKGQKNSRERMKRIEEGIKELGSQILKEHPVENTQLQNEKLYLYYLQNGRDMYVDQELDINRLSDYDVDHIVPQSFLKDDSIDNKVLTRSDKARGKSDNVPSEEVVKKMKNYWRQLLNAKLITQRKFDNLTKAERGGLSELDKAGFIKRQLVETRQITKHVAQILDSRMNTKYDENDKLIREVKVITLKSKLVSDFRKDFQFYKVREINNYHHAHDAYLNAVVGTALIKKYPKLESEFVYGDYKVYDVRKMIAKSEQEIGKATAKYFFYSNIMNFFKTEITLANGEIRKRPLIETNGETGEIVWDKGRDFATVRKVLSMPQVNIVKKTEVQTGGFSKESILPKRNSDKLIARKKDWDPKKYGGFDSPTVAYSVLVVAKVEKGKSKKLKSVKELLGITIMERSSFEKNPIDFLEAKGYKEVKKDLIIKLPKYSLFELENGRKRMLASAGELQKGNELALPSKYVNFLYLASHYEKLKGSPEDNEQKQLFVEQHKHYLDEIIEQISEFSKRVILADANLDKVLSAYNKHRDKPIREQAENIIHLFTLTNLGAPAAFKYFDTTIDRKRYTSTKEVLDATLIHQSITGLYETRIDLSQLGGDGGGGGEAAAKPAPGGTVSLQDEHRLFDIPVTTSLPDVWLQDFPQAWAETGGLGRAKCQAPIIIDLKPTAVPVSIKQYPMSLEAHMGIRQHIIKFLELGVLRPCRSPWNTPLLPVKKPGTQDYRPVQDLREINKRTVDIHPTVPNPYNLLSTLKPDYSWYTVLDLKDAFFCLPLAPQSQELFAFEWKDPERGISGQLTWTRLPQGFKNSPTLFNEALHRDLTDFRTQHPEVTLLQYVDDLLLAAPTKKACTQGTRHLLQELGEKGYRASAKKAQICQTKVTYLGYILSEGKRWLTPGRIETVARIPPPRNPREVREFLGKAGFCRLFIPGFAELAAPLYALTKPSTPFTWQTEHQLAFEALKKALLSAPALGLPDTSKPFTLFLDERQGIAKGVLTQKLGPWKRPVAYLSKKLDPVAAGWPPCLRIMAATAMLVKDSAKLTLGQPLTVITPHTLEAIVRQPPDRWITNARLTHYQALLLDTDRVQFGPPVTLNPATLLPVPENQPSPHDCRQVLAETHGTREDLKDQELPDADHTWYTDGSSYLDSGTRRAGAAVVDGHNTIWAQSLPPGTSAQKAELIALTKALELSKGKKANIYTDSRYAFATAHTHGSIYERRGWLTSEGKEIKNKAEIIALLKALFLPQEVAIIHCPGHQKGQDPVAVGNRQADRVARQAAMAEVLTLATEPDNTSHITAGKRTADGSEFEKRTADGSEFESPKKKAKVE

SEQ ID NO: 1970 - protein, 2097 aa, synthetic construct
MPAAKRVKLDGGDKKYSIGLDIGTNSVGWAVITDEYKVPSKKFKVLGNTDRHSIKKNLIGALLFDSGETAEATRLKRTARRRYTRRKNRICYLQEIFSNEMAKVDDSFFHRLEESFLVEEDKKHERHPIFGNIVDEVAYHEKYPTIYHLRKKLVDSTDKADLRLIYLALAHMIKFRGHFLIEGDLNPDNSDVDKLFIQLVQTYNQLFEENPINASGVDAKAILSARLSKSRRLENLIAQLPGEKKNGLFGNLIALSLGLTPNFKSNFDLAEDAKLQLSKDTYDDDLDNLLAQIGDQYADLFLAAKNLSDAILLSDILRVNTEITKAPLSASMIKRYDEHHQDLTLLKALVRQQLPEKYKEIFFDQSKNGYAGYIDGGASQEEFYKFIKPILEKMDGTEELLVKLNREDLLRKQRTFDNGSIPHQIHLGELHAILRRQEDFYPFLKDNREKIEKILTFRIPYYVGPLARGNSRFAWMTRKSEETITPWNFEEVVDKGASAQSFIERMTNFDKNLPNEKVLPKHSLLYEYFTVYNELTKVKYVTEGMRKPAFLSGEQKKAIVDLLFKTNRKVTVKQLKEDYFKKIECFDSVEISGVEDRFNASLGTYHDLLKIIKDKDFLDNEENEDILEDIVLTLTLFEDREMIEERLKTYAHLFDDKVMKQLKRRRYTGWGRLSRKLINGIRDKQSGKTILDFLKSDGFANRNFMQLIHDDSLTFKEDIQKAQVSGQGDSLHEHIANLAGSPAIKKGILQTVKVVDELVKVMGRHKPENIVIEMARENQTTQKGQKNSRERMKRIEEGIKELGSQILKEHPVENTQLQNEKLYLYYLQNGRDMYVDQELDINRLSDYDVDHIVPQSFLKDDSIDNKVLTRSDKARGKSDNVPSEEVVKKMKNYWRQLLNAKLITQRKFDNLTKAERGGLSELDKAGFIKRQLVETRQITKHVAQILDSRMNTKYDENDKLIREVKVITLKSKLVSDFRKDFQFYKVREINNYHHAHDAYLNAVVGTALIKKYPKLESEFVYGDYKVYDVRKMIAKSEQEIGKATAKYFFYSNIMNFFKTEITLANGEIRKRPLIETNGETGEIVWDKGRDFATVRKVLSMPQVNIVKKTEVQTGGFSKESILPKRNSDKLIARKKDWDPKKYGGFDSPTVAYSVLVVAKVEKGKSKKLKSVKELLGITIMERSSFEKNPIDFLEAKGYKEVKKDLIIKLPKYSLFELENGRKRMLASAGELQKGNELALPSKYVNFLYLASHYEKLKGSPEDNEQKQLFVEQHKHYLDEIIEQISEFSKRVILADANLDKVLSAYNKHRDKPIREQAENIIHLFTLTNLGAPAAFKYFDTTIDRKRYTSTKEVLDATLIHQSITGLYETRIDLSQLGGDGGGSSGSSGGTVSLQDEHRLFDIPVTTSLPDVWLQDFPQAWAETGGLGRAKCQAPIIIDLKPTAVPVSIKQYPMSLEAHMGIRQHIIKFLELGVLRPCRSPWNTPLLPVKKPGTQDYRPVQDLREINKRTVDIHPTVPNPYNLLSTLKPDYSWYTVLDLKDAFFCLPLAPQSQELFAFEWKDPERGISGQLTWTRLPQGFKNSPTLFNEALHRDLTDFRTQHPEVTLLQYVDDLLLAAPTKKACTQGTRHLLQELGEKGYRASAKKAQICQTKVTYLGYILSEGKRWLTPGRIETVARIPPPRNPREVREFLGKAGFCRLFIPGFAELAAPLYALTKPSTPFTWQTEHQLAFEALKKALLSAPALGLPDTSKPFTLFLDERQGIAKGVLTQKLGPWKRPVAYLSKKLDPVAAGWPPCLRIMAATAMLVKDSAKLTLGQPLTVITPHTLEAIVRQPPDRWITNARLTHYQALLLDTDRVQFGPPVTLNPATLLPVPENQPSPHDCRQVLAETHGTREDLKDQELPDADHTWYTDGSSYLDSGTRRAGAAVVDGHNTIWAQSLPPGTSAQKAELIALTKALELSKGKKANIYTDSRYAFATAHTHGSIYERRGWLTSEGKEIKNKAEIIALLKALFLPQEVAIIHCPGHQKGQDPVAVGNRQADRVARQAAMAEVLTLATEPDNTSHITAGKRTADGSEFEKRTADGSEFESPKKKAKVE

SEQ ID NO: 1971 - protein, 2099 aa, synthetic construct
MPAAKRVKLDGGDKKYSIGLDIGTNSVGWAVITDEYKVPSKKFKVLGNTDRHSIKKNLIGALLFDSGETAEATRLKRTARRRYTRRKNRICYLQEIFSNEMAKVDDSFFHRLEESFLVEEDKKHERHPIFGNIVDEVAYHEKYPTIYHLRKKLVDSTDKADLRLIYLALAHMIKFRGHFLIEGDLNPDNSDVDKLFIQLVQTYNQLFEENPINASGVDAKAILSARLSKSRRLENLIAQLPGEKKNGLFGNLIALSLGLTPNFKSNFDLAEDAKLQLSKDTYDDDLDNLLAQIGDQYADLFLAAKNLSDAILLSDILRVNTEITKAPLSASMIKRYDEHHQDLTLLKALVRQQLPEKYKEIFFDQSKNGYAGYIDGGASQEEFYKFIKPILEKMDGTEELLVKLNREDLLRKQRTFDNGSIPHQIHLGELHAILRRQEDFYPFLKDNREKIEKILTFRIPYYVGPLARGNSRFAWMTRKSEETITPWNFEEVVDKGASAQSFIERMTNFDKNLPNEKVLPKHSLLYEYFTVYNELTKVKYVTEGMRKPAFLSGEQKKAIVDLLFKTNRKVTVKQLKEDYFKKIECFDSVEISGVEDRFNASLGTYHDLLKIIKDKDFLDNEENEDILEDIVLTLTLFEDREMIEERLKTYAHLFDDKVMKQLKRRRYTGWGRLSRKLINGIRDKQSGKTILDFLKSDGFANRNFMQLIHDDSLTFKEDIQKAQVSGQGDSLHEHIANLAGSPAIKKGILQTVKVVDELVKVMGRHKPENIVIEMARENQTTQKGQKNSRERMKRIEEGIKELGSQILKEHPVENTQLQNEKLYLYYLQNGRDMYVDQELDINRLSDYDVDHIVPQSFLKDDSIDNKVLTRSDKARGKSDNVPSEEVVKKMKNYWRQLLNAKLITQRKFDNLTKAERGGLSELDKAGFIKRQLVETRQITKHVAQILDSRMNTKYDENDKLIREVKVITLKSKLVSDFRKDFQFYKVREINNYHHAHDAYLNAVVGTALIKKYPKLESEFVYGDYKVYDVRKMIAKSEQEIGKATAKYFFYSNIMNFFKTEITLANGEIRKRPLIETNGETGEIVWDKGRDFATVRKVLSMPQVNIVKKTEVQTGGFSKESILPKRNSDKLIARKKDWDPKKYGGFDSPTVAYSVLVVAKVEKGKSKKLKSVKELLGITIMERSSFEKNPIDFLEAKGYKEVKKDLIIKLPKYSLFELENGRKRMLASAGELQKGNELALPSKYVNFLYLASHYEKLKGSPEDNEQKQLFVEQHKHYLDEIIEQISEFSKRVILADANLDKVLSAYNKHRDKPIREQAENIIHLFTLTNLGAPAAFKYFDTTIDRKRYTSTKEVLDATLIHQSITGLYETRIDLSQLGGDGGEAAAKGSSGGTVSLQDEHRLFDIPVTTSLPDVWLQDFPQAWAETGGLGRAKCQAPIIIDLKPTAVPVSIKQYPMSLEAHMGIRQHIIKFLELGVLRPCRSPWNTPLLPVKKPGTQDYRPVQDLREINKRTVDIHPTVPNPYNLLSTLKPDYSWYTVLDLKDAFFCLPLAPQSQELFAFEWKDPERGISGQLTWTRLPQGFKNSPTLFNEALHRDLTDFRTQHPEVTLLQYVDDLLLAAPTKKACTQGTRHLLQELGEKGYRASAKKAQICQTKVTYLGYILSEGKRWLTPGRIETVARIPPPRNPREVREFLGKAGFCRLFIPGFAELAAPLYALTKPSTPFTWQTEHQLAFEALKKALLSAPALGLPDTSKPFTLFLDERQGIAKGVLTQKLGPWKRPVAYLSKKLDPVAAGWPPCLRIMAATAMLVKDSAKLTLGQPLTVITPHTLEAIVRQPPDRWITNARLTHYQALLLDTDRVQFGPPVTLNPATLLPVPENQPSPHDCRQVLAETHGTREDLKDQELPDADHTWYTDGSSYLDSGTRRAGAAVVDGHNTIWAQSLPPGTSAQKAELIALTKALELSKGKKANIYTDSRYAFATAHTHGSIYERRGWLTSEGKEIKNKAEIIALLKALFLPQEVAIIHCPGHQKGQDPVAVGNRQADRVARQAAMAEVLTLATEPDNTSHITAGKRTADGSEFEKRTADGSEFESPKKKAKVE

SEQ ID NO: 1972 - protein, 2102 aa, synthetic construct
MPAAKRVKLDGGDKKYSIGLDIGTNSVGWAVITDEYKVPSKKFKVLGNTDRHSIKKNLIGALLFDSGETAEATRLKRTARRRYTRRKNRICYLQEIFSNEMAKVDDSFFHRLEESFLVEEDKKHERHPIFGNIVDEVAYHEKYPTIYHLRKKLVDSTDKADLRLIYLALAHMIKFRGHFLIEGDLNPDNSDVDKLFIQLVQTYNQLFEENPINASGVDAKAILSARLSKSRRLENLIAQLPGEKKNGLFGNLIALSLGLTPNFKSNFDLAEDAKLQLSKDTYDDDLDNLLAQIGDQYADLFLAAKNLSDAILLSDILRVNTEITKAPLSASMIKRYDEHHQDLTLLKALVRQQLPEKYKEIFFDQSKNGYAGYIDGGASQEEFYKFIKPILEKMDGTEELLVKLNREDLLRKQRTFDNGSIPHQIHLGELHAILRRQEDFYPFLKDNREKIEKILTFRIPYYVGPLARGNSRFAWMTRKSEETITPWNFEEVVDKGASAQSFIERMTNFDKNLPNEKVLPKHSLLYEYFTVYNELTKVKYVTEGMRKPAFLSGEQKKAIVDLLFKTNRKVTVKQLKEDYFKKIECFDSVEISGVEDRFNASLGTYHDLLKIIKDKDFLDNEENEDILEDIVLTLTLFEDREMIEERLKTYAHLFDDKVMKQLKRRRYTGWGRLSRKLINGIRDKQSGKTILDFLKSDGFANRNFMQLIHDDSLTFKEDIQKAQVSGQGDSLHEHIANLAGSPAIKKGILQTVKVVDELVKVMGRHKPENIVIEMARENQTTQKGQKNSRERMKRIEEGIKELGSQILKEHPVENTQLQNEKLYLYYLQNGRDMYVDQELDINRLSDYDVDHIVPQSFLKDDSIDNKVLTRSDKARGKSDNVPSEEVVKKMKNYWRQLLNAKLITQRKFDNLTKAERGGLSELDKAGFIKRQLVETRQITKHVAQILDSRMNTKYDENDKLIREVKVITLKSKLVSDFRKDFQFYKVREINNYHHAHDAYLNAVVGTALIKKYPKLESEFVYGDYKVYDVRKMIAKSEQEIGKATAKYFFYSNIMNFFKTEITLANGEIRKRPLIETNGETGEIVWDKGRDFATVRKVLSMPQVNIVKKTEVQTGGFSKESILPKRNSDKLIARKKDWDPKKYGGFDSPTVAYSVLVVAKVEKGKSKKLKSVKELLGITIMERSSFEKNPIDFLEAKGYKEVKKDLIIKLPKYSLFELENGRKRMLASAGELQKGNELALPSKYVNFLYLASHYEKLKGSPEDNEQKQLFVEQHKHYLDEIIEQISEFSKRVILADANLDKVLSAYNKHRDKPIREQAENIIHLFTLTNLGAPAAFKYFDTTIDRKRYTSTKEVLDATLIHQSITGLYETRIDLSQLGGDGGGSSEAAAKGGGGGTVSLQDEHRLFDIPVTTSLPDVWLQDFPQAWAETGGLGRAKCQAPIIIDLKPTAVPVSIKQYPMSLEAHMGIRQHIIKFLELGVLRPCRSPWNTPLLPVKKPGTQDYRPVQDLREINKRTVDIHPTVPNPYNLLSTLKPDYSWYTVLDLKDAFFCLPLAPQSQELFAFEWKDPERGISGQLTWTRLPQGFKNSPTLFNEALHRDLTDFRTQHPEVTLLQYVDDLLLAAPTKKACTQGTRHLLQELGEKGYRASAKKAQICQTKVTYLGYILSEGKRWLTPGRIETVARIPPPRNPREVREFLGKAGFCRLFIPGFAELAAPLYALTKPSTPFTWQTEHQLAFEALKKALLSAPALGLPDTSKPFTLFLDERQGIAKGVLTQKLGPWKRPVAYLSKKLDPVAAGWPPCLRIMAATAMLVKDSAKLTLGQPLTVITPHTLEAIVRQPPDRWITNARLTHYQALLLDTDRVQFGPPVTLNPATLLPVPENQPSPHDCRQVLAETHGTREDLKDQELPDADHTWYTDGSSYLDSGTRRAGAAVVDGHNTIWAQSLPPGTSAQKAELIALTKALELSKGKKANIYTDSRYAFATAHTHGSIYERRGWLTSEGKEIKNKAEIIALLKALFLPQEVAIIHCPGHQKGQDPVAVGNRQADRVARQAAMAEVLTLATEPDNTSHITAGKRTADGSEFEKRTADGSEFESPKKKAKVE

SEQ ID NO: 1973 - protein, 2102 aa, synthetic construct
MPAAKRVKLDGGDKKYSIGLDIGTNSVGWAVITDEYKVPSKKFKVLGNTDRHSIKKNLIGALLFDSGETAEATRLKRTARRRYTRRKNRICYLQEIFSNEMAKVDDSFFHRLEESFLVEEDKKHERHPIFGNIVDEVAYHEKYPTIYHLRKKLVDSTDKADLRLIYLALAHMIKFRGHFLIEGDLNPDNSDVDKLFIQLVQTYNQLFEENPINASGVDAKAILSARLSKSRRLENLIAQLPGEKKNGLFGNLIALSLGLTPNFKSNFDLAEDAKLQLSKDTYDDDLDNLLAQIGDQYADLFLAAKNLSDAILLSDILRVNTEITKAPLSASMIKRYDEHHQDLTLLKALVRQQLPEKYKEIFFDQSKNGYAGYIDGGASQEEFYKFIKPILEKMDGTEELLVKLNREDLLRKQRTFDNGSIPHQIHLGELHAILRRQEDFYPFLKDNREKIEKILTFRIPYYVGPLARGNSRFAWMTRKSEETITPWNFEEVVDKGASAQSFIERMTNFDKNLPNEKVLPKHSLLYEYFTVYNELTKVKYVTEGMRKPAFLSGEQKKAIVDLLFKTNRKVTVKQLKEDYFKKIECFDSVEISGVEDRFNASLGTYHDLLKIIKDKDFLDNEENEDILEDIVLTLTLFEDREMIEERLKTYAHLFDDKVMKQLKRRRYTGWGRLSRKLINGIRDKQSGKTILDFLKSDGFANRNFMQLIHDDSLTFKEDIQKAQVSGQGDSLHEHIANLAGSPAIKKGILQTVKVVDELVKVMGRHKPENIVIEMARENQTTQKGQKNSRERMKRIEEGIKELGSQILKEHPVENTQLQNEKLYLYYLQNGRDMYVDQELDINRLSDYDVDHIVPQSFLKDDSIDNKVLTRSDKARGKSDNVPSEEVVKKMKNYWRQLLNAKLITQRKFDNLTKAERGGLSELDKAGFIKRQLVETRQITKHVAQILDSRMNTKYDENDKLIREVKVITLKSKLVSDFRKDFQFYKVREINNYHHAHDAYLNAVVGTALIKKYPKLESEFVYGDYKVYDVRKMIAKSEQEIGKATAKYFFYSNIMNFFKTEITLANGEIRKRPLIETNGETGEIVWDKGRDFATVRKVLSMPQVNIVKKTEVQTGGFSKESILPKRNSDKLIARKKDWDPKKYGGFDSPTVAYSVLVVAKVEKGKSKKLKSVKELLGITIMERSSFEKNPIDFLEAKGYKEVKKDLIIKLPKYSLFELENGRKRMLASAGELQKGNELALPSKYVNFLYLASHYEKLKGSPEDNEQKQLFVEQHKHYLDEIIEQISEFSKRVILADANLDKVLSAYNKHRDKPIREQAENIIHLFTLTNLGAPAAFKYFDTTIDRKRYTSTKEVLDATLIHQSITGLYETRIDLSQLGGDGGPAPEAAAKGGGGGTVSLQDEHRLFDIPVTTSLPDVWLQDFPQAWAETGGLGRAKCQAPIIIDLKPTAVPVSIKQYPMSLEAHMGIRQHIIKFLELGVLRPCRSPWNTPLLPVKKPGTQDYRPVQDLREINKRTVDIHPTVPNPYNLLSTLKPDYSWYTVLDLKDAFFCLPLAPQSQELFAFEWKDPERGISGQLTWTRLPQGFKNSPTLFNEALHRDLTDFRTQHPEVTLLQYVDDLLLAAPTKKACTQGTRHLLQELGEKGYRASAKKAQICQTKVTYLGYILSEGKRWLTPGRIETVARIPPPRNPREVREFLGKAGFCRLFIPGFAELAAPLYALTKPSTPFTWQTEHQLAFEALKKALLSAPALGLPDTSKPFTLFLDERQGIAKGVLTQKLGPWKRPVAYLSKKLDPVAAGWPPCLRIMAATAMLVKDSAKLTLGQPLTVITPHTLEAIVRQPPDRWITNARLTHYQALLLDTDRVQFGPPVTLNPATLLPVPENQPSPHDCRQVLAETHGTREDLKDQELPDADHTWYTDGSSYLDSGTRRAGAAVVDGHNTIWAQSLPPGTSAQKAELIALTKALELSKGKKANIYTDSRYAFATAHTHGSIYERRGWLTSEGKEIKNKAEIIALLKALFLPQEVAIIHCPGHQKGQDPVAVGNRQADRVARQAAMAEVLTLATEPDNTSHITAGKRTADGSEFEKRTADGSEFESPKKKAKVE

SEQ ID NO: 1974 - protein, 2100 aa, synthetic construct
MPAAKRVKLDGGDKKYSIGLDIGTNSVGWAVITDEYKVPSKKFKVLGNTDRHSIKKNLIGALLFDSGETAEATRLKRTARRRYTRRKNRICYLQEIFSNEMAKVDDSFFHRLEESFLVEEDKKHERHPIFGNIVDEVAYHEKYPTIYHLRKKLVDSTDKADLRLIYLALAHMIKFRGHFLIEGDLNPDNSDVDKLFIQLVQTYNQLFEENPINASGVDAKAILSARLSKSRRLENLIAQLPGEKKNGLFGNLIALSLGLTPNFKSNFDLAEDAKLQLSKDTYDDDLDNLLAQIGDQYADLFLAAKNLSDAILLSDILRVNTEITKAPLSASMIKRYDEHHQDLTLLKALVRQQLPEKYKEIFFDQSKNGYAGYIDGGASQEEFYKFIKPILEKMDGTEELLVKLNREDLLRKQRTFDNGSIPHQIHLGELHAILRRQEDFYPFLKDNREKIEKILTFRIPYYVGPLARGNSRFAWMTRKSEETITPWNFEEVVDKGASAQSFIERMTNFDKNLPNEKVLPKHSLLYEYFTVYNELTKVKYVTEGMRKPAFLSGEQKKAIVDLLFKTNRKVTVKQLKEDYFKKIECFDSVEISGVEDRFNASLGTYHDLLKIIKDKDFLDNEENEDILEDIVLTLTLFEDREMIEERLKTYAHLFDDKVMKQLKRRRYTGWGRLSRKLINGIRDKQSGKTILDFLKSDGFANRNFMQLIHDDSLTFKEDIQKAQVSGQGDSLHEHIANLAGSPAIKKGILQTVKVVDELVKVMGRHKPENIVIEMARENQTTQKGQKNSRERMKRIEEGIKELGSQILKEHPVENTQLQNEKLYLYYLQNGRDMYVDQELDINRLSDYDVDHIVPQSFLKDDSIDNKVLTRSDKARGKSDNVPSEEVVKKMKNYWRQLLNAKLITQRKFDNLTKAERGGLSELDKAGFIKRQLVETRQITKHVAQILDSRMNTKYDENDKLIREVKVITLKSKLVSDFRKDFQFYKVREINNYHHAHDAYLNAVVGTALIKKYPKLESEFVYGDYKVYDVRKMIAKSEQEIGKATAKYFFYSNIMNFFKTEITLANGEIRKRPLIETNGETGEIVWDKGRDFATVRKVLSMPQVNIVKKTEVQTGGFSKESILPKRNSDKLIARKKDWDPKKYGGFDSPTVAYSVLVVAKVEKGKSKKLKSVKELLGITIMERSSFEKNPIDFLEAKGYKEVKKDLIIKLPKYSLFELENGRKRMLASAGELQKGNELALPSKYVNFLYLASHYEKLKGSPEDNEQKQLFVEQHKHYLDEIIEQISEFSKRVILADANLDKVLSAYNKHRDKPIREQAENIIHLFTLTNLGAPAAFKYFDTTIDRKRYTSTKEVLDATLIHQSITGLYETRIDLSQLGGDGGGGSGSSGGGGGTVSLQDEHRLFDIPVTTSLPDVWLQDFPQAWAETGGLGRAKCQAPIIIDLKPTAVPVSIKQYPMSLEAHMGIRQHIIKFLELGVLRPCRSPWNTPLLPVKKPGTQDYRPVQDLREINKRTVDIHPTVPNPYNLLSTLKPDYSWYTVLDLKDAFFCLPLAPQSQELFAFEWKDPERGISGQLTWTRLPQGFKNSPTLFNEALHRDLTDFRTQHPEVTLLQYVDDLLLAAPTKKACTQGTRHLLQELGEKGYRASAKKAQICQTKVTYLGYILSEGKRWLTPGRIETVARIPPPRNPREVREFLGKAGFCRLFIPGFAELAAPLYALTKPSTPFTWQTEHQLAFEALKKALLSAPALGLPDTSKPFTLFLDERQGIAKGVLTQKLGPWKRPVAYLSKKLDPVAAGWPPCLRIMAATAMLVKDSAKLTLGQPLTVITPHTLEAIVRQPPDRWITNARLTHYQALLLDTDRVQFGPPVTLNPATLLPVPENQPSPHDCRQVLAETHGTREDLKDQELPDADHTWYTDGSSYLDSGTRRAGAAVVDGHNTIWAQSLPPGTSAQKAELIALTKALELSKGKKANIYTDSRYAFATAHTHGSIYERRGWLTSEGKEIKNKAEIIALLKALFLPQEVAIIHCPGHQKGQDPVAVGNRQADRVARQAAMAEVLTLATEPDNTSHITAGKRTADGSEFEKRTADGSEFESPKKKAKVE

SEQ ID NO: 1975 - protein, 2102 aa, synthetic construct
MPAAKRVKLDGGDKKYSIGLDIGTNSVGWAVITDEYKVPSKKFKVLGNTDRHSIKKNLIGALLFDSGETAEATRLKRTARRRYTRRKNRICYLQEIFSNEMAKVDDSFFHRLEESFLVEEDKKHERHPIFGNIVDEVAYHEKYPTIYHLRKKLVDSTDKADLRLIYLALAHMIKFRGHFLIEGDLNPDNSDVDKLFIQLVQTYNQLFEENPINASGVDAKAILSARLSKSRRLENLIAQLPGEKKNGLFGNLIALSLGLTPNFKSNFDLAEDAKLQLSKDTYDDDLDNLLAQIGDQYADLFLAAKNLSDAILLSDILRVNTEITKAPLSASMIKRYDEHHQDLTLLKALVRQQLPEKYKEIFFDQSKNGYAGYIDGGASQEEFYKFIKPILEKMDGTEELLVKLNREDLLRKQRTFDNGSIPHQIHLGELHAILRRQEDFYPFLKDNREKIEKILTFRIPYYVGPLARGNSRFAWMTRKSEETITPWNFEEVVDKGASAQSFIERMTNFDKNLPNEKVLPKHSLLYEYFTVYNELTKVKYVTEGMRKPAFLSGEQKKAIVDLLFKTNRKVTVKQLKEDYFKKIECFDSVEISGVEDRFNASLGTYHDLLKIIKDKDFLDNEENEDILEDIVLTLTLFEDREMIEERLKTYAHLFDDKVMKQLKRRRYTGWGRLSRKLINGIRDKQSGKTILDFLKSDGFANRNFMQLIHDDSLTFKEDIQKAQVSGQGDSLHEHIANLAGSPAIKKGILQTVKVVDELVKVMGRHKPENIVIEMARENQTTQKGQKNSRERMKRIEEGIKELGSQILKEHPVENTQLQNEKLYLYYLQNGRDMYVDQELDINRLSDYDVDHIVPQSFLKDDSIDNKVLTRSDKARGKSDNVPSEEVVKKMKNYWRQLLNAKLITQRKFDNLTKAERGGLSELDKAGFIKRQLVETRQITKHVAQILDSRMNTKYDENDKLIREVKVITLKSKLVSDFRKDFQFYKVREINNYHHAHDAYLNAVVGTALIKKYPKLESEFVYGDYKVYDVRKMIAKSEQEIGKATAKYFFYSNIMNFFKTEITLANGEIRKRPLIETNGETGEIVWDKGRDFATVRKVLSMPQVNIVKKTEVQTGGFSKESILPKRNSDKLIARKKDWDPKKYGGFDSPTVAYSVLVVAKVEKGKSKKLKSVKELLGITIMERSSFEKNPIDFLEAKGYKEVKKDLIIKLPKYSLFELENGRKRMLASAGELQKGNELALPSKYVNFLYLASHYEKLKGSPEDNEQKQLFVEQHKHYLDEIIEQISEFSKRVILADANLDKVLSAYNKHRDKPIREQAENIIHLFTLTNLGAPAAFKYFDTTIDRKRYTSTKEVLDATLIHQSITGLYETRIDLSQLGGDGGGGGGSSEAAAKGGTVSLQDEHRLFDIPVTTSLPDVWLQDFPQAWAETGGLGRAKCQAPIIIDLKPTAVPVSIKQYPMSLEAHMGIRQHIIKFLELGVLRPCRSPWNTPLLPVKKPGTQDYRPVQDLREINKRTVDIHPTVPNPYNLLSTLKPDYSWYTVLDLKDAFFCLPLAPQSQELFAFEWKDPERGISGQLTWTRLPQGFKNSPTLFNEALHRDLTDFRTQHPEVTLLQYVDDLLLAAPTKKACTQGTRHLLQELGEKGYRASAKKAQICQTKVTYLGYILSEGKRWLTPGRIETVARIPPPRNPREVREFLGKAGFCRLFIPGFAELAAPLYALTKPSTPFTWQTEHQLAFEALKKALLSAPALGLPDTSKPFTLFLDERQGIAKGVLTQKLGPWKRPVAYLSKKLDPVAAGWPPCLRIMAATAMLVKDSAKLTLGQPLTVITPHTLEAIVRQPPDRWITNARLTHYQALLLDTDRVQFGPPVTLNPATLLPVPENQPSPHDCRQVLAETHGTREDLKDQELPDADHTWYTDGSSYLDSGTRRAGAAVVDGHNTIWAQSLPPGTSAQKAELIALTKALELSKGKKANIYTDSRYAFATAHTHGSIYERRGWLTSEGKEIKNKAEIIALLKALFLPQEVAIIHCPGHQKGQDPVAVGNRQADRVARQAAMAEVLTLATEPDNTSHITAGKRTADGSEFEKRTADGSEFESPKKKAKVE

SEQ ID NO: 1976 - protein, 2100 aa, synthetic construct
MPAAKRVKLDGGDKKYSIGLDIGTNSVGWAVITDEYKVPSKKFKVLGNTDRHSIKKNLIGALLFDSGETAEATRLKRTARRRYTRRKNRICYLQEIFSNEMAKVDDSFFHRLEESFLVEEDKKHERHPIFGNIVDEVAYHEKYPTIYHLRKKLVDSTDKADLRLIYLALAHMIKFRGHFLIEGDLNPDNSDVDKLFIQLVQTYNQLFEENPINASGVDAKAILSARLSKSRRLENLIAQLPGEKKNGLFGNLIALSLGLTPNFKSNFDLAEDAKLQLSKDTYDDDLDNLLAQIGDQYADLFLAAKNLSDAILLSDILRVNTEITKAPLSASMIKRYDEHHQDLTLLKALVRQQLPEKYKEIFFDQSKNGYAGYIDGGASQEEFYKFIKPILEKMDGTEELLVKLNREDLLRKQRTFDNGSIPHQIHLGELHAILRRQEDFYPFLKDNREKIEKILTFRIPYYVGPLARGNSRFAWMTRKSEETITPWNFEEVVDKGASAQSFIERMTNFDKNLPNEKVLPKHSLLYEYFTVYNELTKVKYVTEGMRKPAFLSGEQKKAIVDLLFKTNRKVTVKQLKEDYFKKIECFDSVEISGVEDRFNASLGTYHDLLKIIKDKDFLDNEENEDILEDIVLTLTLFEDREMIEERLKTYAHLFDDKVMKQLKRRRYTGWGRLSRKLINGIRDKQSGKTILDFLKSDGFANRNFMQLIHDDSLTFKEDIQKAQVSGQGDSLHEHIANLAGSPAIKKGILQTVKVVDELVKVMGRHKPENIVIEMARENQTTQKGQKNSRERMKRIEEGIKELGSQILKEHPVENTQLQNEKLYLYYLQNGRDMYVDQELDINRLSDYDVDHIVPQSFLKDDSIDNKVLTRSDKARGKSDNVPSEEVVKKMKNYWRQLLNAKLITQRKFDNLTKAERGGLSELDKAGFIKRQLVETRQITKHVAQILDSRMNTKYDENDKLIREVKVITLKSKLVSDFRKDFQFYKVREINNYHHAHDAYLNAVVGTALIKKYPKLESEFVYGDYKVYDVRKMIAKSEQEIGKATAKYFFYSNIMNFFKTEITLANGEIRKRPLIETNGETGEIVWDKGRDFATVRKVLSMPQVNIVKKTEVQTGGFSKESILPKRNSDKLIARKKDWDPKKYGGFDSPTVAYSVLVVAKVEKGKSKKLKSVKELLGITIMERSSFEKNPIDFLEAKGYKEVKKDLIIKLPKYSLFELENGRKRMLASAGELQKGNELALPSKYVNFLYLASHYEKLKGSPEDNEQKQLFVEQHKHYLDEIIEQISEFSKRVILADANLDKVLSAYNKHRDKPIREQAENIIHLFTLTNLGAPAAFKYFDTTIDRKRYTSTKEVLDATLIHQSITGLYETRIDLSQLGGDGGGGSPAPGGGGGTVSLQDEHRLFDIPVTTSLPDVWLQDFPQAWAETGGLGRAKCQAPIIIDLKPTAVPVSIKQYPMSLEAHMGIRQHIIKFLELGVLRPCRSPWNTPLLPVKKPGTQDYRPVQDLREINKRTVDIHPTVPNPYNLLSTLKPDYSWYTVLDLKDAFFCLPLAPQSQELFAFEWKDPERGISGQLTWTRLPQGFKNSPTLFNEALHRDLTDFRTQHPEVTLLQYVDDLLLAAPTKKACTQGTRHLLQELGEKGYRASAKKAQICQTKVTYLGYILSEGKRWLTPGRIETVARIPPPRNPREVREFLGKAGFCRLFIPGFAELAAPLYALTKPSTPFTWQTEHQLAFEALKKALLSAPALGLPDTSKPFTLFLDERQGIAKGVLTQKLGPWKRPVAYLSKKLDPVAAGWPPCLRIMAATAMLVKDSAKLTLGQPLTVITPHTLEAIVRQPPDRWITNARLTHYQALLLDTDRVQFGPPVTLNPATLLPVPENQPSPHDCRQVLAETHGTREDLKDQELPDADHTWYTDGSSYLDSGTRRAGAAVVDGHNTIWAQSLPPGTSAQKAELIALTKALELSKGKKANIYTDSRYAFATAHTHGSIYERRGWLTSEGKEIKNKAEIIALLKALFLPQEVAIIHCPGHQKGQDPVAVGNRQADRVARQAAMAEVLTLATEPDNTSHITAGKRTADGSEFEKRTADGSEFESPKKKAKVE

SEQ ID NO: 1977 - protein, 2102 aa, synthetic construct
MPAAKRVKLDGGDKKYSIGLDIGTNSVGWAVITDEYKVPSKKFKVLGNTDRHSIKKNLIGALLFDSGETAEATRLKRTARRRYTRRKNRICYLQEIFSNEMAKVDDSFFHRLEESFLVEEDKKHERHPIFGNIVDEVAYHEKYPTIYHLRKKLVDSTDKADLRLIYLALAHMIKFRGHFLIEGDLNPDNSDVDKLFIQLVQTYNQLFEENPINASGVDAKAILSARLSKSRRLENLIAQLPGEKKNGLFGNLIALSLGLTPNFKSNFDLAEDAKLQLSKDTYDDDLDNLLAQIGDQYADLFLAAKNLSDAILLSDILRVNTEITKAPLSASMIKRYDEHHQDLTLLKALVRQQLPEKYKEIFFDQSKNGYAGYIDGGASQEEFYKFIKPILEKMDGTEELLVKLNREDLLRKQRTFDNGSIPHQIHLGELHAILRRQEDFYPFLKDNREKIEKILTFRIPYYVGPLARGNSRFAWMTRKSEETITPWNFEEVVDKGASAQSFIERMTNFDKNLPNEKVLPKHSLLYEYFTVYNELTKVKYVTEGMRKPAFLSGEQKKAIVDLLFKTNRKVTVKQLKEDYFKKIECFDSVEISGVEDRFNASLGTYHDLLKIIKDKDFLDNEENEDILEDIVLTLTLFEDREMIEERLKTYAHLFDDKVMKQLKRRRYTGWGRLSRKLINGIRDKQSGKTILDFLKSDGFANRNFMQLIHDDSLTFKEDIQKAQVSGQGDSLHEHIANLAGSPAIKKGILQTVKVVDELVKVMGRHKPENIVIEMARENQTTQKGQKNSRERMKRIEEGIKELGSQILKEHPVENTQLQNEKLYLYYLQNGRDMYVDQELDINRLSDYDVDHIVPQSFLKDDSIDNKVLTRSDKARGKSDNVPSEEVVKKMKNYWRQLLNAKLITQRKFDNLTKAERGGLSELDKAGFIKRQLVETRQITKHVAQILDSRMNTKYDENDKLIREVKVITLKSKLVSDFRKDFQFYKVREINNYHHAHDAYLNAVVGTALIKKYPKLESEFVYGDYKVYDVRKMIAKSEQEIGKATAKYFFYSNIMNFFKTEITLANGEIRKRPLIETNGETGEIVWDKGRDFATVRKVLSMPQVNIVKKTEVQTGGFSKESILPKRNSDKLIARKKDWDPKKYGGFDSPTVAYSVLVVAKVEKGKSKKLKSVKELLGITIMERSSFEKNPIDFLEAKGYKEVKKDLIIKLPKYSLFELENGRKRMLASAGELQKGNELALPSKYVNFLYLASHYEKLKGSPEDNEQKQLFVEQHKHYLDEIIEQISEFSKRVILADANLDKVLSAYNKHRDKPIREQAENIIHLFTLTNLGAPAAFKYFDTTIDRKRYTSTKEVLDATLIHQSITGLYETRIDLSQLGGDGGPAPGGGEAAAKGGTVSLQDEHRLFDIPVTTSLPDVWLQDFPQAWAETGGLGRAKCQAPIIIDLKPTAVPVSIKQYPMSLEAHMGIRQHIIKFLELGVLRPCRSPWNTPLLPVKKPGTQDYRPVQDLREINKRTVDIHPTVPNPYNLLSTLKPDYSWYTVLDLKDAFFCLPLAPQSQELFAFEWKDPERGISGQLTWTRLPQGFKNSPTLFNEALHRDLTDFRTQHPEVTLLQYVDDLLLAAPTKKACTQGTRHLLQELGEKGYRASAKKAQICQTKVTYLGYILSEGKRWLTPGRIETVARIPPPRNPREVREFLGKAGFCRLFIPGFAELAAPLYALTKPSTPFTWQTEHQLAFEALKKALLSAPALGLPDTSKPFTLFLDERQGIAKGVLTQKLGPWKRPVAYLSKKLDPVAAGWPPCLRIMAATAMLVKDSAKLTLGQPLTVITPHTLEAIVRQPPDRWITNARLTHYQALLLDTDRVQFGPPVTLNPATLLPVPENQPSPHDCRQVLAETHGTREDLKDQELPDADHTWYTDGSSYLDSGTRRAGAAVVDGHNTIWAQSLPPGTSAQKAELIALTKALELSKGKKANIYTDSRYAFATAHTHGSIYERRGWLTSEGKEIKNKAEIIALLKALFLPQEVAIIHCPGHQKGQDPVAVGNRQADRVARQAAMAEVLTLATEPDNTSHITAGKRTADGSEFEKRTADGSEFESPKKKAKVE

SEQ ID NO: 1978 - protein, 2100 aa, synthetic construct
MPAAKRVKLDGGDKKYSIGLDIGTNSVGWAVITDEYKVPSKKFKVLGNTDRHSIKKNLIGALLFDSGETAEATRLKRTARRRYTRRKNRICYLQEIFSNEMAKVDDSFFHRLEESFLVEEDKKHERHPIFGNIVDEVAYHEKYPTIYHLRKKLVDSTDKADLRLIYLALAHMIKFRGHFLIEGDLNPDNSDVDKLFIQLVQTYNQLFEENPINASGVDAKAILSARLSKSRRLENLIAQLPGEKKNGLFGNLIALSLGLTPNFKSNFDLAEDAKLQLSKDTYDDDLDNLLAQIGDQYADLFLAAKNLSDAILLSDILRVNTEITKAPLSASMIKRYDEHHQDLTLLKALVRQQLPEKYKEIFFDQSKNGYAGYIDGGASQEEFYKFIKPILEKMDGTEELLVKLNREDLLRKQRTFDNGSIPHQIHLGELHAILRRQEDFYPFLKDNREKIEKILTFRIPYYVGPLARGNSRFAWMTRKSEETITPWNFEEVVDKGASAQSFIERMTNFDKNLPNEKVLPKHSLLYEYFTVYNELTKVKYVTEGMRKPAFLSGEQKKAIVDLLFKTNRKVTVKQLKEDYFKKIECFDSVEISGVEDRFNASLGTYHDLLKIIKDKDFLDNEENEDILEDIVLTLTLFEDREMIEERLKTYAHLFDDKVMKQLKRRRYTGWGRLSRKLINGIRDKQSGKTILDFLKSDGFANRNFMQLIHDDSLTFKEDIQKAQVSGQGDSLHEHIANLAGSPAIKKGILQTVKVVDELVKVMGRHKPENIVIEMARENQTTQKGQKNSRERMKRIEEGIKELGSQILKEHPVENTQLQNEKLYLYYLQNGRDMYVDQELDINRLSDYDVDHIVPQSFLKDDSIDNKVLTRSDKARGKSDNVPSEEVVKKMKNYWRQLLNAKLITQRKFDNLTKAERGGLSELDKAGFIKRQLVETRQITKHVAQILDSRMNTKYDENDKLIREVKVITLKSKLVSDFRKDFQFYKVREINNYHHAHDAYLNAVVGTALIKKYPKLESEFVYGDYKVYDVRKMIAKSEQEIGKATAKYFFYSNIMNFFKTEITLANGEIRKRPLIETNGETGEIVWDKGRDFATVRKVLSMPQVNIVKKTEVQTGGFSKESILPKRNSDKLIARKKDWDPKKYGGFDSPTVAYSVLVVAKVEKGKSKKLKSVKELLGITIMERSSFEKNPIDFLEAKGYKEVKKDLIIKLPKYSLFELENGRKRMLASAGELQKGNELALPSKYVNFLYLASHYEKLKGSPEDNEQKQLFVEQHKHYLDEIIEQISEFSKRVILADANLDKVLSAYNKHRDKPIREQAENIIHLFTLTNLGAPAAFKYFDTTIDRKRYTSTKEVLDATLIHQSITGLYETRIDLSQLGGDGGPAPAPAPAPGGTVSLQDEHRLFDIPVTTSLPDVWLQDFPQAWAETGGLGRAKCQAPIIIDLKPTAVPVSIKQYPMSLEAHMGIRQHIIKFLELGVLRPCRSPWNTPLLPVKKPGTQDYRPVQDLREINKRTVDIHPTVPNPYNLLSTLKPDYSWYTVLDLKDAFFCLPLAPQSQELFAFEWKDPERGISGQLTWTRLPQGFKNSPTLFNEALHRDLTDFRTQHPEVTLLQYVDDLLLAAPTKKACTQGTRHLLQELGEKGYRASAKKAQICQTKVTYLGYILSEGKRWLTPGRIETVARIPPPRNPREVREFLGKAGFCRLFIPGFAELAAPLYALTKPSTPFTWQTEHQLAFEALKKALLSAPALGLPDTSKPFTLFLDERQGIAKGVLTQKLGPWKRPVAYLSKKLDPVAAGWPPCLRIMAATAMLVKDSAKLTLGQPLTVITPHTLEAIVRQPPDRWITNARLTHYQALLLDTDRVQFGPPVTLNPATLLPVPENQPSPHDCRQVLAETHGTREDLKDQELPDADHTWYTDGSSYLDSGTRRAGAAVVDGHNTIWAQSLPPGTSAQKAELIALTKALELSKGKKANIYTDSRYAFATAHTHGSIYERRGWLTSEGKEIKNKAEIIALLKALFLPQEVAIIHCPGHQKGQDPVAVGNRQADRVARQAAMAEVLTLATEPDNTSHITAGKRTADGSEFEKRTADGSEFESPKKKAKVE

SEQ ID NO: 1979 - protein, 2099 aa, synthetic construct
MPAAKRVKLDGGDKKYSIGLDIGTNSVGWAVITDEYKVPSKKFKVLGNTDRHSIKKNLIGALLFDSGETAEATRLKRTARRRYTRRKNRICYLQEIFSNEMAKVDDSFFHRLEESFLVEEDKKHERHPIFGNIVDEVAYHEKYPTIYHLRKKLVDSTDKADLRLIYLALAHMIKFRGHFLIEGDLNPDNSDVDKLFIQLVQTYNQLFEENPINASGVDAKAILSARLSKSRRLENLIAQLPGEKKNGLFGNLIALSLGLTPNFKSNFDLAEDAKLQLSKDTYDDDLDNLLAQIGDQYADLFLAAKNLSDAILLSDILRVNTEITKAPLSASMIKRYDEHHQDLTLLKALVRQQLPEKYKEIFFDQSKNGYAGYIDGGASQEEFYKFIKPILEKMDGTEELLVKLNREDLLRKQRTFDNGSIPHQIHLGELHAILRRQEDFYPFLKDNREKIEKILTFRIPYYVGPLARGNSRFAWMTRKSEETITPWNFEEVVDKGASAQSFIERMTNFDKNLPNEKVLPKHSLLYEYFTVYNELTKVKYVTEGMRKPAFLSGEQKKAIVDLLFKTNRKVTVKQLKEDYFKKIECFDSVEISGVEDRFNASLGTYHDLLKIIKDKDFLDNEENEDILEDIVLTLTLFEDREMIEERLKTYAHLFDDKVMKQLKRRRYTGWGRLSRKLINGIRDKQSGKTILDFLKSDGFANRNFMQLIHDDSLTFKEDIQKAQVSGQGDSLHEHIANLAGSPAIKKGILQTVKVVDELVKVMGRHKPENIVIEMARENQTTQKGQKNSRERMKRIEEGIKELGSQILKEHPVENTQLQNEKLYLYYLQNGRDMYVDQELDINRLSDYDVDHIVPQSFLKDDSIDNKVLTRSDKARGKSDNVPSEEVVKKMKNYWRQLLNAKLITQRKFDNLTKAERGGLSELDKAGFIKRQLVETRQITKHVAQILDSRMNTKYDENDKLIREVKVITLKSKLVSDFRKDFQFYKVREINNYHHAHDAYLNAVVGTALIKKYPKLESEFVYGDYKVYDVRKMIAKSEQEIGKATAKYFFYSNIMNFFKTEITLANGEIRKRPLIETNGETGEIVWDKGRDFATVRKVLSMPQVNIVKKTEVQTGGFSKESILPKRNSDKLIARKKDWDPKKYGGFDSPTVAYSVLVVAKVEKGKSKKLKSVKELLGITIMERSSFEKNPIDFLEAKGYKEVKKDLIIKLPKYSLFELENGRKRMLASAGELQKGNELALPSKYVNFLYLASHYEKLKGSPEDNEQKQLFVEQHKHYLDEIIEQISEFSKRVILADANLDKVLSAYNKHRDKPIREQAENIIHLFTLTNLGAPAAFKYFDTTIDRKRYTSTKEVLDATLIHQSITGLYETRIDLSQLGGDGGGGGGGGGGGGTVSLQDEHRLFDIPVTTSLPDVWLQDFPQAWAETGGLGRAKCQAPIIIDLKPTAVPVSIKQYPMSLEAHMGIRQHIIKFLELGVLRPCRSPWNTPLLPVKKPGTQDYRPVQDLREINKRTVDIHPTVPNPYNLLSTLKPDYSWYTVLDLKDAFFCLPLAPQSQELFAFEWKDPERGISGQLTWTRLPQGFKNSPTLFNEALHRDLTDFRTQHPEVTLLQYVDDLLLAAPTKKACTQGTRHLLQELGEKGYRASAKKAQICQTKVTYLGYILSEGKRWLTPGRIETVARIPPPRNPREVREFLGKAGFCRLFIPGFAELAAPLYALTKPSTPFTWQTEHQLAFEALKKALLSAPALGLPDTSKPFTLFLDERQGIAKGVLTQKLGPWKRPVAYLSKKLDPVAAGWPPCLRIMAATAMLVKDSAKLTLGQPLTVITPHTLEAIVRQPPDRWITNARLTHYQALLLDTDRVQFGPPVTLNPATLLPVPENQPSPHDCRQVLAETHGTREDLKDQELPDADHTWYTDGSSYLDSGTRRAGAAVVDGHNTIWAQSLPPGTSAQKAELIALTKALELSKGKKANIYTDSRYAFATAHTHGSIYERRGWLTSEGKEIKNKAEIIALLKALFLPQEVAIIHCPGHQKGQDPVAVGNRQADRVARQAAMAEVLTLATEPDNTSHITAGKRTADGSEFEKRTADGSEFESPKKKAKVE

SEQ ID NO: 1980 - protein, 2107 aa, synthetic construct
MPAAKRVKLDGGDKKYSIGLDIGTNSVGWAVITDEYKVPSKKFKVLGNTDRHSIKKNLIGALLFDSGETAEATRLKRTARRRYTRRKNRICYLQEIFSNEMAKVDDSFFHRLEESFLVEEDKKHERHPIFGNIVDEVAYHEKYPTIYHLRKKLVDSTDKADLRLIYLALAHMIKFRGHFLIEGDLNPDNSDVDKLFIQLVQTYNQLFEENPINASGVDAKAILSARLSKSRRLENLIAQLPGEKKNGLFGNLIALSLGLTPNFKSNFDLAEDAKLQLSKDTYDDDLDNLLAQIGDQYADLFLAAKNLSDAILLSDILRVNTEITKAPLSASMIKRYDEHHQDLTLLKALVRQQLPEKYKEIFFDQSKNGYAGYIDGGASQEEFYKFIKPILEKMDGTEELLVKLNREDLLRKQRTFDNGSIPHQIHLGELHAILRRQEDFYPFLKDNREKIEKILTFRIPYYVGPLARGNSRFAWMTRKSEETITPWNFEEVVDKGASAQSFIERMTNFDKNLPNEKVLPKHSLLYEYFTVYNELTKVKYVTEGMRKPAFLSGEQKKAIVDLLFKTNRKVTVKQLKEDYFKKIECFDSVEISGVEDRFNASLGTYHDLLKIIKDKDFLDNEENEDILEDIVLTLTLFEDREMIEERLKTYAHLFDDKVMKQLKRRRYTGWGRLSRKLINGIRDKQSGKTILDFLKSDGFANRNFMQLIHDDSLTFKEDIQKAQVSGQGDSLHEHIANLAGSPAIKKGILQTVKVVDELVKVMGRHKPENIVIEMARENQTTQKGQKNSRERMKRIEEGIKELGSQILKEHPVENTQLQNEKLYLYYLQNGRDMYVDQELDINRLSDYDVDHIVPQSFLKDDSIDNKVLTRSDKARGKSDNVPSEEVVKKMKNYWRQLLNAKLITQRKFDNLTKAERGGLSELDKAGFIKRQLVETRQITKHVAQILDSRMNTKYDENDKLIREVKVITLKSKLVSDFRKDFQFYKVREINNYHHAHDAYLNAVVGTALIKKYPKLESEFVYGDYKVYDVRKMIAKSEQEIGKATAKYFFYSNIMNFFKTEITLANGEIRKRPLIETNGETGEIVWDKGRDFATVRKVLSMPQVNIVKKTEVQTGGFSKESILPKRNSDKLIARKKDWDPKKYGGFDSPTVAYSVLVVAKVEKGKSKKLKSVKELLGITIMERSSFEKNPIDFLEAKGYKEVKKDLIIKLPKYSLFELENGRKRMLASAGELQKGNELALPSKYVNFLYLASHYEKLKGSPEDNEQKQLFVEQHKHYLDEIIEQISEFSKRVILADANLDKVLSAYNKHRDKPIREQAENIIHLFTLTNLGAPAAFKYFDTTIDRKRYTSTKEVLDATLIHQSITGLYETRIDLSQLGGDGGSGSETPGTSESATPESGGTVSLQDEHRLFDIPVTTSLPDVWLQDFPQAWAETGGLGRAKCQAPIIIDLKPTAVPVSIKQYPMSLEAHMGIRQHIIKFLELGVLRPCRSPWNTPLLPVKKPGTQDYRPVQDLREINKRTVDIHPTVPNPYNLLSTLKPDYSWYTVLDLKDAFFCLPLAPQSQELFAFEWKDPERGISGQLTWTRLPQGFKNSPTLFNEALHRDLTDFRTQHPEVTLLQYVDDLLLAAPTKKACTQGTRHLLQELGEKGYRASAKKAQICQTKVTYLGYILSEGKRWLTPGRIETVARIPPPRNPREVREFLGKAGFCRLFIPGFAELAAPLYALTKPSTPFTWQTEHQLAFEALKKALLSAPALGLPDTSKPFTLFLDERQGIAKGVLTQKLGPWKRPVAYLSKKLDPVAAGWPPCLRIMAATAMLVKDSAKLTLGQPLTVITPHTLEAIVRQPPDRWITNARLTHYQALLLDTDRVQFGPPVTLNPATLLPVPENQPSPHDCRQVLAETHGTREDLKDQELPDADHTWYTDGSSYLDSGTRRAGAAVVDGHNTIWAQSLPPGTSAQKAELIALTKALELSKGKKANIYTDSRYAFATAHTHGSIYERRGWLTSEGKEIKNKAEIIALLKALFLPQEVAIIHCPGHQKGQDPVAVGNRQADRVARQAAMAEVLTLATEPDNTSHITAGKRTADGSEFEKRTADGSEFESPKKKAKVE

SEQ ID NO: 1981 - protein, 2102 aa, synthetic construct
MPAAKRVKLDGGDKKYSIGLDIGTNSVGWAVITDEYKVPSKKFKVLGNTDRHSIKKNLIGALLFDSGETAEATRLKRTARRRYTRRKNRICYLQEIFSNEMAKVDDSFFHRLEESFLVEEDKKHERHPIFGNIVDEVAYHEKYPTIYHLRKKLVDSTDKADLRLIYLALAHMIKFRGHFLIEGDLNPDNSDVDKLFIQLVQTYNQLFEENPINASGVDAKAILSARLSKSRRLENLIAQLPGEKKNGLFGNLIALSLGLTPNFKSNFDLAEDAKLQLSKDTYDDDLDNLLAQIGDQYADLFLAAKNLSDAILLSDILRVNTEITKAPLSASMIKRYDEHHQDLTLLKALVRQQLPEKYKEIFFDQSKNGYAGYIDGGASQEEFYKFIKPILEKMDGTEELLVKLNREDLLRKQRTFDNGSIPHQIHLGELHAILRRQEDFYPFLKDNREKIEKILTFRIPYYVGPLARGNSRFAWMTRKSEETITPWNFEEVVDKGASAQSFIERMTNFDKNLPNEKVLPKHSLLYEYFTVYNELTKVKYVTEGMRKPAFLSGEQKKAIVDLLFKTNRKVTVKQLKEDYFKKIECFDSVEISGVEDRFNASLGTYHDLLKIIKDKDFLDNEENEDILEDIVLTLTLFEDREMIEERLKTYAHLFDDKVMKQLKRRRYTGWGRLSRKLINGIRDKQSGKTILDFLKSDGFANRNFMQLIHDDSLTFKEDIQKAQVSGQGDSLHEHIANLAGSPAIKKGILQTVKVVDELVKVMGRHKPENIVIEMARENQTTQKGQKNSRERMKRIEEGIKELGSQILKEHPVENTQLQNEKLYLYYLQNGRDMYVDQELDINRLSDYDVDHIVPQSFLKDDSIDNKVLTRSDKARGKSDNVPSEEVVKKMKNYWRQLLNAKLITQRKFDNLTKAERGGLSELDKAGFIKRQLVETRQITKHVAQILDSRMNTKYDENDKLIREVKVITLKSKLVSDFRKDFQFYKVREINNYHHAHDAYLNAVVGTALIKKYPKLESEFVYGDYKVYDVRKMIAKSEQEIGKATAKYFFYSNIMNFFKTEITLANGEIRKRPLIETNGETGEIVWDKGRDFATVRKVLSMPQVNIVKKTEVQTGGFSKESILPKRNSDKLIARKKDWDPKKYGGFDSPTVAYSVLVVAKVEKGKSKKLKSVKELLGITIMERSSFEKNPIDFLEAKGYKEVKKDLIIKLPKYSLFELENGRKRMLASAGELQKGNELALPSKYVNFLYLASHYEKLKGSPEDNEQKQLFVEQHKHYLDEIIEQISEFSKRVILADANLDKVLSAYNKHRDKPIREQAENIIHLFTLTNLGAPAAFKYFDTTIDRKRYTSTKEVLDATLIHQSITGLYETRIDLSQLGGDGGGSSPAPEAAAKGGTVSLQDEHRLFDIPVTTSLPDVWLQDFPQAWAETGGLGRAKCQAPIIIDLKPTAVPVSIKQYPMSLEAHMGIRQHIIKFLELGVLRPCRSPWNTPLLPVKKPGTQDYRPVQDLREINKRTVDIHPTVPNPYNLLSTLKPDYSWYTVLDLKDAFFCLPLAPQSQELFAFEWKDPERGISGQLTWTRLPQGFKNSPTLFNEALHRDLTDFRTQHPEVTLLQYVDDLLLAAPTKKACTQGTRHLLQELGEKGYRASAKKAQICQTKVTYLGYILSEGKRWLTPGRIETVARIPPPRNPREVREFLGKAGFCRLFIPGFAELAAPLYALTKPSTPFTWQTEHQLAFEALKKALLSAPALGLPDTSKPFTLFLDERQGIAKGVLTQKLGPWKRPVAYLSKKLDPVAAGWPPCLRIMAATAMLVKDSAKLTLGQPLTVITPHTLEAIVRQPPDRWITNARLTHYQALLLDTDRVQFGPPVTLNPATLLPVPENQPSPHDCRQVLAETHGTREDLKDQELPDADHTWYTDGSSYLDSGTRRAGAAVVDGHNTIWAQSLPPGTSAQKAELIALTKALELSKGKKANIYTDSRYAFATAHTHGSIYERRGWLTSEGKEIKNKAEIIALLKALFLPQEVAIIHCPGHQKGQDPVAVGNRQADRVARQAAMAEVLTLATEPDNTSHITAGKRTADGSEFEKRTADGSEFESPKKKAKVE

SEQ ID NO: 1982 - protein, 2100 aa, synthetic construct
MPAAKRVKLDGGDKKYSIGLDIGTNSVGWAVITDEYKVPSKKFKVLGNTDRHSIKKNLIGALLFDSGETAEATRLKRTARRRYTRRKNRICYLQEIFSNEMAKVDDSFFHRLEESFLVEEDKKHERHPIFGNIVDEVAYHEKYPTIYHLRKKLVDSTDKADLRLIYLALAHMIKFRGHFLIEGDLNPDNSDVDKLFIQLVQTYNQLFEENPINASGVDAKAILSARLSKSRRLENLIAQLPGEKKNGLFGNLIALSLGLTPNFKSNFDLAEDAKLQLSKDTYDDDLDNLLAQIGDQYADLFLAAKNLSDAILLSDILRVNTEITKAPLSASMIKRYDEHHQDLTLLKALVRQQLPEKYKEIFFDQSKNGYAGYIDGGASQEEFYKFIKPILEKMDGTEELLVKLNREDLLRKQRTFDNGSIPHQIHLGELHAILRRQEDFYPFLKDNREKIEKILTFRIPYYVGPLARGNSRFAWMTRKSEETITPWNFEEVVDKGASAQSFIERMTNFDKNLPNEKVLPKHSLLYEYFTVYNELTKVKYVTEGMRKPAFLSGEQKKAIVDLLFKTNRKVTVKQLKEDYFKKIECFDSVEISGVEDRFNASLGTYHDLLKIIKDKDFLDNEENEDILEDIVLTLTLFEDREMIEERLKTYAHLFDDKVMKQLKRRRYTGWGRLSRKLINGIRDKQSGKTILDFLKSDGFANRNFMQLIHDDSLTFKEDIQKAQVSGQGDSLHEHIANLAGSPAIKKGILQTVKVVDELVKVMGRHKPENIVIEMARENQTTQKGQKNSRERMKRIEEGIKELGSQILKEHPVENTQLQNEKLYLYYLQNGRDMYVDQELDINRLSDYDVDHIVPQSFLKDDSIDNKVLTRSDKARGKSDNVPSEEVVKKMKNYWRQLLNAKLITQRKFDNLTKAERGGLSELDKAGFIKRQLVETRQITKHVAQILDSRMNTKYDENDKLIREVKVITLKSKLVSDFRKDFQFYKVREINNYHHAHDAYLNAVVGTALIKKYPKLESEFVYGDYKVYDVRKMIAKSEQEIGKATAKYFFYSNIMNFFKTEITLANGEIRKRPLIETNGETGEIVWDKGRDFATVRKVLSMPQVNIVKKTEVQTGGFSKESILPKRNSDKLIARKKDWDPKKYGGFDSPTVAYSVLVVAKVEKGKSKKLKSVKELLGITIMERSSFEKNPIDFLEAKGYKEVKKDLIIKLPKYSLFELENGRKRMLASAGELQKGNELALPSKYVNFLYLASHYEKLKGSPEDNEQKQLFVEQHKHYLDEIIEQISEFSKRVILADANLDKVLSAYNKHRDKPIREQAENIIHLFTLTNLGAPAAFKYFDTTIDRKRYTSTKEVLDATLIHQSITGLYETRIDLSQLGGDGGGSSGGGGGSGGTVSLQDEHRLFDIPVTTSLPDVWLQDFPQAWAETGGLGRAKCQAPIIIDLKPTAVPVSIKQYPMSLEAHMGIRQHIIKFLELGVLRPCRSPWNTPLLPVKKPGTQDYRPVQDLREINKRTVDIHPTVPNPYNLLSTLKPDYSWYTVLDLKDAFFCLPLAPQSQELFAFEWKDPERGISGQLTWTRLPQGFKNSPTLFNEALHRDLTDFRTQHPEVTLLQYVDDLLLAAPTKKACTQGTRHLLQELGEKGYRASAKKAQICQTKVTYLGYILSEGKRWLTPGRIETVARIPPPRNPREVREFLGKAGFCRLFIPGFAELAAPLYALTKPSTPFTWQTEHQLAFEALKKALLSAPALGLPDTSKPFTLFLDERQGIAKGVLTQKLGPWKRPVAYLSKKLDPVAAGWPPCLRIMAATAMLVKDSAKLTLGQPLTVITPHTLEAIVRQPPDRWITNARLTHYQALLLDTDRVQFGPPVTLNPATLLPVPENQPSPHDCRQVLAETHGTREDLKDQELPDADHTWYTDGSSYLDSGTRRAGAAVVDGHNTIWAQSLPPGTSAQKAELIALTKALELSKGKKANIYTDSRYAFATAHTHGSIYERRGWLTSEGKEIKNKAEIIALLKALFLPQEVAIIHCPGHQKGQDPVAVGNRQADRVARQAAMAEVLTLATEPDNTSHITAGKRTADGSEFEKRTADGSEFESPKKKAKVE

SEQ ID NO: 1983 - protein, 2097 aa, synthetic construct
MPAAKRVKLDGGDKKYSIGLDIGTNSVGWAVITDEYKVPSKKFKVLGNTDRHSIKKNLIGALLFDSGETAEATRLKRTARRRYTRRKNRICYLQEIFSNEMAKVDDSFFHRLEESFLVEEDKKHERHPIFGNIVDEVAYHEKYPTIYHLRKKLVDSTDKADLRLIYLALAHMIKFRGHFLIEGDLNPDNSDVDKLFIQLVQTYNQLFEENPINASGVDAKAILSARLSKSRRLENLIAQLPGEKKNGLFGNLIALSLGLTPNFKSNFDLAEDAKLQLSKDTYDDDLDNLLAQIGDQYADLFLAAKNLSDAILLSDILRVNTEITKAPLSASMIKRYDEHHQDLTLLKALVRQQLPEKYKEIFFDQSKNGYAGYIDGGASQEEFYKFIKPILEKMDGTEELLVKLNREDLLRKQRTFDNGSIPHQIHLGELHAILRRQEDFYPFLKDNREKIEKILTFRIPYYVGPLARGNSRFAWMTRKSEETITPWNFEEVVDKGASAQSFIERMTNFDKNLPNEKVLPKHSLLYEYFTVYNELTKVKYVTEGMRKPAFLSGEQKKAIVDLLFKTNRKVTVKQLKEDYFKKIECFDSVEISGVEDRFNASLGTYHDLLKIIKDKDFLDNEENEDILEDIVLTLTLFEDREMIEERLKTYAHLFDDKVMKQLKRRRYTGWGRLSRKLINGIRDKQSGKTILDFLKSDGFANRNFMQLIHDDSLTFKEDIQKAQVSGQGDSLHEHIANLAGSPAIKKGILQTVKVVDELVKVMGRHKPENIVIEMARENQTTQKGQKNSRERMKRIEEGIKELGSQILKEHPVENTQLQNEKLYLYYLQNGRDMYVDQELDINRLSDYDVDHIVPQSFLKDDSIDNKVLTRSDKARGKSDNVPSEEVVKKMKNYWRQLLNAKLITQRKFDNLTKAERGGLSELDKAGFIKRQLVETRQITKHVAQILDSRMNTKYDENDKLIREVKVITLKSKLVSDFRKDFQFYKVREINNYHHAHDAYLNAVVGTALIKKYPKLESEFVYGDYKVYDVRKMIAKSEQEIGKATAKYFFYSNIMNFFKTEITLANGEIRKRPLIETNGETGEIVWDKGRDFATVRKVLSMPQVNIVKKTEVQTGGFSKESILPKRNSDKLIARKKDWDPKKYGGFDSPTVAYSVLVVAKVEKGKSKKLKSVKELLGITIMERSSFEKNPIDFLEAKGYKEVKKDLIIKLPKYSLFELENGRKRMLASAGELQKGNELALPSKYVNFLYLASHYEKLKGSPEDNEQKQLFVEQHKHYLDEIIEQISEFSKRVILADANLDKVLSAYNKHRDKPIREQAENIIHLFTLTNLGAPAAFKYFDTTIDRKRYTSTKEVLDATLIHQSITGLYETRIDLSQLGGDGGPAPGGGGGTVSLQDEHRLFDIPVTTSLPDVWLQDFPQAWAETGGLGRAKCQAPIIIDLKPTAVPVSIKQYPMSLEAHMGIRQHIIKFLELGVLRPCRSPWNTPLLPVKKPGTQDYRPVQDLREINKRTVDIHPTVPNPYNLLSTLKPDYSWYTVLDLKDAFFCLPLAPQSQELFAFEWKDPERGISGQLTWTRLPQGFKNSPTLFNEALHRDLTDFRTQHPEVTLLQYVDDLLLAAPTKKACTQGTRHLLQELGEKGYRASAKKAQICQTKVTYLGYILSEGKRWLTPGRIETVARIPPPRNPREVREFLGKAGFCRLFIPGFAELAAPLYALTKPSTPFTWQTEHQLAFEALKKALLSAPALGLPDTSKPFTLFLDERQGIAKGVLTQKLGPWKRPVAYLSKKLDPVAAGWPPCLRIMAATAMLVKDSAKLTLGQPLTVITPHTLEAIVRQPPDRWITNARLTHYQALLLDTDRVQFGPPVTLNPATLLPVPENQPSPHDCRQVLAETHGTREDLKDQELPDADHTWYTDGSSYLDSGTRRAGAAVVDGHNTIWAQSLPPGTSAQKAELIALTKALELSKGKKANIYTDSRYAFATAHTHGSIYERRGWLTSEGKEIKNKAEIIALLKALFLPQEVAIIHCPGHQKGQDPVAVGNRQADRVARQAAMAEVLTLATEPDNTSHITAGKRTADGSEFEKRTADGSEFESPKKKAKVE

SEQ ID NO: 1984 - protein, 2102 aa, synthetic construct
MPAAKRVKLDGGDKKYSIGLDIGTNSVGWAVITDEYKVPSKKFKVLGNTDRHSIKKNLIGALLFDSGETAEATRLKRTARRRYTRRKNRICYLQEIFSNEMAKVDDSFFHRLEESFLVEEDKKHERHPIFGNIVDEVAYHEKYPTIYHLRKKLVDSTDKADLRLIYLALAHMIKFRGHFLIEGDLNPDNSDVDKLFIQLVQTYNQLFEENPINASGVDAKAILSARLSKSRRLENLIAQLPGEKKNGLFGNLIALSLGLTPNFKSNFDLAEDAKLQLSKDTYDDDLDNLLAQIGDQYADLFLAAKNLSDAILLSDILRVNTEITKAPLSASMIKRYDEHHQDLTLLKALVRQQLPEKYKEIFFDQSKNGYAGYIDGGASQEEFYKFIKPILEKMDGTEELLVKLNREDLLRKQRTFDNGSIPHQIHLGELHAILRRQEDFYPFLKDNREKIEKILTFRIPYYVGPLARGNSRFAWMTRKSEETITPWNFEEVVDKGASAQSFIERMTNFDKNLPNEKVLPKHSLLYEYFTVYNELTKVKYVTEGMRKPAFLSGEQKKAIVDLLFKTNRKVTVKQLKEDYFKKIECFDSVEISGVEDRFNASLGTYHDLLKIIKDKDFLDNEENEDILEDIVLTLTLFEDREMIEERLKTYAHLFDDKVMKQLKRRRYTGWGRLSRKLINGIRDKQSGKTILDFLKSDGFANRNFMQLIHDDSLTFKEDIQKAQVSGQGDSLHEHIANLAGSPAIKKGILQTVKVVDELVKVMGRHKPENIVIEMARENQTTQKGQKNSRERMKRIEEGIKELGSQILKEHPVENTQLQNEKLYLYYLQNGRDMYVDQELDINRLSDYDVDHIVPQSFLKDDSIDNKVLTRSDKARGKSDNVPSEEVVKKMKNYWRQLLNAKLITQRKFDNLTKAERGGLSELDKAGFIKRQLVETRQITKHVAQILDSRMNTKYDENDKLIREVKVITLKSKLVSDFRKDFQFYKVREINNYHHAHDAYLNAVVGTALIKKYPKLESEFVYGDYKVYDVRKMIAKSEQEIGKATAKYFFYSNIMNFFKTEITLANGEIRKRPLIETNGETGEIVWDKGRDFATVRKVLSMPQVNIVKKTEVQTGGFSKESILPKRNSDKLIARKKDWDPKKYGGFDSPTVAYSVLVVAKVEKGKSKKLKSVKELLGITIMERSSFEKNPIDFLEAKGYKEVKKDLIIKLPKYSLFELENGRKRMLASAGELQKGNELALPSKYVNFLYLASHYEKLKGSPEDNEQKQLFVEQHKHYLDEIIEQISEFSKRVILADANLDKVLSAYNKHRDKPIREQAENIIHLFTLTNLGAPAAFKYFDTTIDRKRYTSTKEVLDATLIHQSITGLYETRIDLSQLGGDGGGGSEAAAKGGGGGTVSLQDEHRLFDIPVTTSLPDVWLQDFPQAWAETGGLGRAKCQAPIIIDLKPTAVPVSIKQYPMSLEAHMGIRQHIIKFLELGVLRPCRSPWNTPLLPVKKPGTQDYRPVQDLREINKRTVDIHPTVPNPYNLLSTLKPDYSWYTVLDLKDAFFCLPLAPQSQELFAFEWKDPERGISGQLTWTRLPQGFKNSPTLFNEALHRDLTDFRTQHPEVTLLQYVDDLLLAAPTKKACTQGTRHLLQELGEKGYRASAKKAQICQTKVTYLGYILSEGKRWLTPGRIETVARIPPPRNPREVREFLGKAGFCRLFIPGFAELAAPLYALTKPSTPFTWQTEHQLAFEALKKALLSAPALGLPDTSKPFTLFLDERQGIAKGVLTQKLGPWKRPVAYLSKKLDPVAAGWPPCLRIMAATAMLVKDSAKLTLGQPLTVITPHTLEAIVRQPPDRWITNARLTHYQALLLDTDRVQFGPPVTLNPATLLPVPENQPSPHDCRQVLAETHGTREDLKDQELPDADHTWYTDGSSYLDSGTRRAGAAVVDGHNTIWAQSLPPGTSAQKAELIALTKALELSKGKKANIYTDSRYAFATAHTHGSIYERRGWLTSEGKEIKNKAEIIALLKALFLPQEVAIIHCPGHQKGQDPVAVGNRQADRVARQAAMAEVLTLATEPDNTSHITAGKRTADGSEFEKRTADGSEFESPKKKAKVE

SEQ ID NO: 1985 - protein, 2100 aa, synthetic construct
MPAAKRVKLDGGDKKYSIGLDIGTNSVGWAVITDEYKVPSKKFKVLGNTDRHSIKKNLIGALLFDSGETAEATRLKRTARRRYTRRKNRICYLQEIFSNEMAKVDDSFFHRLEESFLVEEDKKHERHPIFGNIVDEVAYHEKYPTIYHLRKKLVDSTDKADLRLIYLALAHMIKFRGHFLIEGDLNPDNSDVDKLFIQLVQTYNQLFEENPINASGVDAKAILSARLSKSRRLENLIAQLPGEKKNGLFGNLIALSLGLTPNFKSNFDLAEDAKLQLSKDTYDDDLDNLLAQIGDQYADLFLAAKNLSDAILLSDILRVNTEITKAPLSASMIKRYDEHHQDLTLLKALVRQQLPEKYKEIFFDQSKNGYAGYIDGGASQEEFYKFIKPILEKMDGTEELLVKLNREDLLRKQRTFDNGSIPHQIHLGELHAILRRQEDFYPFLKDNREKIEKILTFRIPYYVGPLARGNSRFAWMTRKSEETITPWNFEEVVDKGASAQSFIERMTNFDKNLPNEKVLPKHSLLYEYFTVYNELTKVKYVTEGMRKPAFLSGEQKKAIVDLLFKTNRKVTVKQLKEDYFKKIECFDSVEISGVEDRFNASLGTYHDLLKIIKDKDFLDNEENEDILEDIVLTLTLFEDREMIEERLKTYAHLFDDKVMKQLKRRRYTGWGRLSRKLINGIRDKQSGKTILDFLKSDGFANRNFMQLIHDDSLTFKEDIQKAQVSGQGDSLHEHIANLAGSPAIKKGILQTVKVVDELVKVMGRHKPENIVIEMARENQTTQKGQKNSRERMKRIEEGIKELGSQILKEHPVENTQLQNEKLYLYYLQNGRDMYVDQELDINRLSDYDVDHIVPQSFLKDDSIDNKVLTRSDKARGKSDNVPSEEVVKKMKNYWRQLLNAKLITQRKFDNLTKAERGGLSELDKAGFIKRQLVETRQITKHVAQILDSRMNTKYDENDKLIREVKVITLKSKLVSDFRKDFQFYKVREINNYHHAHDAYLNAVVGTALIKKYPKLESEFVYGDYKVYDVRKMIAKSEQEIGKATAKYFFYSNIMNFFKTEITLANGEIRKRPLIETNGETGEIVWDKGRDFATVRKVLSMPQVNIVKKTEVQTGGFSKESILPKRNSDKLIARKKDWDPKKYGGFDSPTVAYSVLVVAKVEKGKSKKLKSVKELLGITIMERSSFEKNPIDFLEAKGYKEVKKDLIIKLPKYSLFELENGRKRMLASAGELQKGNELALPSKYVNFLYLASHYEKLKGSPEDNEQKQLFVEQHKHYLDEIIEQISEFSKRVILADANLDKVLSAYNKHRDKPIREQAENIIHLFTLTNLGAPAAFKYFDTTIDRKRYTSTKEVLDATLIHQSITGLYETRIDLSQLGGDGGGSSPAPGGSGGTVSLQDEHRLFDIPVTTSLPDVWLQDFPQAWAETGGLGRAKCQAPIIIDLKPTAVPVSIKQYPMSLEAHMGIRQHIIKFLELGVLRPCRSPWNTPLLPVKKPGTQDYRPVQDLREINKRTVDIHPTVPNPYNLLSTLKPDYSWYTVLDLKDAFFCLPLAPQSQELFAFEWKDPERGISGQLTWTRLPQGFKNSPTLFNEALHRDLTDFRTQHPEVTLLQYVDDLLLAAPTKKACTQGTRHLLQELGEKGYRASAKKAQICQTKVTYLGYILSEGKRWLTPGRIETVARIPPPRNPREVREFLGKAGFCRLFIPGFAELAAPLYALTKPSTPFTWQTEHQLAFEALKKALLSAPALGLPDTSKPFTLFLDERQGIAKGVLTQKLGPWKRPVAYLSKKLDPVAAGWPPCLRIMAATAMLVKDSAKLTLGQPLTVITPHTLEAIVRQPPDRWITNARLTHYQALLLDTDRVQFGPPVTLNPATLLPVPENQPSPHDCRQVLAETHGTREDLKDQELPDADHTWYTDGSSYLDSGTRRAGAAVVDGHNTIWAQSLPPGTSAQKAELIALTKALELSKGKKANIYTDSRYAFATAHTHGSIYERRGWLTSEGKEIKNKAEIIALLKALFLPQEVAIIHCPGHQKGQDPVAVGNRQADRVARQAAMAEVLTLATEPDNTSHITAGKRTADGSEFEKRTADGSEFESPKKKAKVE

SEQ ID NO: 1986 - protein, 2099 aa, synthetic construct
MPAAKRVKLDGGDKKYSIGLDIGTNSVGWAVITDEYKVPSKKFKVLGNTDRHSIKKNLIGALLFDSGETAEATRLKRTARRRYTRRKNRICYLQEIFSNEMAKVDDSFFHRLEESFLVEEDKKHERHPIFGNIVDEVAYHEKYPTIYHLRKKLVDSTDKADLRLIYLALAHMIKFRGHFLIEGDLNPDNSDVDKLFIQLVQTYNQLFEENPINASGVDAKAILSARLSKSRRLENLIAQLPGEKKNGLFGNLIALSLGLTPNFKSNFDLAEDAKLQLSKDTYDDDLDNLLAQIGDQYADLFLAAKNLSDAILLSDILRVNTEITKAPLSASMIKRYDEHHQDLTLLKALVRQQLPEKYKEIFFDQSKNGYAGYIDGGASQEEFYKFIKPILEKMDGTEELLVKLNREDLLRKQRTFDNGSIPHQIHLGELHAILRRQEDFYPFLKDNREKIEKILTFRIPYYVGPLARGNSRFAWMTRKSEETITPWNFEEVVDKGASAQSFIERMTNFDKNLPNEKVLPKHSLLYEYFTVYNELTKVKYVTEGMRKPAFLSGEQKKAIVDLLFKTNRKVTVKQLKEDYFKKIECFDSVEISGVEDRFNASLGTYHDLLKIIKDKDFLDNEENEDILEDIVLTLTLFEDREMIEERLKTYAHLFDDKVMKQLKRRRYTGWGRLSRKLINGIRDKQSGKTILDFLKSDGFANRNFMQLIHDDSLTFKEDIQKAQVSGQGDSLHEHIANLAGSPAIKKGILQTVKVVDELVKVMGRHKPENIVIEMARENQTTQKGQKNSRERMKRIEEGIKELGSQILKEHPVENTQLQNEKLYLYYLQNGRDMYVDQELDINRLSDYDVDHIVPQSFLKDDSIDNKVLTRSDKARGKSDNVPSEEVVKKMKNYWRQLLNAKLITQRKFDNLTKAERGGLSELDKAGFIKRQLVETRQITKHVAQILDSRMNTKYDENDKLIREVKVITLKSKLVSDFRKDFQFYKVREINNYHHAHDAYLNAVVGTALIKKYPKLESEFVYGDYKVYDVRKMIAKSEQEIGKATAKYFFYSNIMNFFKTEITLANGEIRKRPLIETNGETGEIVWDKGRDFATVRKVLSMPQVNIVKKTEVQTGGFSKESILPKRNSDKLIARKKDWDPKKYGGFDSPTVAYSVLVVAKVEKGKSKKLKSVKELLGITIMERSSFEKNPIDFLEAKGYKEVKKDLIIKLPKYSLFELENGRKRMLASAGELQKGNELALPSKYVNFLYLASHYEKLKGSPEDNEQKQLFVEQHKHYLDEIIEQISEFSKRVILADANLDKVLSAYNKHRDKPIREQAENIIHLFTLTNLGAPAAFKYFDTTIDRKRYTSTKEVLDATLIHQSITGLYETRIDLSQLGGDGGEAAAKGGGGGTVSLQDEHRLFDIPVTTSLPDVWLQDFPQAWAETGGLGRAKCQAPIIIDLKPTAVPVSIKQYPMSLEAHMGIRQHIIKFLELGVLRPCRSPWNTPLLPVKKPGTQDYRPVQDLREINKRTVDIHPTVPNPYNLLSTLKPDYSWYTVLDLKDAFFCLPLAPQSQELFAFEWKDPERGISGQLTWTRLPQGFKNSPTLFNEALHRDLTDFRTQHPEVTLLQYVDDLLLAAPTKKACTQGTRHLLQELGEKGYRASAKKAQICQTKVTYLGYILSEGKRWLTPGRIETVARIPPPRNPREVREFLGKAGFCRLFIPGFAELAAPLYALTKPSTPFTWQTEHQLAFEALKKALLSAPALGLPDTSKPFTLFLDERQGIAKGVLTQKLGPWKRPVAYLSKKLDPVAAGWPPCLRIMAATAMLVKDSAKLTLGQPLTVITPHTLEAIVRQPPDRWITNARLTHYQALLLDTDRVQFGPPVTLNPATLLPVPENQPSPHDCRQVLAETHGTREDLKDQELPDADHTWYTDGSSYLDSGTRRAGAAVVDGHNTIWAQSLPPGTSAQKAELIALTKALELSKGKKANIYTDSRYAFATAHTHGSIYERRGWLTSEGKEIKNKAEIIALLKALFLPQEVAIIHCPGHQKGQDPVAVGNRQADRVARQAAMAEVLTLATEPDNTSHITAGKRTADGSEFEKRTADGSEFESPKKKAKVE

SEQ ID NO: 1987 - protein, 2106 aa, synthetic construct
MPAAKRVKLDGGDKKYSIGLDIGTNSVGWAVITDEYKVPSKKFKVLGNTDRHSIKKNLIGALLFDSGETAEATRLKRTARRRYTRRKNRICYLQEIFSNEMAKVDDSFFHRLEESFLVEEDKKHERHPIFGNIVDEVAYHEKYPTIYHLRKKLVDSTDKADLRLIYLALAHMIKFRGHFLIEGDLNPDNSDVDKLFIQLVQTYNQLFEENPINASGVDAKAILSARLSKSRRLENLIAQLPGEKKNGLFGNLIALSLGLTPNFKSNFDLAEDAKLQLSKDTYDDDLDNLLAQIGDQYADLFLAAKNLSDAILLSDILRVNTEITKAPLSASMIKRYDEHHQDLTLLKALVRQQLPEKYKEIFFDQSKNGYAGYIDGGASQEEFYKFIKPILEKMDGTEELLVKLNREDLLRKQRTFDNGSIPHQIHLGELHAILRRQEDFYPFLKDNREKIEKILTFRIPYYVGPLARGNSRFAWMTRKSEETITPWNFEEVVDKGASAQSFIERMTNFDKNLPNEKVLPKHSLLYEYFTVYNELTKVKYVTEGMRKPAFLSGEQKKAIVDLLFKTNRKVTVKQLKEDYFKKIECFDSVEISGVEDRFNASLGTYHDLLKIIKDKDFLDNEENEDILEDIVLTLTLFEDREMIEERLKTYAHLFDDKVMKQLKRRRYTGWGRLSRKLINGIRDKQSGKTILDFLKSDGFANRNFMQLIHDDSLTFKEDIQKAQVSGQGDSLHEHIANLAGSPAIKKGILQTVKVVDELVKVMGRHKPENIVIEMARENQTTQKGQKNSRERMKRIEEGIKELGSQILKEHPVENTQLQNEKLYLYYLQNGRDMYVDQELDINRLSDYDVDHIVPQSFLKDDSIDNKVLTRSDKARGKSDNVPSEEVVKKMKNYWRQLLNAKLITQRKFDNLTKAERGGLSELDKAGFIKRQLVETRQITKHVAQILDSRMNTKYDENDKLIREVKVITLKSKLVSDFRKDFQFYKVREINNYHHAHDAYLNAVVGTALIKKYPKLESEFVYGDYKVYDVRKMIAKSEQEIGKATAKYFFYSNIMNFFKTEITLANGEIRKRPLIETNGETGEIVWDKGRDFATVRKVLSMPQVNIVKKTEVQTGGFSKESILPKRNSDKLIARKKDWDPKKYGGFDSPTVAYSVLVVAKVEKGKSKKLKSVKELLGITIMERSSFEKNPIDFLEAKGYKEVKKDLIIKLPKYSLFELENGRKRMLASAGELQKGNELALPSKYVNFLYLASHYEKLKGSPEDNEQKQLFVEQHKHYLDEIIEQISEFSKRVILADANLDKVLSAYNKHRDKPIREQAENIIHLFTLTNLGAPAAFKYFDTTIDRKRYTSTKEVLDATLIHQSITGLYETRIDLSQLGGDGGGGGGSGGGGSGGGGSGGTVSLQDEHRLFDIPVTTSLPDVWLQDFPQAWAETGGLGRAKCQAPIIIDLKPTAVPVSIKQYPMSLEAHMGIRQHIIKFLELGVLRPCRSPWNTPLLPVKKPGTQDYRPVQDLREINKRTVDIHPTVPNPYNLLSTLKPDYSWYTVLDLKDAFFCLPLAPQSQELFAFEWKDPERGISGQLTWTRLPQGFKNSPTLFNEALHRDLTDFRTQHPEVTLLQYVDDLLLAAPTKKACTQGTRHLLQELGEKGYRASAKKAQICQTKVTYLGYILSEGKRWLTPGRIETVARIPPPRNPREVREFLGKAGFCRLFIPGFAELAAPLYALTKPSTPFTWQTEHQLAFEALKKALLSAPALGLPDTSKPFTLFLDERQGIAKGVLTQKLGPWKRPVAYLSKKLDPVAAGWPPCLRIMAATAMLVKDSAKLTLGQPLTVITPHTLEAIVRQPPDRWITNARLTHYQALLLDTDRVQFGPPVTLNPATLLPVPENQPSPHDCRQVLAETHGTREDLKDQELPDADHTWYTDGSSYLDSGTRRAGAAVVDGHNTIWAQSLPPGTSAQKAELIALTKALELSKGKKANIYTDSRYAFATAHTHGSIYERRGWLTSEGKEIKNKAEIIALLKALFLPQEVAIIHCPGHQKGQDPVAVGNRQADRVARQAAMAEVLTLATEPDNTSHITAGKRTADGSEFEKRTADGSEFESPKKKAKVE

SEQ ID NO: 1988 - protein, 2100 aa, synthetic construct
MPAAKRVKLDGGDKKYSIGLDIGTNSVGWAVITDEYKVPSKKFKVLGNTDRHSIKKNLIGALLFDSGETAEATRLKRTARRRYTRRKNRICYLQEIFSNEMAKVDDSFFHRLEESFLVEEDKKHERHPIFGNIVDEVAYHEKYPTIYHLRKKLVDSTDKADLRLIYLALAHMIKFRGHFLIEGDLNPDNSDVDKLFIQLVQTYNQLFEENPINASGVDAKAILSARLSKSRRLENLIAQLPGEKKNGLFGNLIALSLGLTPNFKSNFDLAEDAKLQLSKDTYDDDLDNLLAQIGDQYADLFLAAKNLSDAILLSDILRVNTEITKAPLSASMIKRYDEHHQDLTLLKALVRQQLPEKYKEIFFDQSKNGYAGYIDGGASQEEFYKFIKPILEKMDGTEELLVKLNREDLLRKQRTFDNGSIPHQIHLGELHAILRRQEDFYPFLKDNREKIEKILTFRIPYYVGPLARGNSRFAWMTRKSEETITPWNFEEVVDKGASAQSFIERMTNFDKNLPNEKVLPKHSLLYEYFTVYNELTKVKYVTEGMRKPAFLSGEQKKAIVDLLFKTNRKVTVKQLKEDYFKKIECFDSVEISGVEDRFNASLGTYHDLLKIIKDKDFLDNEENEDILEDIVLTLTLFEDREMIEERLKTYAHLFDDKVMKQLKRRRYTGWGRLSRKLINGIRDKQSGKTILDFLKSDGFANRNFMQLIHDDSLTFKEDIQKAQVSGQGDSLHEHIANLAGSPAIKKGILQTVKVVDELVKVMGRHKPENIVIEMARENQTTQKGQKNSRERMKRIEEGIKELGSQILKEHPVENTQLQNEKLYLYYLQNGRDMYVDQELDINRLSDYDVDHIVPQSFLKDDSIDNKVLTRSDKARGKSDNVPSEEVVKKMKNYWRQLLNAKLITQRKFDNLTKAERGGLSELDKAGFIKRQLVETRQITKHVAQILDSRMNTKYDENDKLIREVKVITLKSKLVSDFRKDFQFYKVREINNYHHAHDAYLNAVVGTALIKKYPKLESEFVYGDYKVYDVRKMIAKSEQEIGKATAKYFFYSNIMNFFKTEITLANGEIRKRPLIETNGETGEIVWDKGRDFATVRKVLSMPQVNIVKKTEVQTGGFSKESILPKRNSDKLIARKKDWDPKKYGGFDSPTVAYSVLVVAKVEKGKSKKLKSVKELLGITIMERSSFEKNPIDFLEAKGYKEVKKDLIIKLPKYSLFELENGRKRMLASAGELQKGNELALPSKYVNFLYLASHYEKLKGSPEDNEQKQLFVEQHKHYLDEIIEQISEFSKRVILADANLDKVLSAYNKHRDKPIREQAENIIHLFTLTNLGAPAAFKYFDTTIDRKRYTSTKEVLDATLIHQSITGLYETRIDLSQLGGDGGGGGPAPGSSGGTVSLQDEHRLFDIPVTTSLPDVWLQDFPQAWAETGGLGRAKCQAPIIIDLKPTAVPVSIKQYPMSLEAHMGIRQHIIKFLELGVLRPCRSPWNTPLLPVKKPGTQDYRPVQDLREINKRTVDIHPTVPNPYNLLSTLKPDYSWYTVLDLKDAFFCLPLAPQSQELFAFEWKDPERGISGQLTWTRLPQGFKNSPTLFNEALHRDLTDFRTQHPEVTLLQYVDDLLLAAPTKKACTQGTRHLLQELGEKGYRASAKKAQICQTKVTYLGYILSEGKRWLTPGRIETVARIPPPRNPREVREFLGKAGFCRLFIPGFAELAAPLYALTKPSTPFTWQTEHQLAFEALKKALLSAPALGLPDTSKPFTLFLDERQGIAKGVLTQKLGPWKRPVAYLSKKLDPVAAGWPPCLRIMAATAMLVKDSAKLTLGQPLTVITPHTLEAIVRQPPDRWITNARLTHYQALLLDTDRVQFGPPVTLNPATLLPVPENQPSPHDCRQVLAETHGTREDLKDQELPDADHTWYTDGSSYLDSGTRRAGAAVVDGHNTIWAQSLPPGTSAQKAELIALTKALELSKGKKANIYTDSRYAFATAHTHGSIYERRGWLTSEGKEIKNKAEIIALLKALFLPQEVAIIHCPGHQKGQDPVAVGNRQADRVARQAAMAEVLTLATEPDNTSHITAGKRTADGSEFEKRTADGSEFESPKKKAKVE

SEQ ID NO: 1989 - protein, 2102 aa, synthetic construct
MPAAKRVKLDGGDKKYSIGLDIGTNSVGWAVITDEYKVPSKKFKVLGNTDRHSIKKNLIGALLFDSGETAEATRLKRTARRRYTRRKNRICYLQEIFSNEMAKVDDSFFHRLEESFLVEEDKKHERHPIFGNIVDEVAYHEKYPTIYHLRKKLVDSTDKADLRLIYLALAHMIKFRGHFLIEGDLNPDNSDVDKLFIQLVQTYNQLFEENPINASGVDAKAILSARLSKSRRLENLIAQLPGEKKNGLFGNLIALSLGLTPNFKSNFDLAEDAKLQLSKDTYDDDLDNLLAQIGDQYADLFLAAKNLSDAILLSDILRVNTEITKAPLSASMIKRYDEHHQDLTLLKALVRQQLPEKYKEIFFDQSKNGYAGYIDGGASQEEFYKFIKPILEKMDGTEELLVKLNREDLLRKQRTFDNGSIPHQIHLGELHAILRRQEDFYPFLKDNREKIEKILTFRIPYYVGPLARGNSRFAWMTRKSEETITPWNFEEVVDKGASAQSFIERMTNFDKNLPNEKVLPKHSLLYEYFTVYNELTKVKYVTEGMRKPAFLSGEQKKAIVDLLFKTNRKVTVKQLKEDYFKKIECFDSVEISGVEDRFNASLGTYHDLLKIIKDKDFLDNEENEDILEDIVLTLTLFEDREMIEERLKTYAHLFDDKVMKQLKRRRYTGWGRLSRKLINGIRDKQSGKTILDFLKSDGFANRNFMQLIHDDSLTFKEDIQKAQVSGQGDSLHEHIANLAGSPAIKKGILQTVKVVDELVKVMGRHKPENIVIEMARENQTTQKGQKNSRERMKRIEEGIKELGSQILKEHPVENTQLQNEKLYLYYLQNGRDMYVDQELDINRLSDYDVDHIVPQSFLKDDSIDNKVLTRSDKARGKSDNVPSEEVVKKMKNYWRQLLNAKLITQRKFDNLTKAERGGLSELDKAGFIKRQLVETRQITKHVAQILDSRMNTKYDENDKLIREVKVITLKSKLVSDFRKDFQFYKVREINNYHHAHDAYLNAVVGTALIKKYPKLESEFVYGDYKVYDVRKMIAKSEQEIGKATAKYFFYSNIMNFFKTEITLANGEIRKRPLIETNGETGEIVWDKGRDFATVRKVLSMPQVNIVKKTEVQTGGFSKESILPKRNSDKLIARKKDWDPKKYGGFDSPTVAYSVLVVAKVEKGKSKKLKSVKELLGITIMERSSFEKNPIDFLEAKGYKEVKKDLIIKLPKYSLFELENGRKRMLASAGELQKGNELALPSKYVNFLYLASHYEKLKGSPEDNEQKQLFVEQHKHYLDEIIEQISEFSKRVILADANLDKVLSAYNKHRDKPIREQAENIIHLFTLTNLGAPAAFKYFDTTIDRKRYTSTKEVLDATLIHQSITGLYETRIDLSQLGGDGGGGSEAAAKPAPGGTVSLQDEHRLFDIPVTTSLPDVWLQDFPQAWAETGGLGRAKCQAPIIIDLKPTAVPVSIKQYPMSLEAHMGIRQHIIKFLELGVLRPCRSPWNTPLLPVKKPGTQDYRPVQDLREINKRTVDIHPTVPNPYNLLSTLKPDYSWYTVLDLKDAFFCLPLAPQSQELFAFEWKDPERGISGQLTWTRLPQGFKNSPTLFNEALHRDLTDFRTQHPEVTLLQYVDDLLLAAPTKKACTQGTRHLLQELGEKGYRASAKKAQICQTKVTYLGYILSEGKRWLTPGRIETVARIPPPRNPREVREFLGKAGFCRLFIPGFAELAAPLYALTKPSTPFTWQTEHQLAFEALKKALLSAPALGLPDTSKPFTLFLDERQGIAKGVLTQKLGPWKRPVAYLSKKLDPVAAGWPPCLRIMAATAMLVKDSAKLTLGQPLTVITPHTLEAIVRQPPDRWITNARLTHYQALLLDTDRVQFGPPVTLNPATLLPVPENQPSPHDCRQVLAETHGTREDLKDQELPDADHTWYTDGSSYLDSGTRRAGAAVVDGHNTIWAQSLPPGTSAQKAELIALTKALELSKGKKANIYTDSRYAFATAHTHGSIYERRGWLTSEGKEIKNKAEIIALLKALFLPQEVAIIHCPGHQKGQDPVAVGNRQADRVARQAAMAEVLTLATEPDNTSHITAGKRTADGSEFEKRTADGSEFESPKKKAKVE

SEQ ID NO: 1990 - protein, 2100 aa, synthetic construct
MPAAKRVKLDGGDKKYSIGLDIGTNSVGWAVITDEYKVPSKKFKVLGNTDRHSIKKNLIGALLFDSGETAEATRLKRTARRRYTRRKNRICYLQEIFSNEMAKVDDSFFHRLEESFLVEEDKKHERHPIFGNIVDEVAYHEKYPTIYHLRKKLVDSTDKADLRLIYLALAHMIKFRGHFLIEGDLNPDNSDVDKLFIQLVQTYNQLFEENPINASGVDAKAILSARLSKSRRLENLIAQLPGEKKNGLFGNLIALSLGLTPNFKSNFDLAEDAKLQLSKDTYDDDLDNLLAQIGDQYADLFLAAKNLSDAILLSDILRVNTEITKAPLSASMIKRYDEHHQDLTLLKALVRQQLPEKYKEIFFDQSKNGYAGYIDGGASQEEFYKFIKPILEKMDGTEELLVKLNREDLLRKQRTFDNGSIPHQIHLGELHAILRRQEDFYPFLKDNREKIEKILTFRIPYYVGPLARGNSRFAWMTRKSEETITPWNFEEVVDKGASAQSFIERMTNFDKNLPNEKVLPKHSLLYEYFTVYNELTKVKYVTEGMRKPAFLSGEQKKAIVDLLFKTNRKVTVKQLKEDYFKKIECFDSVEISGVEDRFNASLGTYHDLLKIIKDKDFLDNEENEDILEDIVLTLTLFEDREMIEERLKTYAHLFDDKVMKQLKRRRYTGWGRLSRKLINGIRDKQSGKTILDFLKSDGFANRNFMQLIHDDSLTFKEDIQKAQVSGQGDSLHEHIANLAGSPAIKKGILQTVKVVDELVKVMGRHKPENIVIEMARENQTTQKGQKNSRERMKRIEEGIKELGSQILKEHPVENTQLQNEKLYLYYLQNGRDMYVDQELDINRLSDYDVDHIVPQSFLKDDSIDNKVLTRSDKARGKSDNVPSEEVVKKMKNYWRQLLNAKLITQRKFDNLTKAERGGLSELDKAGFIKRQLVETRQITKHVAQILDSRMNTKYDENDKLIREVKVITLKSKLVSDFRKDFQFYKVREINNYHHAHDAYLNAVVGTALIKKYPKLESEFVYGDYKVYDVRKMIAKSEQEIGKATAKYFFYSNIMNFFKTEITLANGEIRKRPLIETNGETGEIVWDKGRDFATVRKVLSMPQVNIVKKTEVQTGGFSKESILPKRNSDKLIARKKDWDPKKYGGFDSPTVAYSVLVVAKVEKGKSKKLKSVKELLGITIMERSSFEKNPIDFLEAKGYKEVKKDLIIKLPKYSLFELENGRKRMLASAGELQKGNELALPSKYVNFLYLASHYEKLKGSPEDNEQKQLFVEQHKHYLDEIIEQISEFSKRVILADANLDKVLSAYNKHRDKPIREQAENIIHLFTLTNLGAPAAFKYFDTTIDRKRYTSTKEVLDATLIHQSITGLYETRIDLSQLGGDGGPAPGGSGSSGGTVSLQDEHRLFDIPVTTSLPDVWLQDFPQAWAETGGLGRAKCQAPIIIDLKPTAVPVSIKQYPMSLEAHMGIRQHIIKFLELGVLRPCRSPWNTPLLPVKKPGTQDYRPVQDLREINKRTVDIHPTVPNPYNLLSTLKPDYSWYTVLDLKDAFFCLPLAPQSQELFAFEWKDPERGISGQLTWTRLPQGFKNSPTLFNEALHRDLTDFRTQHPEVTLLQYVDDLLLAAPTKKACTQGTRHLLQELGEKGYRASAKKAQICQTKVTYLGYILSEGKRWLTPGRIETVARIPPPRNPREVREFLGKAGFCRLFIPGFAELAAPLYALTKPSTPFTWQTEHQLAFEALKKALLSAPALGLPDTSKPFTLFLDERQGIAKGVLTQKLGPWKRPVAYLSKKLDPVAAGWPPCLRIMAATAMLVKDSAKLTLGQPLTVITPHTLEAIVRQPPDRWITNARLTHYQALLLDTDRVQFGPPVTLNPATLLPVPENQPSPHDCRQVLAETHGTREDLKDQELPDADHTWYTDGSSYLDSGTRRAGAAVVDGHNTIWAQSLPPGTSAQKAELIALTKALELSKGKKANIYTDSRYAFATAHTHGSIYERRGWLTSEGKEIKNKAEIIALLKALFLPQEVAIIHCPGHQKGQDPVAVGNRQADRVARQAAMAEVLTLATEPDNTSHITAGKRTADGSEFEKRTADGSEFESPKKKAKVE

SEQ ID NO: 1991 - protein, 2100 aa, synthetic construct
MPAAKRVKLDGGDKKYSIGLDIGTNSVGWAVITDEYKVPSKKFKVLGNTDRHSIKKNLIGALLFDSGETAEATRLKRTARRRYTRRKNRICYLQEIFSNEMAKVDDSFFHRLEESFLVEEDKKHERHPIFGNIVDEVAYHEKYPTIYHLRKKLVDSTDKADLRLIYLALAHMIKFRGHFLIEGDLNPDNSDVDKLFIQLVQTYNQLFEENPINASGVDAKAILSARLSKSRRLENLIAQLPGEKKNGLFGNLIALSLGLTPNFKSNFDLAEDAKLQLSKDTYDDDLDNLLAQIGDQYADLFLAAKNLSDAILLSDILRVNTEITKAPLSASMIKRYDEHHQDLTLLKALVRQQLPEKYKEIFFDQSKNGYAGYIDGGASQEEFYKFIKPILEKMDGTEELLVKLNREDLLRKQRTFDNGSIPHQIHLGELHAILRRQEDFYPFLKDNREKIEKILTFRIPYYVGPLARGNSRFAWMTRKSEETITPWNFEEVVDKGASAQSFIERMTNFDKNLPNEKVLPKHSLLYEYFTVYNELTKVKYVTEGMRKPAFLSGEQKKAIVDLLFKTNRKVTVKQLKEDYFKKIECFDSVEISGVEDRFNASLGTYHDLLKIIKDKDFLDNEENEDILEDIVLTLTLFEDREMIEERLKTYAHLFDDKVMKQLKRRRYTGWGRLSRKLINGIRDKQSGKTILDFLKSDGFANRNFMQLIHDDSLTFKEDIQKAQVSGQGDSLHEHIANLAGSPAIKKGILQTVKVVDELVKVMGRHKPENIVIEMARENQTTQKGQKNSRERMKRIEEGIKELGSQILKEHPVENTQLQNEKLYLYYLQNGRDMYVDQELDINRLSDYDVDHIVPQSFLKDDSIDNKVLTRSDKARGKSDNVPSEEVVKKMKNYWRQLLNAKLITQRKFDNLTKAERGGLSELDKAGFIKRQLVETRQITKHVAQILDSRMNTKYDENDKLIREVKVITLKSKLVSDFRKDFQFYKVREINNYHHAHDAYLNAVVGTALIKKYPKLESEFVYGDYKVYDVRKMIAKSEQEIGKATAKYFFYSNIMNFFKTEITLANGEIRKRPLIETNGETGEIVWDKGRDFATVRKVLSMPQVNIVKKTEVQTGGFSKESILPKRNSDKLIARKKDWDPKKYGGFDSPTVAYSVLVVAKVEKGKSKKLKSVKELLGITIMERSSFEKNPIDFLEAKGYKEVKKDLIIKLPKYSLFELENGRKRMLASAGELQKGNELALPSKYVNFLYLASHYEKLKGSPEDNEQKQLFVEQHKHYLDEIIEQISEFSKRVILADANLDKVLSAYNKHRDKPIREQAENIIHLFTLTNLGAPAAFKYFDTTIDRKRYTSTKEVLDATLIHQSITGLYETRIDLSQLGGDGGGGGGSSGGSGGTVSLQDEHRLFDIPVTTSLPDVWLQDFPQAWAETGGLGRAKCQAPIIIDLKPTAVPVSIKQYPMSLEAHMGIRQHIIKFLELGVLRPCRSPWNTPLLPVKKPGTQDYRPVQDLREINKRTVDIHPTVPNPYNLLSTLKPDYSWYTVLDLKDAFFCLPLAPQSQELFAFEWKDPERGISGQLTWTRLPQGFKNSPTLFNEALHRDLTDFRTQHPEVTLLQYVDDLLLAAPTKKACTQGTRHLLQELGEKGYRASAKKAQICQTKVTYLGYILSEGKRWLTPGRIETVARIPPPRNPREVREFLGKAGFCRLFIPGFAELAAPLYALTKPSTPFTWQTEHQLAFEALKKALLSAPALGLPDTSKPFTLFLDERQGIAKGVLTQKLGPWKRPVAYLSKKLDPVAAGWPPCLRIMAATAMLVKDSAKLTLGQPLTVITPHTLEAIVRQPPDRWITNARLTHYQALLLDTDRVQFGPPVTLNPATLLPVPENQPSPHDCRQVLAETHGTREDLKDQELPDADHTWYTDGSSYLDSGTRRAGAAVVDGHNTIWAQSLPPGTSAQKAELIALTKALELSKGKKANIYTDSRYAFATAHTHGSIYERRGWLTSEGKEIKNKAEIIALLKALFLPQEVAIIHCPGHQKGQDPVAVGNRQADRVARQAAMAEVLTLATEPDNTSHITAGKRTADGSEFEKRTADGSEFESPKKKAKVE

SEQ ID NO: 1992 - protein, 2106 aa, synthetic construct
MPAAKRVKLDGGDKKYSIGLDIGTNSVGWAVITDEYKVPSKKFKVLGNTDRHSIKKNLIGALLFDSGETAEATRLKRTARRRYTRRKNRICYLQEIFSNEMAKVDDSFFHRLEESFLVEEDKKHERHPIFGNIVDEVAYHEKYPTIYHLRKKLVDSTDKADLRLIYLALAHMIKFRGHFLIEGDLNPDNSDVDKLFIQLVQTYNQLFEENPINASGVDAKAILSARLSKSRRLENLIAQLPGEKKNGLFGNLIALSLGLTPNFKSNFDLAEDAKLQLSKDTYDDDLDNLLAQIGDQYADLFLAAKNLSDAILLSDILRVNTEITKAPLSASMIKRYDEHHQDLTLLKALVRQQLPEKYKEIFFDQSKNGYAGYIDGGASQEEFYKFIKPILEKMDGTEELLVKLNREDLLRKQRTFDNGSIPHQIHLGELHAILRRQEDFYPFLKDNREKIEKILTFRIPYYVGPLARGNSRFAWMTRKSEETITPWNFEEVVDKGASAQSFIERMTNFDKNLPNEKVLPKHSLLYEYFTVYNELTKVKYVTEGMRKPAFLSGEQKKAIVDLLFKTNRKVTVKQLKEDYFKKIECFDSVEISGVEDRFNASLGTYHDLLKIIKDKDFLDNEENEDILEDIVLTLTLFEDREMIEERLKTYAHLFDDKVMKQLKRRRYTGWGRLSRKLINGIRDKQSGKTILDFLKSDGFANRNFMQLIHDDSLTFKEDIQKAQVSGQGDSLHEHIANLAGSPAIKKGILQTVKVVDELVKVMGRHKPENIVIEMARENQTTQKGQKNSRERMKRIEEGIKELGSQILKEHPVENTQLQNEKLYLYYLQNGRDMYVDQELDINRLSDYDVDHIVPQSFLKDDSIDNKVLTRSDKARGKSDNVPSEEVVKKMKNYWRQLLNAKLITQRKFDNLTKAERGGLSELDKAGFIKRQLVETRQITKHVAQILDSRMNTKYDENDKLIREVKVITLKSKLVSDFRKDFQFYKVREINNYHHAHDAYLNAVVGTALIKKYPKLESEFVYGDYKVYDVRKMIAKSEQEIGKATAKYFFYSNIMNFFKTEITLANGEIRKRPLIETNGETGEIVWDKGRDFATVRKVLSMPQVNIVKKTEVQTGGFSKESILPKRNSDKLIARKKDWDPKKYGGFDSPTVAYSVLVVAKVEKGKSKKLKSVKELLGITIMERSSFEKNPIDFLEAKGYKEVKKDLIIKLPKYSLFELENGRKRMLASAGELQKGNELALPSKYVNFLYLASHYEKLKGSPEDNEQKQLFVEQHKHYLDEIIEQISEFSKRVILADANLDKVLSAYNKHRDKPIREQAENIIHLFTLTNLGAPAAFKYFDTTIDRKRYTSTKEVLDATLIHQSITGLYETRIDLSQLGGDGGGGSGGSGGSGGSGGSGGTVSLQDEHRLFDIPVTTSLPDVWLQDFPQAWAETGGLGRAKCQAPIIIDLKPTAVPVSIKQYPMSLEAHMGIRQHIIKFLELGVLRPCRSPWNTPLLPVKKPGTQDYRPVQDLREINKRTVDIHPTVPNPYNLLSTLKPDYSWYTVLDLKDAFFCLPLAPQSQELFAFEWKDPERGISGQLTWTRLPQGFKNSPTLFNEALHRDLTDFRTQHPEVTLLQYVDDLLLAAPTKKACTQGTRHLLQELGEKGYRASAKKAQICQTKVTYLGYILSEGKRWLTPGRIETVARIPPPRNPREVREFLGKAGFCRLFIPGFAELAAPLYALTKPSTPFTWQTEHQLAFEALKKALLSAPALGLPDTSKPFTLFLDERQGIAKGVLTQKLGPWKRPVAYLSKKLDPVAAGWPPCLRIMAATAMLVKDSAKLTLGQPLTVITPHTLEAIVRQPPDRWITNARLTHYQALLLDTDRVQFGPPVTLNPATLLPVPENQPSPHDCRQVLAETHGTREDLKDQELPDADHTWYTDGSSYLDSGTRRAGAAVVDGHNTIWAQSLPPGTSAQKAELIALTKALELSKGKKANIYTDSRYAFATAHTHGSIYERRGWLTSEGKEIKNKAEIIALLKALFLPQEVAIIHCPGHQKGQDPVAVGNRQADRVARQAAMAEVLTLATEPDNTSHITAGKRTADGSEFEKRTADGSEFESPKKKAKVE

SEQ ID NO: 1993 - protein, 2100 aa, synthetic construct
MPAAKRVKLDGGDKKYSIGLDIGTNSVGWAVITDEYKVPSKKFKVLGNTDRHSIKKNLIGALLFDSGETAEATRLKRTARRRYTRRKNRICYLQEIFSNEMAKVDDSFFHRLEESFLVEEDKKHERHPIFGNIVDEVAYHEKYPTIYHLRKKLVDSTDKADLRLIYLALAHMIKFRGHFLIEGDLNPDNSDVDKLFIQLVQTYNQLFEENPINASGVDAKAILSARLSKSRRLENLIAQLPGEKKNGLFGNLIALSLGLTPNFKSNFDLAEDAKLQLSKDTYDDDLDNLLAQIGDQYADLFLAAKNLSDAILLSDILRVNTEITKAPLSASMIKRYDEHHQDLTLLKALVRQQLPEKYKEIFFDQSKNGYAGYIDGGASQEEFYKFIKPILEKMDGTEELLVKLNREDLLRKQRTFDNGSIPHQIHLGELHAILRRQEDFYPFLKDNREKIEKILTFRIPYYVGPLARGNSRFAWMTRKSEETITPWNFEEVVDKGASAQSFIERMTNFDKNLPNEKVLPKHSLLYEYFTVYNELTKVKYVTEGMRKPAFLSGEQKKAIVDLLFKTNRKVTVKQLKEDYFKKIECFDSVEISGVEDRFNASLGTYHDLLKIIKDKDFLDNEENEDILEDIVLTLTLFEDREMIEERLKTYAHLFDDKVMKQLKRRRYTGWGRLSRKLINGIRDKQSGKTILDFLKSDGFANRNFMQLIHDDSLTFKEDIQKAQVSGQGDSLHEHIANLAGSPAIKKGILQTVKVVDELVKVMGRHKPENIVIEMARENQTTQKGQKNSRERMKRIEEGIKELGSQILKEHPVENTQLQNEKLYLYYLQNGRDMYVDQELDINRLSDYDVDHIVPQSFLKDDSIDNKVLTRSDKARGKSDNVPSEEVVKKMKNYWRQLLNAKLITQRKFDNLTKAERGGLSELDKAGFIKRQLVETRQITKHVAQILDSRMNTKYDENDKLIREVKVITLKSKLVSDFRKDFQFYKVREINNYHHAHDAYLNAVVGTALIKKYPKLESEFVYGDYKVYDVRKMIAKSEQEIGKATAKYFFYSNIMNFFKTEITLANGEIRKRPLIETNGETGEIVWDKGRDFATVRKVLSMPQVNIVKKTEVQTGGFSKESILPKRNSDKLIARKKDWDPKKYGGFDSPTVAYSVLVVAKVEKGKSKKLKSVKELLGITIMERSSFEKNPIDFLEAKGYKEVKKDLIIKLPKYSLFELENGRKRMLASAGELQKGNELALPSKYVNFLYLASHYEKLKGSPEDNEQKQLFVEQHKHYLDEIIEQISEFSKRVILADANLDKVLSAYNKHRDKPIREQAENIIHLFTLTNLGAPAAFKYFDTTIDRKRYTSTKEVLDATLIHQSITGLYETRIDLSQLGGDGGGSSGGSGGGGGTVSLQDEHRLFDIPVTTSLPDVWLQDFPQAWAETGGLGRAKCQAPIIIDLKPTAVPVSIKQYPMSLEAHMGIRQHIIKFLELGVLRPCRSPWNTPLLPVKKPGTQDYRPVQDLREINKRTVDIHPTVPNPYNLLSTLKPDYSWYTVLDLKDAFFCLPLAPQSQELFAFEWKDPERGISGQLTWTRLPQGFKNSPTLFNEALHRDLTDFRTQHPEVTLLQYVDDLLLAAPTKKACTQGTRHLLQELGEKGYRASAKKAQICQTKVTYLGYILSEGKRWLTPGRIETVARIPPPRNPREVREFLGKAGFCRLFIPGFAELAAPLYALTKPSTPFTWQTEHQLAFEALKKALLSAPALGLPDTSKPFTLFLDERQGIAKGVLTQKLGPWKRPVAYLSKKLDPVAAGWPPCLRIMAATAMLVKDSAKLTLGQPLTVITPHTLEAIVRQPPDRWITNARLTHYQALLLDTDRVQFGPPVTLNPATLLPVPENQPSPHDCRQVLAETHGTREDLKDQELPDADHTWYTDGSSYLDSGTRRAGAAVVDGHNTIWAQSLPPGTSAQKAELIALTKALELSKGKKANIYTDSRYAFATAHTHGSIYERRGWLTSEGKEIKNKAEIIALLKALFLPQEVAIIHCPGHQKGQDPVAVGNRQADRVARQAAMAEVLTLATEPDNTSHITAGKRTADGSEFEKRTADGSEFESPKKKAKVE

SEQ ID NO: 1994 - protein, 2103 aa, synthetic construct
MPAAKRVKLDGGDKKYSIGLDIGTNSVGWAVITDEYKVPSKKFKVLGNTDRHSIKKNLIGALLFDSGETAEATRLKRTARRRYTRRKNRICYLQEIFSNEMAKVDDSFFHRLEESFLVEEDKKHERHPIFGNIVDEVAYHEKYPTIYHLRKKLVDSTDKADLRLIYLALAHMIKFRGHFLIEGDLNPDNSDVDKLFIQLVQTYNQLFEENPINASGVDAKAILSARLSKSRRLENLIAQLPGEKKNGLFGNLIALSLGLTPNFKSNFDLAEDAKLQLSKDTYDDDLDNLLAQIGDQYADLFLAAKNLSDAILLSDILRVNTEITKAPLSASMIKRYDEHHQDLTLLKALVRQQLPEKYKEIFFDQSKNGYAGYIDGGASQEEFYKFIKPILEKMDGTEELLVKLNREDLLRKQRTFDNGSIPHQIHLGELHAILRRQEDFYPFLKDNREKIEKILTFRIPYYVGPLARGNSRFAWMTRKSEETITPWNFEEVVDKGASAQSFIERMTNFDKNLPNEKVLPKHSLLYEYFTVYNELTKVKYVTEGMRKPAFLSGEQKKAIVDLLFKTNRKVTVKQLKEDYFKKIECFDSVEISGVEDRFNASLGTYHDLLKIIKDKDFLDNEENEDILEDIVLTLTLFEDREMIEERLKTYAHLFDDKVMKQLKRRRYTGWGRLSRKLINGIRDKQSGKTILDFLKSDGFANRNFMQLIHDDSLTFKEDIQKAQVSGQGDSLHEHIANLAGSPAIKKGILQTVKVVDELVKVMGRHKPENIVIEMARENQTTQKGQKNSRERMKRIEEGIKELGSQILKEHPVENTQLQNEKLYLYYLQNGRDMYVDQELDINRLSDYDVDHIVPQSFLKDDSIDNKVLTRSDKARGKSDNVPSEEVVKKMKNYWRQLLNAKLITQRKFDNLTKAERGGLSELDKAGFIKRQLVETRQITKHVAQILDSRMNTKYDENDKLIREVKVITLKSKLVSDFRKDFQFYKVREINNYHHAHDAYLNAVVGTALIKKYPKLESEFVYGDYKVYDVRKMIAKSEQEIGKATAKYFFYSNIMNFFKTEITLANGEIRKRPLIETNGETGEIVWDKGRDFATVRKVLSMPQVNIVKKTEVQTGGFSKESILPKRNSDKLIARKKDWDPKKYGGFDSPTVAYSVLVVAKVEKGKSKKLKSVKELLGITIMERSSFEKNPIDFLEAKGYKEVKKDLIIKLPKYSLFELENGRKRMLASAGELQKGNELALPSKYVNFLYLASHYEKLKGSPEDNEQKQLFVEQHKHYLDEIIEQISEFSKRVILADANLDKVLSAYNKHRDKPIREQAENIIHLFTLTNLGAPAAFKYFDTTIDRKRYTSTKEVLDATLIHQSITGLYETRIDLSQLGGDGGGSSGSSGSSGSSGGTVSLQDEHRLFDIPVTTSLPDVWLQDFPQAWAETGGLGRAKCQAPIIIDLKPTAVPVSIKQYPMSLEAHMGIRQHIIKFLELGVLRPCRSPWNTPLLPVKKPGTQDYRPVQDLREINKRTVDIHPTVPNPYNLLSTLKPDYSWYTVLDLKDAFFCLPLAPQSQELFAFEWKDPERGISGQLTWTRLPQGFKNSPTLFNEALHRDLTDFRTQHPEVTLLQYVDDLLLAAPTKKACTQGTRHLLQELGEKGYRASAKKAQICQTKVTYLGYILSEGKRWLTPGRIETVARIPPPRNPREVREFLGKAGFCRLFIPGFAELAAPLYALTKPSTPFTWQTEHQLAFEALKKALLSAPALGLPDTSKPFTLFLDERQGIAKGVLTQKLGPWKRPVAYLSKKLDPVAAGWPPCLRIMAATAMLVKDSAKLTLGQPLTVITPHTLEAIVRQPPDRWITNARLTHYQALLLDTDRVQFGPPVTLNPATLLPVPENQPSPHDCRQVLAETHGTREDLKDQELPDADHTWYTDGSSYLDSGTRRAGAAVVDGHNTIWAQSLPPGTSAQKAELIALTKALELSKGKKANIYTDSRYAFATAHTHGSIYERRGWLTSEGKEIKNKAEIIALLKALFLPQEVAIIHCPGHQKGQDPVAVGNRQADRVARQAAMAEVLTLATEPDNTSHITAGKRTADGSEFEKRTADGSEFESPKKKAKVE

SEQ ID NO: 1995 - protein, 2099 aa, synthetic construct
MPAAKRVKLDGGDKKYSIGLDIGTNSVGWAVITDEYKVPSKKFKVLGNTDRHSIKKNLIGALLFDSGETAEATRLKRTARRRYTRRKNRICYLQEIFSNEMAKVDDSFFHRLEESFLVEEDKKHERHPIFGNIVDEVAYHEKYPTIYHLRKKLVDSTDKADLRLIYLALAHMIKFRGHFLIEGDLNPDNSDVDKLFIQLVQTYNQLFEENPINASGVDAKAILSARLSKSRRLENLIAQLPGEKKNGLFGNLIALSLGLTPNFKSNFDLAEDAKLQLSKDTYDDDLDNLLAQIGDQYADLFLAAKNLSDAILLSDILRVNTEITKAPLSASMIKRYDEHHQDLTLLKALVRQQLPEKYKEIFFDQSKNGYAGYIDGGASQEEFYKFIKPILEKMDGTEELLVKLNREDLLRKQRTFDNGSIPHQIHLGELHAILRRQEDFYPFLKDNREKIEKILTFRIPYYVGPLARGNSRFAWMTRKSEETITPWNFEEVVDKGASAQSFIERMTNFDKNLPNEKVLPKHSLLYEYFTVYNELTKVKYVTEGMRKPAFLSGEQKKAIVDLLFKTNRKVTVKQLKEDYFKKIECFDSVEISGVEDRFNASLGTYHDLLKIIKDKDFLDNEENEDILEDIVLTLTLFEDREMIEERLKTYAHLFDDKVMKQLKRRRYTGWGRLSRKLINGIRDKQSGKTILDFLKSDGFANRNFMQLIHDDSLTFKEDIQKAQVSGQGDSLHEHIANLAGSPAIKKGILQTVKVVDELVKVMGRHKPENIVIEMARENQTTQKGQKNSRERMKRIEEGIKELGSQILKEHPVENTQLQNEKLYLYYLQNGRDMYVDQELDINRLSDYDVDHIVPQSFLKDDSIDNKVLTRSDKARGKSDNVPSEEVVKKMKNYWRQLLNAKLITQRKFDNLTKAERGGLSELDKAGFIKRQLVETRQITKHVAQILDSRMNTKYDENDKLIREVKVITLKSKLVSDFRKDFQFYKVREINNYHHAHDAYLNAVVGTALIKKYPKLESEFVYGDYKVYDVRKMIAKSEQEIGKATAKYFFYSNIMNFFKTEITLANGEIRKRPLIETNGETGEIVWDKGRDFATVRKVLSMPQVNIVKKTEVQTGGFSKESILPKRNSDKLIARKKDWDPKKYGGFDSPTVAYSVLVVAKVEKGKSKKLKSVKELLGITIMERSSFEKNPIDFLEAKGYKEVKKDLIIKLPKYSLFELENGRKRMLASAGELQKGNELALPSKYVNFLYLASHYEKLKGSPEDNEQKQLFVEQHKHYLDEIIEQISEFSKRVILADANLDKVLSAYNKHRDKPIREQAENIIHLFTLTNLGAPAAFKYFDTTIDRKRYTSTKEVLDATLIHQSITGLYETRIDLSQLGGDGGPAPEAAAKGGTVSLQDEHRLFDIPVTTSLPDVWLQDFPQAWAETGGLGRAKCQAPIIIDLKPTAVPVSIKQYPMSLEAHMGIRQHIIKFLELGVLRPCRSPWNTPLLPVKKPGTQDYRPVQDLREINKRTVDIHPTVPNPYNLLSTLKPDYSWYTVLDLKDAFFCLPLAPQSQELFAFEWKDPERGISGQLTWTRLPQGFKNSPTLFNEALHRDLTDFRTQHPEVTLLQYVDDLLLAAPTKKACTQGTRHLLQELGEKGYRASAKKAQICQTKVTYLGYILSEGKRWLTPGRIETVARIPPPRNPREVREFLGKAGFCRLFIPGFAELAAPLYALTKPSTPFTWQTEHQLAFEALKKALLSAPALGLPDTSKPFTLFLDERQGIAKGVLTQKLGPWKRPVAYLSKKLDPVAAGWPPCLRIMAATAMLVKDSAKLTLGQPLTVITPHTLEAIVRQPPDRWITNARLTHYQALLLDTDRVQFGPPVTLNPATLLPVPENQPSPHDCRQVLAETHGTREDLKDQELPDADHTWYTDGSSYLDSGTRRAGAAVVDGHNTIWAQSLPPGTSAQKAELIALTKALELSKGKKANIYTDSRYAFATAHTHGSIYERRGWLTSEGKEIKNKAEIIALLKALFLPQEVAIIHCPGHQKGQDPVAVGNRQADRVARQAAMAEVLTLATEPDNTSHITAGKRTADGSEFEKRTADGSEFESPKKKAKVE

SEQ ID NO: 1996 - protein, 2097 aa, synthetic construct
MPAAKRVKLDGGDKKYSIGLDIGTNSVGWAVITDEYKVPSKKFKVLGNTDRHSIKKNLIGALLFDSGETAEATRLKRTARRRYTRRKNRICYLQEIFSNEMAKVDDSFFHRLEESFLVEEDKKHERHPIFGNIVDEVAYHEKYPTIYHLRKKLVDSTDKADLRLIYLALAHMIKFRGHFLIEGDLNPDNSDVDKLFIQLVQTYNQLFEENPINASGVDAKAILSARLSKSRRLENLIAQLPGEKKNGLFGNLIALSLGLTPNFKSNFDLAEDAKLQLSKDTYDDDLDNLLAQIGDQYADLFLAAKNLSDAILLSDILRVNTEITKAPLSASMIKRYDEHHQDLTLLKALVRQQLPEKYKEIFFDQSKNGYAGYIDGGASQEEFYKFIKPILEKMDGTEELLVKLNREDLLRKQRTFDNGSIPHQIHLGELHAILRRQEDFYPFLKDNREKIEKILTFRIPYYVGPLARGNSRFAWMTRKSEETITPWNFEEVVDKGASAQSFIERMTNFDKNLPNEKVLPKHSLLYEYFTVYNELTKVKYVTEGMRKPAFLSGEQKKAIVDLLFKTNRKVTVKQLKEDYFKKIECFDSVEISGVEDRFNASLGTYHDLLKIIKDKDFLDNEENEDILEDIVLTLTLFEDREMIEERLKTYAHLFDDKVMKQLKRRRYTGWGRLSRKLINGIRDKQSGKTILDFLKSDGFANRNFMQLIHDDSLTFKEDIQKAQVSGQGDSLHEHIANLAGSPAIKKGILQTVKVVDELVKVMGRHKPENIVIEMARENQTTQKGQKNSRERMKRIEEGIKELGSQILKEHPVENTQLQNEKLYLYYLQNGRDMYVDQELDINRLSDYDVDHIVPQSFLKDDSIDNKVLTRSDKARGKSDNVPSEEVVKKMKNYWRQLLNAKLITQRKFDNLTKAERGGLSELDKAGFIKRQLVETRQITKHVAQILDSRMNTKYDENDKLIREVKVITLKSKLVSDFRKDFQFYKVREINNYHHAHDAYLNAVVGTALIKKYPKLESEFVYGDYKVYDVRKMIAKSEQEIGKATAKYFFYSNIMNFFKTEITLANGEIRKRPLIETNGETGEIVWDKGRDFATVRKVLSMPQVNIVKKTEVQTGGFSKESILPKRNSDKLIARKKDWDPKKYGGFDSPTVAYSVLVVAKVEKGKSKKLKSVKELLGITIMERSSFEKNPIDFLEAKGYKEVKKDLIIKLPKYSLFELENGRKRMLASAGELQKGNELALPSKYVNFLYLASHYEKLKGSPEDNEQKQLFVEQHKHYLDEIIEQISEFSKRVILADANLDKVLSAYNKHRDKPIREQAENIIHLFTLTNLGAPAAFKYFDTTIDRKRYTSTKEVLDATLIHQSITGLYETRIDLSQLGGDGGGGGPAPGGTVSLQDEHRLFDIPVTTSLPDVWLQDFPQAWAETGGLGRAKCQAPIIIDLKPTAVPVSIKQYPMSLEAHMGIRQHIIKFLELGVLRPCRSPWNTPLLPVKKPGTQDYRPVQDLREINKRTVDIHPTVPNPYNLLSTLKPDYSWYTVLDLKDAFFCLPLAPQSQELFAFEWKDPERGISGQLTWTRLPQGFKNSPTLFNEALHRDLTDFRTQHPEVTLLQYVDDLLLAAPTKKACTQGTRHLLQELGEKGYRASAKKAQICQTKVTYLGYILSEGKRWLTPGRIETVARIPPPRNPREVREFLGKAGFCRLFIPGFAELAAPLYALTKPSTPFTWQTEHQLAFEALKKALLSAPALGLPDTSKPFTLFLDERQGIAKGVLTQKLGPWKRPVAYLSKKLDPVAAGWPPCLRIMAATAMLVKDSAKLTLGQPLTVITPHTLEAIVRQPPDRWITNARLTHYQALLLDTDRVQFGPPVTLNPATLLPVPENQPSPHDCRQVLAETHGTREDLKDQELPDADHTWYTDGSSYLDSGTRRAGAAVVDGHNTIWAQSLPPGTSAQKAELIALTKALELSKGKKANIYTDSRYAFATAHTHGSIYERRGWLTSEGKEIKNKAEIIALLKALFLPQEVAIIHCPGHQKGQDPVAVGNRQADRVARQAAMAEVLTLATEPDNTSHITAGKRTADGSEFEKRTADGSEFESPKKKAKVE

SEQ ID NO: 1997 - protein, 2099 aa, synthetic construct
MPAAKRVKLDGGDKKYSIGLDIGTNSVGWAVITDEYKVPSKKFKVLGNTDRHSIKKNLIGALLFDSGETAEATRLKRTARRRYTRRKNRICYLQEIFSNEMAKVDDSFFHRLEESFLVEEDKKHERHPIFGNIVDEVAYHEKYPTIYHLRKKLVDSTDKADLRLIYLALAHMIKFRGHFLIEGDLNPDNSDVDKLFIQLVQTYNQLFEENPINASGVDAKAILSARLSKSRRLENLIAQLPGEKKNGLFGNLIALSLGLTPNFKSNFDLAEDAKLQLSKDTYDDDLDNLLAQIGDQYADLFLAAKNLSDAILLSDILRVNTEITKAPLSASMIKRYDEHHQDLTLLKALVRQQLPEKYKEIFFDQSKNGYAGYIDGGASQEEFYKFIKPILEKMDGTEELLVKLNREDLLRKQRTFDNGSIPHQIHLGELHAILRRQEDFYPFLKDNREKIEKILTFRIPYYVGPLARGNSRFAWMTRKSEETITPWNFEEVVDKGASAQSFIERMTNFDKNLPNEKVLPKHSLLYEYFTVYNELTKVKYVTEGMRKPAFLSGEQKKAIVDLLFKTNRKVTVKQLKEDYFKKIECFDSVEISGVEDRFNASLGTYHDLLKIIKDKDFLDNEENEDILEDIVLTLTLFEDREMIEERLKTYAHLFDDKVMKQLKRRRYTGWGRLSRKLINGIRDKQSGKTILDFLKSDGFANRNFMQLIHDDSLTFKEDIQKAQVSGQGDSLHEHIANLAGSPAIKKGILQTVKVVDELVKVMGRHKPENIVIEMARENQTTQKGQKNSRERMKRIEEGIKELGSQILKEHPVENTQLQNEKLYLYYLQNGRDMYVDQELDINRLSDYDVDHIVPQSFLKDDSIDNKVLTRSDKARGKSDNVPSEEVVKKMKNYWRQLLNAKLITQRKFDNLTKAERGGLSELDKAGFIKRQLVETRQITKHVAQILDSRMNTKYDENDKLIREVKVITLKSKLVSDFRKDFQFYKVREINNYHHAHDAYLNAVVGTALIKKYPKLESEFVYGDYKVYDVRKMIAKSEQEIGKATAKYFFYSNIMNFFKTEITLANGEIRKRPLIETNGETGEIVWDKGRDFATVRKVLSMPQVNIVKKTEVQTGGFSKESILPKRNSDKLIARKKDWDPKKYGGFDSPTVAYSVLVVAKVEKGKSKKLKSVKELLGITIMERSSFEKNPIDFLEAKGYKEVKKDLIIKLPKYSLFELENGRKRMLASAGELQKGNELALPSKYVNFLYLASHYEKLKGSPEDNEQKQLFVEQHKHYLDEIIEQISEFSKRVILADANLDKVLSAYNKHRDKPIREQAENIIHLFTLTNLGAPAAFKYFDTTIDRKRYTSTKEVLDATLIHQSITGLYETRIDLSQLGGDGGGGSEAAAKGGTVSLQDEHRLFDIPVTTSLPDVWLQDFPQAWAETGGLGRAKCQAPIIIDLKPTAVPVSIKQYPMSLEAHMGIRQHIIKFLELGVLRPCRSPWNTPLLPVKKPGTQDYRPVQDLREINKRTVDIHPTVPNPYNLLSTLKPDYSWYTVLDLKDAFFCLPLAPQSQELFAFEWKDPERGISGQLTWTRLPQGFKNSPTLFNEALHRDLTDFRTQHPEVTLLQYVDDLLLAAPTKKACTQGTRHLLQELGEKGYRASAKKAQICQTKVTYLGYILSEGKRWLTPGRIETVARIPPPRNPREVREFLGKAGFCRLFIPGFAELAAPLYALTKPSTPFTWQTEHQLAFEALKKALLSAPALGLPDTSKPFTLFLDERQGIAKGVLTQKLGPWKRPVAYLSKKLDPVAAGWPPCLRIMAATAMLVKDSAKLTLGQPLTVITPHTLEAIVRQPPDRWITNARLTHYQALLLDTDRVQFGPPVTLNPATLLPVPENQPSPHDCRQVLAETHGTREDLKDQELPDADHTWYTDGSSYLDSGTRRAGAAVVDGHNTIWAQSLPPGTSAQKAELIALTKALELSKGKKANIYTDSRYAFATAHTHGSIYERRGWLTSEGKEIKNKAEIIALLKALFLPQEVAIIHCPGHQKGQDPVAVGNRQADRVARQAAMAEVLTLATEPDNTSHITAGKRTADGSEFEKRTADGSEFESPKKKAKVE

SEQ ID NO: 1998 - protein, 2096 aa, synthetic construct
MPAAKRVKLDGGDKKYSIGLDIGTNSVGWAVITDEYKVPSKKFKVLGNTDRHSIKKNLIGALLFDSGETAEATRLKRTARRRYTRRKNRICYLQEIFSNEMAKVDDSFFHRLEESFLVEEDKKHERHPIFGNIVDEVAYHEKYPTIYHLRKKLVDSTDKADLRLIYLALAHMIKFRGHFLIEGDLNPDNSDVDKLFIQLVQTYNQLFEENPINASGVDAKAILSARLSKSRRLENLIAQLPGEKKNGLFGNLIALSLGLTPNFKSNFDLAEDAKLQLSKDTYDDDLDNLLAQIGDQYADLFLAAKNLSDAILLSDILRVNTEITKAPLSASMIKRYDEHHQDLTLLKALVRQQLPEKYKEIFFDQSKNGYAGYIDGGASQEEFYKFIKPILEKMDGTEELLVKLNREDLLRKQRTFDNGSIPHQIHLGELHAILRRQEDFYPFLKDNREKIEKILTFRIPYYVGPLARGNSRFAWMTRKSEETITPWNFEEVVDKGASAQSFIERMTNFDKNLPNEKVLPKHSLLYEYFTVYNELTKVKYVTEGMRKPAFLSGEQKKAIVDLLFKTNRKVTVKQLKEDYFKKIECFDSVEISGVEDRFNASLGTYHDLLKIIKDKDFLDNEENEDILEDIVLTLTLFEDREMIEERLKTYAHLFDDKVMKQLKRRRYTGWGRLSRKLINGIRDKQSGKTILDFLKSDGFANRNFMQLIHDDSLTFKEDIQKAQVSGQGDSLHEHIANLAGSPAIKKGILQTVKVVDELVKVMGRHKPENIVIEMARENQTTQKGQKNSRERMKRIEEGIKELGSQILKEHPVENTQLQNEKLYLYYLQNGRDMYVDQELDINRLSDYDVDHIVPQSFLKDDSIDNKVLTRSDKARGKSDNVPSEEVVKKMKNYWRQLLNAKLITQRKFDNLTKAERGGLSELDKAGFIKRQLVETRQITKHVAQILDSRMNTKYDENDKLIREVKVITLKSKLVSDFRKDFQFYKVREINNYHHAHDAYLNAVVGTALIKKYPKLESEFVYGDYKVYDVRKMIAKSEQEIGKATAKYFFYSNIMNFFKTEITLANGEIRKRPLIETNGETGEIVWDKGRDFATVRKVLSMPQVNIVKKTEVQTGGFSKESILPKRNSDKLIARKKDWDPKKYGGFDSPTVAYSVLVVAKVEKGKSKKLKSVKELLGITIMERSSFEKNPIDFLEAKGYKEVKKDLIIKLPKYSLFELENGRKRMLASAGELQKGNELALPSKYVNFLYLASHYEKLKGSPEDNEQKQLFVEQHKHYLDEIIEQISEFSKRVILADANLDKVLSAYNKHRDKPIREQAENIIHLFTLTNLGAPAAFKYFDTTIDRKRYTSTKEVLDATLIHQSITGLYETRIDLSQLGGDGGGGGGGGGTVSLQDEHRLFDIPVTTSLPDVWLQDFPQAWAETGGLGRAKCQAPIIIDLKPTAVPVSIKQYPMSLEAHMGIRQHIIKFLELGVLRPCRSPWNTPLLPVKKPGTQDYRPVQDLREINKRTVDIHPTVPNPYNLLSTLKPDYSWYTVLDLKDAFFCLPLAPQSQELFAFEWKDPERGISGQLTWTRLPQGFKNSPTLFNEALHRDLTDFRTQHPEVTLLQYVDDLLLAAPTKKACTQGTRHLLQELGEKGYRASAKKAQICQTKVTYLGYILSEGKRWLTPGRIETVARIPPPRNPREVREFLGKAGFCRLFIPGFAELAAPLYALTKPSTPFTWQTEHQLAFEALKKALLSAPALGLPDTSKPFTLFLDERQGIAKGVLTQKLGPWKRPVAYLSKKLDPVAAGWPPCLRIMAATAMLVKDSAKLTLGQPLTVITPHTLEAIVRQPPDRWITNARLTHYQALLLDTDRVQFGPPVTLNPATLLPVPENQPSPHDCRQVLAETHGTREDLKDQELPDADHTWYTDGSSYLDSGTRRAGAAVVDGHNTIWAQSLPPGTSAQKAELIALTKALELSKGKKANIYTDSRYAFATAHTHGSIYERRGWLTSEGKEIKNKAEIIALLKALFLPQEVAIIHCPGHQKGQDPVAVGNRQADRVARQAAMAEVLTLATEPDNTSHITAGKRTADGSEFEKRTADGSEFESPKKKAKVE

SEQ ID NO: 1999 - protein, 2094 aa, synthetic construct
MPAAKRVKLDGGDKKYSIGLDIGTNSVGWAVITDEYKVPSKKFKVLGNTDRHSIKKNLIGALLFDSGETAEATRLKRTARRRYTRRKNRICYLQEIFSNEMAKVDDSFFHRLEESFLVEEDKKHERHPIFGNIVDEVAYHEKYPTIYHLRKKLVDSTDKADLRLIYLALAHMIKFRGHFLIEGDLNPDNSDVDKLFIQLVQTYNQLFEENPINASGVDAKAILSARLSKSRRLENLIAQLPGEKKNGLFGNLIALSLGLTPNFKSNFDLAEDAKLQLSKDTYDDDLDNLLAQIGDQYADLFLAAKNLSDAILLSDILRVNTEITKAPLSASMIKRYDEHHQDLTLLKALVRQQLPEKYKEIFFDQSKNGYAGYIDGGASQEEFYKFIKPILEKMDGTEELLVKLNREDLLRKQRTFDNGSIPHQIHLGELHAILRRQEDFYPFLKDNREKIEKILTFRIPYYVGPLARGNSRFAWMTRKSEETITPWNFEEVVDKGASAQSFIERMTNFDKNLPNEKVLPKHSLLYEYFTVYNELTKVKYVTEGMRKPAFLSGEQKKAIVDLLFKTNRKVTVKQLKEDYFKKIECFDSVEISGVEDRFNASLGTYHDLLKIIKDKDFLDNEENEDILEDIVLTLTLFEDREMIEERLKTYAHLFDDKVMKQLKRRRYTGWGRLSRKLINGIRDKQSGKTILDFLKSDGFANRNFMQLIHDDSLTFKEDIQKAQVSGQGDSLHEHIANLAGSPAIKKGILQTVKVVDELVKVMGRHKPENIVIEMARENQTTQKGQKNSRERMKRIEEGIKELGSQILKEHPVENTQLQNEKLYLYYLQNGRDMYVDQELDINRLSDYDVDHIVPQSFLKDDSIDNKVLTRSDKARGKSDNVPSEEVVKKMKNYWRQLLNAKLITQRKFDNLTKAERGGLSELDKAGFIKRQLVETRQITKHVAQILDSRMNTKYDENDKLIREVKVITLKSKLVSDFRKDFQFYKVREINNYHHAHDAYLNAVVGTALIKKYPKLESEFVYGDYKVYDVRKMIAKSEQEIGKATAKYFFYSNIMNFFKTEITLANGEIRKRPLIETNGETGEIVWDKGRDFATVRKVLSMPQVNIVKKTEVQTGGFSKESILPKRNSDKLIARKKDWDPKKYGGFDSPTVAYSVLVVAKVEKGKSKKLKSVKELLGITIMERSSFEKNPIDFLEAKGYKEVKKDLIIKLPKYSLFELENGRKRMLASAGELQKGNELALPSKYVNFLYLASHYEKLKGSPEDNEQKQLFVEQHKHYLDEIIEQISEFSKRVILADANLDKVLSAYNKHRDKPIREQAENIIHLFTLTNLGAPAAFKYFDTTIDRKRYTSTKEVLDATLIHQSITGLYETRIDLSQLGGDGGGGSGGTVSLQDEHRLFDIPVTTSLPDVWLQDFPQAWAETGGLGRAKCQAPIIIDLKPTAVPVSIKQYPMSLEAHMGIRQHIIKFLELGVLRPCRSPWNTPLLPVKKPGTQDYRPVQDLREINKRTVDIHPTVPNPYNLLSTLKPDYSWYTVLDLKDAFFCLPLAPQSQELFAFEWKDPERGISGQLTWTRLPQGFKNSPTLFNEALHRDLTDFRTQHPEVTLLQYVDDLLLAAPTKKACTQGTRHLLQELGEKGYRASAKKAQICQTKVTYLGYILSEGKRWLTPGRIETVARIPPPRNPREVREFLGKAGFCRLFIPGFAELAAPLYALTKPSTPFTWQTEHQLAFEALKKALLSAPALGLPDTSKPFTLFLDERQGIAKGVLTQKLGPWKRPVAYLSKKLDPVAAGWPPCLRIMAATAMLVKDSAKLTLGQPLTVITPHTLEAIVRQPPDRWITNARLTHYQALLLDTDRVQFGPPVTLNPATLLPVPENQPSPHDCRQVLAETHGTREDLKDQELPDADHTWYTDGSSYLDSGTRRAGAAVVDGHNTIWAQSLPPGTSAQKAELIALTKALELSKGKKANIYTDSRYAFATAHTHGSIYERRGWLTSEGKEIKNKAEIIALLKALFLPQEVAIIHCPGHQKGQDPVAVGNRQADRVARQAAMAEVLTLATEPDNTSHITAGKRTADGSEFEKRTADGSEFESPKKKAKVE

SEQ ID NO: 2000 - protein, 2121 aa, synthetic construct
MPAAKRVKLDGGDKKYSIGLDIGTNSVGWAVITDEYKVPSKKFKVLGNTDRHSIKKNLIGALLFDSGETAEATRLKRTARRRYTRRKNRICYLQEIFSNEMAKVDDSFFHRLEESFLVEEDKKHERHPIFGNIVDEVAYHEKYPTIYHLRKKLVDSTDKADLRLIYLALAHMIKFRGHFLIEGDLNPDNSDVDKLFIQLVQTYNQLFEENPINASGVDAKAILSARLSKSRRLENLIAQLPGEKKNGLFGNLIALSLGLTPNFKSNFDLAEDAKLQLSKDTYDDDLDNLLAQIGDQYADLFLAAKNLSDAILLSDILRVNTEITKAPLSASMIKRYDEHHQDLTLLKALVRQQLPEKYKEIFFDQSKNGYAGYIDGGASQEEFYKFIKPILEKMDGTEELLVKLNREDLLRKQRTFDNGSIPHQIHLGELHAILRRQEDFYPFLKDNREKIEKILTFRIPYYVGPLARGNSRFAWMTRKSEETITPWNFEEVVDKGASAQSFIERMTNFDKNLPNEKVLPKHSLLYEYFTVYNELTKVKYVTEGMRKPAFLSGEQKKAIVDLLFKTNRKVTVKQLKEDYFKKIECFDSVEISGVEDRFNASLGTYHDLLKIIKDKDFLDNEENEDILEDIVLTLTLFEDREMIEERLKTYAHLFDDKVMKQLKRRRYTGWGRLSRKLINGIRDKQSGKTILDFLKSDGFANRNFMQLIHDDSLTFKEDIQKAQVSGQGDSLHEHIANLAGSPAIKKGILQTVKVVDELVKVMGRHKPENIVIEMARENQTTQKGQKNSRERMKRIEEGIKELGSQILKEHPVENTQLQNEKLYLYYLQNGRDMYVDQELDINRLSDYDVDHIVPQSFLKDDSIDNKVLTRSDKARGKSDNVPSEEVVKKMKNYWRQLLNAKLITQRKFDNLTKAERGGLSELDKAGFIKRQLVETRQITKHVAQILDSRMNTKYDENDKLIREVKVITLKSKLVSDFRKDFQFYKVREINNYHHAHDAYLNAVVGTALIKKYPKLESEFVYGDYKVYDVRKMIAKSEQEIGKATAKYFFYSNIMNFFKTEITLANGEIRKRPLIETNGETGEIVWDKGRDFATVRKVLSMPQVNIVKKTEVQTGGFSKESILPKRNSDKLIARKKDWDPKKYGGFDSPTVAYSVLVVAKVEKGKSKKLKSVKELLGITIMERSSFEKNPIDFLEAKGYKEVKKDLIIKLPKYSLFELENGRKRMLASAGELQKGNELALPSKYVNFLYLASHYEKLKGSPEDNEQKQLFVEQHKHYLDEIIEQISEFSKRVILADANLDKVLSAYNKHRDKPIREQAENIIHLFTLTNLGAPAAFKYFDTTIDRKRYTSTKEVLDATLIHQSITGLYETRIDLSQLGGDGGEAAAKEAAAKEAAAKEAAAKEAAAKEAAAKGGTVSLQDEHRLFDIPVTTSLPDVWLQDFPQAWAETGGLGRAKCQAPIIIDLKPTAVPVSIKQYPMSLEAHMGIRQHIIKFLELGVLRPCRSPWNTPLLPVKKPGTQDYRPVQDLREINKRTVDIHPTVPNPYNLLSTLKPDYSWYTVLDLKDAFFCLPLAPQSQELFAFEWKDPERGISGQLTWTRLPQGFKNSPTLFNEALHRDLTDFRTQHPEVTLLQYVDDLLLAAPTKKACTQGTRHLLQELGEKGYRASAKKAQICQTKVTYLGYILSEGKRWLTPGRIETVARIPPPRNPREVREFLGKAGFCRLFIPGFAELAAPLYALTKPSTPFTWQTEHQLAFEALKKALLSAPALGLPDTSKPFTLFLDERQGIAKGVLTQKLGPWKRPVAYLSKKLDPVAAGWPPCLRIMAATAMLVKDSAKLTLGQPLTVITPHTLEAIVRQPPDRWITNARLTHYQALLLDTDRVQFGPPVTLNPATLLPVPENQPSPHDCRQVLAETHGTREDLKDQELPDADHTWYTDGSSYLDSGTRRAGAAVVDGHNTIWAQSLPPGTSAQKAELIALTKALELSKGKKANIYTDSRYAFATAHTHGSIYERRGWLTSEGKEIKNKAEIIALLKALFLPQEVAIIHCPGHQKGQDPVAVGNRQADRVARQAAMAEVLTLATEPDNTSHITAGKRTADGSEFEKRTADGSEFESPKKKAKVE

SEQ ID NO: 2001 - protein, 2102 aa, synthetic construct
MPAAKRVKLDGGDKKYSIGLDIGTNSVGWAVITDEYKVPSKKFKVLGNTDRHSIKKNLIGALLFDSGETAEATRLKRTARRRYTRRKNRICYLQEIFSNEMAKVDDSFFHRLEESFLVEEDKKHERHPIFGNIVDEVAYHEKYPTIYHLRKKLVDSTDKADLRLIYLALAHMIKFRGHFLIEGDLNPDNSDVDKLFIQLVQTYNQLFEENPINASGVDAKAILSARLSKSRRLENLIAQLPGEKKNGLFGNLIALSLGLTPNFKSNFDLAEDAKLQLSKDTYDDDLDNLLAQIGDQYADLFLAAKNLSDAILLSDILRVNTEITKAPLSASMIKRYDEHHQDLTLLKALVRQQLPEKYKEIFFDQSKNGYAGYIDGGASQEEFYKFIKPILEKMDGTEELLVKLNREDLLRKQRTFDNGSIPHQIHLGELHAILRRQEDFYPFLKDNREKIEKILTFRIPYYVGPLARGNSRFAWMTRKSEETITPWNFEEVVDKGASAQSFIERMTNFDKNLPNEKVLPKHSLLYEYFTVYNELTKVKYVTEGMRKPAFLSGEQKKAIVDLLFKTNRKVTVKQLKEDYFKKIECFDSVEISGVEDRFNASLGTYHDLLKIIKDKDFLDNEENEDILEDIVLTLTLFEDREMIEERLKTYAHLFDDKVMKQLKRRRYTGWGRLSRKLINGIRDKQSGKTILDFLKSDGFANRNFMQLIHDDSLTFKEDIQKAQVSGQGDSLHEHIANLAGSPAIKKGILQTVKVVDELVKVMGRHKPENIVIEMARENQTTQKGQKNSRERMKRIEEGIKELGSQILKEHPVENTQLQNEKLYLYYLQNGRDMYVDQELDINRLSDYDVDHIVPQSFLKDDSIDNKVLTRSDKARGKSDNVPSEEVVKKMKNYWRQLLNAKLITQRKFDNLTKAERGGLSELDKAGFIKRQLVETRQITKHVAQILDSRMNTKYDENDKLIREVKVITLKSKLVSDFRKDFQFYKVREINNYHHAHDAYLNAVVGTALIKKYPKLESEFVYGDYKVYDVRKMIAKSEQEIGKATAKYFFYSNIMNFFKTEITLANGEIRKRPLIETNGETGEIVWDKGRDFATVRKVLSMPQVNIVKKTEVQTGGFSKESILPKRNSDKLIARKKDWDPKKYGGFDSPTVAYSVLVVAKVEKGKSKKLKSVKELLGITIMERSSFEKNPIDFLEAKGYKEVKKDLIIKLPKYSLFELENGRKRMLASAGELQKGNELALPSKYVNFLYLASHYEKLKGSPEDNEQKQLFVEQHKHYLDEIIEQISEFSKRVILADANLDKVLSAYNKHRDKPIREQAENIIHLFTLTNLGAPAAFKYFDTTIDRKRYTSTKEVLDATLIHQSITGLYETRIDLSQLGGDGGEAAAKGGSGSSGGTVSLQDEHRLFDIPVTTSLPDVWLQDFPQAWAETGGLGRAKCQAPIIIDLKPTAVPVSIKQYPMSLEAHMGIRQHIIKFLELGVLRPCRSPWNTPLLPVKKPGTQDYRPVQDLREINKRTVDIHPTVPNPYNLLSTLKPDYSWYTVLDLKDAFFCLPLAPQSQELFAFEWKDPERGISGQLTWTRLPQGFKNSPTLFNEALHRDLTDFRTQHPEVTLLQYVDDLLLAAPTKKACTQGTRHLLQELGEKGYRASAKKAQICQTKVTYLGYILSEGKRWLTPGRIETVARIPPPRNPREVREFLGKAGFCRLFIPGFAELAAPLYALTKPSTPFTWQTEHQLAFEALKKALLSAPALGLPDTSKPFTLFLDERQGIAKGVLTQKLGPWKRPVAYLSKKLDPVAAGWPPCLRIMAATAMLVKDSAKLTLGQPLTVITPHTLEAIVRQPPDRWITNARLTHYQALLLDTDRVQFGPPVTLNPATLLPVPENQPSPHDCRQVLAETHGTREDLKDQELPDADHTWYTDGSSYLDSGTRRAGAAVVDGHNTIWAQSLPPGTSAQKAELIALTKALELSKGKKANIYTDSRYAFATAHTHGSIYERRGWLTSEGKEIKNKAEIIALLKALFLPQEVAIIHCPGHQKGQDPVAVGNRQADRVARQAAMAEVLTLATEPDNTSHITAGKRTADGSEFEKRTADGSEFESPKKKAKVE

SEQ ID NO: 2002 - protein, 2100 aa, synthetic construct
MPAAKRVKLDGGDKKYSIGLDIGTNSVGWAVITDEYKVPSKKFKVLGNTDRHSIKKNLIGALLFDSGETAEATRLKRTARRRYTRRKNRICYLQEIFSNEMAKVDDSFFHRLEESFLVEEDKKHERHPIFGNIVDEVAYHEKYPTIYHLRKKLVDSTDKADLRLIYLALAHMIKFRGHFLIEGDLNPDNSDVDKLFIQLVQTYNQLFEENPINASGVDAKAILSARLSKSRRLENLIAQLPGEKKNGLFGNLIALSLGLTPNFKSNFDLAEDAKLQLSKDTYDDDLDNLLAQIGDQYADLFLAAKNLSDAILLSDILRVNTEITKAPLSASMIKRYDEHHQDLTLLKALVRQQLPEKYKEIFFDQSKNGYAGYIDGGASQEEFYKFIKPILEKMDGTEELLVKLNREDLLRKQRTFDNGSIPHQIHLGELHAILRRQEDFYPFLKDNREKIEKILTFRIPYYVGPLARGNSRFAWMTRKSEETITPWNFEEVVDKGASAQSFIERMTNFDKNLPNEKVLPKHSLLYEYFTVYNELTKVKYVTEGMRKPAFLSGEQKKAIVDLLFKTNRKVTVKQLKEDYFKKIECFDSVEISGVEDRFNASLGTYHDLLKIIKDKDFLDNEENEDILEDIVLTLTLFEDREMIEERLKTYAHLFDDKVMKQLKRRRYTGWGRLSRKLINGIRDKQSGKTILDFLKSDGFANRNFMQLIHDDSLTFKEDIQKAQVSGQGDSLHEHIANLAGSPAIKKGILQTVKVVDELVKVMGRHKPENIVIEMARENQTTQKGQKNSRERMKRIEEGIKELGSQILKEHPVENTQLQNEKLYLYYLQNGRDMYVDQELDINRLSDYDVDHIVPQSFLKDDSIDNKVLTRSDKARGKSDNVPSEEVVKKMKNYWRQLLNAKLITQRKFDNLTKAERGGLSELDKAGFIKRQLVETRQITKHVAQILDSRMNTKYDENDKLIREVKVITLKSKLVSDFRKDFQFYKVREINNYHHAHDAYLNAVVGTALIKKYPKLESEFVYGDYKVYDVRKMIAKSEQEIGKATAKYFFYSNIMNFFKTEITLANGEIRKRPLIETNGETGEIVWDKGRDFATVRKVLSMPQVNIVKKTEVQTGGFSKESILPKRNSDKLIARKKDWDPKKYGGFDSPTVAYSVLVVAKVEKGKSKKLKSVKELLGITIMERSSFEKNPIDFLEAKGYKEVKKDLIIKLPKYSLFELENGRKRMLASAGELQKGNELALPSKYVNFLYLASHYEKLKGSPEDNEQKQLFVEQHKHYLDEIIEQISEFSKRVILADANLDKVLSAYNKHRDKPIREQAENIIHLFTLTNLGAPAAFKYFDTTIDRKRYTSTKEVLDATLIHQSITGLYETRIDLSQLGGDGGGGGGSSPAPGGTVSLQDEHRLFDIPVTTSLPDVWLQDFPQAWAETGGLGRAKCQAPIIIDLKPTAVPVSIKQYPMSLEAHMGIRQHIIKFLELGVLRPCRSPWNTPLLPVKKPGTQDYRPVQDLREINKRTVDIHPTVPNPYNLLSTLKPDYSWYTVLDLKDAFFCLPLAPQSQELFAFEWKDPERGISGQLTWTRLPQGFKNSPTLFNEALHRDLTDFRTQHPEVTLLQYVDDLLLAAPTKKACTQGTRHLLQELGEKGYRASAKKAQICQTKVTYLGYILSEGKRWLTPGRIETVARIPPPRNPREVREFLGKAGFCRLFIPGFAELAAPLYALTKPSTPFTWQTEHQLAFEALKKALLSAPALGLPDTSKPFTLFLDERQGIAKGVLTQKLGPWKRPVAYLSKKLDPVAAGWPPCLRIMAATAMLVKDSAKLTLGQPLTVITPHTLEAIVRQPPDRWITNARLTHYQALLLDTDRVQFGPPVTLNPATLLPVPENQPSPHDCRQVLAETHGTREDLKDQELPDADHTWYTDGSSYLDSGTRRAGAAVVDGHNTIWAQSLPPGTSAQKAELIALTKALELSKGKKANIYTDSRYAFATAHTHGSIYERRGWLTSEGKEIKNKAEIIALLKALFLPQEVAIIHCPGHQKGQDPVAVGNRQADRVARQAAMAEVLTLATEPDNTSHITAGKRTADGSEFEKRTADGSEFESPKKKAKVE

SEQ ID NO: 2003 - protein, 2102 aa, synthetic construct
MPAAKRVKLDGGDKKYSIGLDIGTNSVGWAVITDEYKVPSKKFKVLGNTDRHSIKKNLIGALLFDSGETAEATRLKRTARRRYTRRKNRICYLQEIFSNEMAKVDDSFFHRLEESFLVEEDKKHERHPIFGNIVDEVAYHEKYPTIYHLRKKLVDSTDKADLRLIYLALAHMIKFRGHFLIEGDLNPDNSDVDKLFIQLVQTYNQLFEENPINASGVDAKAILSARLSKSRRLENLIAQLPGEKKNGLFGNLIALSLGLTPNFKSNFDLAEDAKLQLSKDTYDDDLDNLLAQIGDQYADLFLAAKNLSDAILLSDILRVNTEITKAPLSASMIKRYDEHHQDLTLLKALVRQQLPEKYKEIFFDQSKNGYAGYIDGGASQEEFYKFIKPILEKMDGTEELLVKLNREDLLRKQRTFDNGSIPHQIHLGELHAILRRQEDFYPFLKDNREKIEKILTFRIPYYVGPLARGNSRFAWMTRKSEETITPWNFEEVVDKGASAQSFIERMTNFDKNLPNEKVLPKHSLLYEYFTVYNELTKVKYVTEGMRKPAFLSGEQKKAIVDLLFKTNRKVTVKQLKEDYFKKIECFDSVEISGVEDRFNASLGTYHDLLKIIKDKDFLDNEENEDILEDIVLTLTLFEDREMIEERLKTYAHLFDDKVMKQLKRRRYTGWGRLSRKLINGIRDKQSGKTILDFLKSDGFANRNFMQLIHDDSLTFKEDIQKAQVSGQGDSLHEHIANLAGSPAIKKGILQTVKVVDELVKVMGRHKPENIVIEMARENQTTQKGQKNSRERMKRIEEGIKELGSQILKEHPVENTQLQNEKLYLYYLQNGRDMYVDQELDINRLSDYDVDHIVPQSFLKDDSIDNKVLTRSDKARGKSDNVPSEEVVKKMKNYWRQLLNAKLITQRKFDNLTKAERGGLSELDKAGFIKRQLVETRQITKHVAQILDSRMNTKYDENDKLIREVKVITLKSKLVSDFRKDFQFYKVREINNYHHAHDAYLNAVVGTALIKKYPKLESEFVYGDYKVYDVRKMIAKSEQEIGKATAKYFFYSNIMNFFKTEITLANGEIRKRPLIETNGETGEIVWDKGRDFATVRKVLSMPQVNIVKKTEVQTGGFSKESILPKRNSDKLIARKKDWDPKKYGGFDSPTVAYSVLVVAKVEKGKSKKLKSVKELLGITIMERSSFEKNPIDFLEAKGYKEVKKDLIIKLPKYSLFELENGRKRMLASAGELQKGNELALPSKYVNFLYLASHYEKLKGSPEDNEQKQLFVEQHKHYLDEIIEQISEFSKRVILADANLDKVLSAYNKHRDKPIREQAENIIHLFTLTNLGAPAAFKYFDTTIDRKRYTSTKEVLDATLIHQSITGLYETRIDLSQLGGDGGGGSGGGEAAAKGGTVSLQDEHRLFDIPVTTSLPDVWLQDFPQAWAETGGLGRAKCQAPIIIDLKPTAVPVSIKQYPMSLEAHMGIRQHIIKFLELGVLRPCRSPWNTPLLPVKKPGTQDYRPVQDLREINKRTVDIHPTVPNPYNLLSTLKPDYSWYTVLDLKDAFFCLPLAPQSQELFAFEWKDPERGISGQLTWTRLPQGFKNSPTLFNEALHRDLTDFRTQHPEVTLLQYVDDLLLAAPTKKACTQGTRHLLQELGEKGYRASAKKAQICQTKVTYLGYILSEGKRWLTPGRIETVARIPPPRNPREVREFLGKAGFCRLFIPGFAELAAPLYALTKPSTPFTWQTEHQLAFEALKKALLSAPALGLPDTSKPFTLFLDERQGIAKGVLTQKLGPWKRPVAYLSKKLDPVAAGWPPCLRIMAATAMLVKDSAKLTLGQPLTVITPHTLEAIVRQPPDRWITNARLTHYQALLLDTDRVQFGPPVTLNPATLLPVPENQPSPHDCRQVLAETHGTREDLKDQELPDADHTWYTDGSSYLDSGTRRAGAAVVDGHNTIWAQSLPPGTSAQKAELIALTKALELSKGKKANIYTDSRYAFATAHTHGSIYERRGWLTSEGKEIKNKAEIIALLKALFLPQEVAIIHCPGHQKGQDPVAVGNRQADRVARQAAMAEVLTLATEPDNTSHITAGKRTADGSEFEKRTADGSEFESPKKKAKVE

SEQ ID NO: 2004 - protein, 2099 aa, synthetic construct
MPAAKRVKLDGGDKKYSIGLDIGTNSVGWAVITDEYKVPSKKFKVLGNTDRHSIKKNLIGALLFDSGETAEATRLKRTARRRYTRRKNRICYLQEIFSNEMAKVDDSFFHRLEESFLVEEDKKHERHPIFGNIVDEVAYHEKYPTIYHLRKKLVDSTDKADLRLIYLALAHMIKFRGHFLIEGDLNPDNSDVDKLFIQLVQTYNQLFEENPINASGVDAKAILSARLSKSRRLENLIAQLPGEKKNGLFGNLIALSLGLTPNFKSNFDLAEDAKLQLSKDTYDDDLDNLLAQIGDQYADLFLAAKNLSDAILLSDILRVNTEITKAPLSASMIKRYDEHHQDLTLLKALVRQQLPEKYKEIFFDQSKNGYAGYIDGGASQEEFYKFIKPILEKMDGTEELLVKLNREDLLRKQRTFDNGSIPHQIHLGELHAILRRQEDFYPFLKDNREKIEKILTFRIPYYVGPLARGNSRFAWMTRKSEETITPWNFEEVVDKGASAQSFIERMTNFDKNLPNEKVLPKHSLLYEYFTVYNELTKVKYVTEGMRKPAFLSGEQKKAIVDLLFKTNRKVTVKQLKEDYFKKIECFDSVEISGVEDRFNASLGTYHDLLKIIKDKDFLDNEENEDILEDIVLTLTLFEDREMIEERLKTYAHLFDDKVMKQLKRRRYTGWGRLSRKLINGIRDKQSGKTILDFLKSDGFANRNFMQLIHDDSLTFKEDIQKAQVSGQGDSLHEHIANLAGSPAIKKGILQTVKVVDELVKVMGRHKPENIVIEMARENQTTQKGQKNSRERMKRIEEGIKELGSQILKEHPVENTQLQNEKLYLYYLQNGRDMYVDQELDINRLSDYDVDHIVPQSFLKDDSIDNKVLTRSDKARGKSDNVPSEEVVKKMKNYWRQLLNAKLITQRKFDNLTKAERGGLSELDKAGFIKRQLVETRQITKHVAQILDSRMNTKYDENDKLIREVKVITLKSKLVSDFRKDFQFYKVREINNYHHAHDAYLNAVVGTALIKKYPKLESEFVYGDYKVYDVRKMIAKSEQEIGKATAKYFFYSNIMNFFKTEITLANGEIRKRPLIETNGETGEIVWDKGRDFATVRKVLSMPQVNIVKKTEVQTGGFSKESILPKRNSDKLIARKKDWDPKKYGGFDSPTVAYSVLVVAKVEKGKSKKLKSVKELLGITIMERSSFEKNPIDFLEAKGYKEVKKDLIIKLPKYSLFELENGRKRMLASAGELQKGNELALPSKYVNFLYLASHYEKLKGSPEDNEQKQLFVEQHKHYLDEIIEQISEFSKRVILADANLDKVLSAYNKHRDKPIREQAENIIHLFTLTNLGAPAAFKYFDTTIDRKRYTSTKEVLDATLIHQSITGLYETRIDLSQLGGDGGGGGEAAAKGGTVSLQDEHRLFDIPVTTSLPDVWLQDFPQAWAETGGLGRAKCQAPIIIDLKPTAVPVSIKQYPMSLEAHMGIRQHIIKFLELGVLRPCRSPWNTPLLPVKKPGTQDYRPVQDLREINKRTVDIHPTVPNPYNLLSTLKPDYSWYTVLDLKDAFFCLPLAPQSQELFAFEWKDPERGISGQLTWTRLPQGFKNSPTLFNEALHRDLTDFRTQHPEVTLLQYVDDLLLAAPTKKACTQGTRHLLQELGEKGYRASAKKAQICQTKVTYLGYILSEGKRWLTPGRIETVARIPPPRNPREVREFLGKAGFCRLFIPGFAELAAPLYALTKPSTPFTWQTEHQLAFEALKKALLSAPALGLPDTSKPFTLFLDERQGIAKGVLTQKLGPWKRPVAYLSKKLDPVAAGWPPCLRIMAATAMLVKDSAKLTLGQPLTVITPHTLEAIVRQPPDRWITNARLTHYQALLLDTDRVQFGPPVTLNPATLLPVPENQPSPHDCRQVLAETHGTREDLKDQELPDADHTWYTDGSSYLDSGTRRAGAAVVDGHNTIWAQSLPPGTSAQKAELIALTKALELSKGKKANIYTDSRYAFATAHTHGSIYERRGWLTSEGKEIKNKAEIIALLKALFLPQEVAIIHCPGHQKGQDPVAVGNRQADRVARQAAMAEVLTLATEPDNTSHITAGKRTADGSEFEKRTADGSEFESPKKKAKVE

SEQ ID NO: 2005 - protein, 2103 aa, synthetic construct
MPAAKRVKLDGGDKKYSIGLDIGTNSVGWAVITDEYKVPSKKFKVLGNTDRHSIKKNLIGALLFDSGETAEATRLKRTARRRYTRRKNRICYLQEIFSNEMAKVDDSFFHRLEESFLVEEDKKHERHPIFGNIVDEVAYHEKYPTIYHLRKKLVDSTDKADLRLIYLALAHMIKFRGHFLIEGDLNPDNSDVDKLFIQLVQTYNQLFEENPINASGVDAKAILSARLSKSRRLENLIAQLPGEKKNGLFGNLIALSLGLTPNFKSNFDLAEDAKLQLSKDTYDDDLDNLLAQIGDQYADLFLAAKNLSDAILLSDILRVNTEITKAPLSASMIKRYDEHHQDLTLLKALVRQQLPEKYKEIFFDQSKNGYAGYIDGGASQEEFYKFIKPILEKMDGTEELLVKLNREDLLRKQRTFDNGSIPHQIHLGELHAILRRQEDFYPFLKDNREKIEKILTFRIPYYVGPLARGNSRFAWMTRKSEETITPWNFEEVVDKGASAQSFIERMTNFDKNLPNEKVLPKHSLLYEYFTVYNELTKVKYVTEGMRKPAFLSGEQKKAIVDLLFKTNRKVTVKQLKEDYFKKIECFDSVEISGVEDRFNASLGTYHDLLKIIKDKDFLDNEENEDILEDIVLTLTLFEDREMIEERLKTYAHLFDDKVMKQLKRRRYTGWGRLSRKLINGIRDKQSGKTILDFLKSDGFANRNFMQLIHDDSLTFKEDIQKAQVSGQGDSLHEHIANLAGSPAIKKGILQTVKVVDELVKVMGRHKPENIVIEMARENQTTQKGQKNSRERMKRIEEGIKELGSQILKEHPVENTQLQNEKLYLYYLQNGRDMYVDQELDINRLSDYDVDHIVPQSFLKDDSIDNKVLTRSDKARGKSDNVPSEEVVKKMKNYWRQLLNAKLITQRKFDNLTKAERGGLSELDKAGFIKRQLVETRQITKHVAQILDSRMNTKYDENDKLIREVKVITLKSKLVSDFRKDFQFYKVREINNYHHAHDAYLNAVVGTALIKKYPKLESEFVYGDYKVYDVRKMIAKSEQEIGKATAKYFFYSNIMNFFKTEITLANGEIRKRPLIETNGETGEIVWDKGRDFATVRKVLSMPQVNIVKKTEVQTGGFSKESILPKRNSDKLIARKKDWDPKKYGGFDSPTVAYSVLVVAKVEKGKSKKLKSVKELLGITIMERSSFEKNPIDFLEAKGYKEVKKDLIIKLPKYSLFELENGRKRMLASAGELQKGNELALPSKYVNFLYLASHYEKLKGSPEDNEQKQLFVEQHKHYLDEIIEQISEFSKRVILADANLDKVLSAYNKHRDKPIREQAENIIHLFTLTNLGAPAAFKYFDTTIDRKRYTSTKEVLDATLIHQSITGLYETRIDLSQLGGDGGGSAGSAAGSGEFGGTVSLQDEHRLFDIPVTTSLPDVWLQDFPQAWAETGGLGRAKCQAPIIIDLKPTAVPVSIKQYPMSLEAHMGIRQHIIKFLELGVLRPCRSPWNTPLLPVKKPGTQDYRPVQDLREINKRTVDIHPTVPNPYNLLSTLKPDYSWYTVLDLKDAFFCLPLAPQSQELFAFEWKDPERGISGQLTWTRLPQGFKNSPTLFNEALHRDLTDFRTQHPEVTLLQYVDDLLLAAPTKKACTQGTRHLLQELGEKGYRASAKKAQICQTKVTYLGYILSEGKRWLTPGRIETVARIPPPRNPREVREFLGKAGFCRLFIPGFAELAAPLYALTKPSTPFTWQTEHQLAFEALKKALLSAPALGLPDTSKPFTLFLDERQGIAKGVLTQKLGPWKRPVAYLSKKLDPVAAGWPPCLRIMAATAMLVKDSAKLTLGQPLTVITPHTLEAIVRQPPDRWITNARLTHYQALLLDTDRVQFGPPVTLNPATLLPVPENQPSPHDCRQVLAETHGTREDLKDQELPDADHTWYTDGSSYLDSGTRRAGAAVVDGHNTIWAQSLPPGTSAQKAELIALTKALELSKGKKANIYTDSRYAFATAHTHGSIYERRGWLTSEGKEIKNKAEIIALLKALFLPQEVAIIHCPGHQKGQDPVAVGNRQADRVARQAAMAEVLTLATEPDNTSHITAGKRTADGSEFEKRTADGSEFESPKKKAKVE

SEQ ID NO: 2006 - protein, 2096 aa, synthetic construct
MPAAKRVKLDGGDKKYSIGLDIGTNSVGWAVITDEYKVPSKKFKVLGNTDRHSIKKNLIGALLFDSGETAEATRLKRTARRRYTRRKNRICYLQEIFSNEMAKVDDSFFHRLEESFLVEEDKKHERHPIFGNIVDEVAYHEKYPTIYHLRKKLVDSTDKADLRLIYLALAHMIKFRGHFLIEGDLNPDNSDVDKLFIQLVQTYNQLFEENPINASGVDAKAILSARLSKSRRLENLIAQLPGEKKNGLFGNLIALSLGLTPNFKSNFDLAEDAKLQLSKDTYDDDLDNLLAQIGDQYADLFLAAKNLSDAILLSDILRVNTEITKAPLSASMIKRYDEHHQDLTLLKALVRQQLPEKYKEIFFDQSKNGYAGYIDGGASQEEFYKFIKPILEKMDGTEELLVKLNREDLLRKQRTFDNGSIPHQIHLGELHAILRRQEDFYPFLKDNREKIEKILTFRIPYYVGPLARGNSRFAWMTRKSEETITPWNFEEVVDKGASAQSFIERMTNFDKNLPNEKVLPKHSLLYEYFTVYNELTKVKYVTEGMRKPAFLSGEQKKAIVDLLFKTNRKVTVKQLKEDYFKKIECFDSVEISGVEDRFNASLGTYHDLLKIIKDKDFLDNEENEDILEDIVLTLTLFEDREMIEERLKTYAHLFDDKVMKQLKRRRYTGWGRLSRKLINGIRDKQSGKTILDFLKSDGFANRNFMQLIHDDSLTFKEDIQKAQVSGQGDSLHEHIANLAGSPAIKKGILQTVKVVDELVKVMGRHKPENIVIEMARENQTTQKGQKNSRERMKRIEEGIKELGSQILKEHPVENTQLQNEKLYLYYLQNGRDMYVDQELDINRLSDYDVDHIVPQSFLKDDSIDNKVLTRSDKARGKSDNVPSEEVVKKMKNYWRQLLNAKLITQRKFDNLTKAERGGLSELDKAGFIKRQLVETRQITKHVAQILDSRMNTKYDENDKLIREVKVITLKSKLVSDFRKDFQFYKVREINNYHHAHDAYLNAVVGTALIKKYPKLESEFVYGDYKVYDVRKMIAKSEQEIGKATAKYFFYSNIMNFFKTEITLANGEIRKRPLIETNGETGEIVWDKGRDFATVRKVLSMPQVNIVKKTEVQTGGFSKESILPKRNSDKLIARKKDWDPKKYGGFDSPTVAYSVLVVAKVEKGKSKKLKSVKELLGITIMERSSFEKNPIDFLEAKGYKEVKKDLIIKLPKYSLFELENGRKRMLASAGELQKGNELALPSKYVNFLYLASHYEKLKGSPEDNEQKQLFVEQHKHYLDEIIEQISEFSKRVILADANLDKVLSAYNKHRDKPIREQAENIIHLFTLTNLGAPAAFKYFDTTIDRKRYTSTKEVLDATLIHQSITGLYETRIDLSQLGGDGGGGGGSGGTVSLQDEHRLFDIPVTTSLPDVWLQDFPQAWAETGGLGRAKCQAPIIIDLKPTAVPVSIKQYPMSLEAHMGIRQHIIKFLELGVLRPCRSPWNTPLLPVKKPGTQDYRPVQDLREINKRTVDIHPTVPNPYNLLSTLKPDYSWYTVLDLKDAFFCLPLAPQSQELFAFEWKDPERGISGQLTWTRLPQGFKNSPTLFNEALHRDLTDFRTQHPEVTLLQYVDDLLLAAPTKKACTQGTRHLLQELGEKGYRASAKKAQICQTKVTYLGYILSEGKRWLTPGRIETVARIPPPRNPREVREFLGKAGFCRLFIPGFAELAAPLYALTKPSTPFTWQTEHQLAFEALKKALLSAPALGLPDTSKPFTLFLDERQGIAKGVLTQKLGPWKRPVAYLSKKLDPVAAGWPPCLRIMAATAMLVKDSAKLTLGQPLTVITPHTLEAIVRQPPDRWITNARLTHYQALLLDTDRVQFGPPVTLNPATLLPVPENQPSPHDCRQVLAETHGTREDLKDQELPDADHTWYTDGSSYLDSGTRRAGAAVVDGHNTIWAQSLPPGTSAQKAELIALTKALELSKGKKANIYTDSRYAFATAHTHGSIYERRGWLTSEGKEIKNKAEIIALLKALFLPQEVAIIHCPGHQKGQDPVAVGNRQADRVARQAAMAEVLTLATEPDNTSHITAGKRTADGSEFEKRTADGSEFESPKKKAKVE

SEQ ID NO: 2007 - protein, 2100 aa, synthetic construct
MPAAKRVKLDGGDKKYSIGLDIGTNSVGWAVITDEYKVPSKKFKVLGNTDRHSIKKNLIGALLFDSGETAEATRLKRTARRRYTRRKNRICYLQEIFSNEMAKVDDSFFHRLEESFLVEEDKKHERHPIFGNIVDEVAYHEKYPTIYHLRKKLVDSTDKADLRLIYLALAHMIKFRGHFLIEGDLNPDNSDVDKLFIQLVQTYNQLFEENPINASGVDAKAILSARLSKSRRLENLIAQLPGEKKNGLFGNLIALSLGLTPNFKSNFDLAEDAKLQLSKDTYDDDLDNLLAQIGDQYADLFLAAKNLSDAILLSDILRVNTEITKAPLSASMIKRYDEHHQDLTLLKALVRQQLPEKYKEIFFDQSKNGYAGYIDGGASQEEFYKFIKPILEKMDGTEELLVKLNREDLLRKQRTFDNGSIPHQIHLGELHAILRRQEDFYPFLKDNREKIEKILTFRIPYYVGPLARGNSRFAWMTRKSEETITPWNFEEVVDKGASAQSFIERMTNFDKNLPNEKVLPKHSLLYEYFTVYNELTKVKYVTEGMRKPAFLSGEQKKAIVDLLFKTNRKVTVKQLKEDYFKKIECFDSVEISGVEDRFNASLGTYHDLLKIIKDKDFLDNEENEDILEDIVLTLTLFEDREMIEERLKTYAHLFDDKVMKQLKRRRYTGWGRLSRKLINGIRDKQSGKTILDFLKSDGFANRNFMQLIHDDSLTFKEDIQKAQVSGQGDSLHEHIANLAGSPAIKKGILQTVKVVDELVKVMGRHKPENIVIEMARENQTTQKGQKNSRERMKRIEEGIKELGSQILKEHPVENTQLQNEKLYLYYLQNGRDMYVDQELDINRLSDYDVDHIVPQSFLKDDSIDNKVLTRSDKARGKSDNVPSEEVVKKMKNYWRQLLNAKLITQRKFDNLTKAERGGLSELDKAGFIKRQLVETRQITKHVAQILDSRMNTKYDENDKLIREVKVITLKSKLVSDFRKDFQFYKVREINNYHHAHDAYLNAVVGTALIKKYPKLESEFVYGDYKVYDVRKMIAKSEQEIGKATAKYFFYSNIMNFFKTEITLANGEIRKRPLIETNGETGEIVWDKGRDFATVRKVLSMPQVNIVKKTEVQTGGFSKESILPKRNSDKLIARKKDWDPKKYGGFDSPTVAYSVLVVAKVEKGKSKKLKSVKELLGITIMERSSFEKNPIDFLEAKGYKEVKKDLIIKLPKYSLFELENGRKRMLASAGELQKGNELALPSKYVNFLYLASHYEKLKGSPEDNEQKQLFVEQHKHYLDEIIEQISEFSKRVILADANLDKVLSAYNKHRDKPIREQAENIIHLFTLTNLGAPAAFKYFDTTIDRKRYTSTKEVLDATLIHQSITGLYETRIDLSQLGGDGGGSSGGGPAPGGTVSLQDEHRLFDIPVTTSLPDVWLQDFPQAWAETGGLGRAKCQAPIIIDLKPTAVPVSIKQYPMSLEAHMGIRQHIIKFLELGVLRPCRSPWNTPLLPVKKPGTQDYRPVQDLREINKRTVDIHPTVPNPYNLLSTLKPDYSWYTVLDLKDAFFCLPLAPQSQELFAFEWKDPERGISGQLTWTRLPQGFKNSPTLFNEALHRDLTDFRTQHPEVTLLQYVDDLLLAAPTKKACTQGTRHLLQELGEKGYRASAKKAQICQTKVTYLGYILSEGKRWLTPGRIETVARIPPPRNPREVREFLGKAGFCRLFIPGFAELAAPLYALTKPSTPFTWQTEHQLAFEALKKALLSAPALGLPDTSKPFTLFLDERQGIAKGVLTQKLGPWKRPVAYLSKKLDPVAAGWPPCLRIMAATAMLVKDSAKLTLGQPLTVITPHTLEAIVRQPPDRWITNARLTHYQALLLDTDRVQFGPPVTLNPATLLPVPENQPSPHDCRQVLAETHGTREDLKDQELPDADHTWYTDGSSYLDSGTRRAGAAVVDGHNTIWAQSLPPGTSAQKAELIALTKALELSKGKKANIYTDSRYAFATAHTHGSIYERRGWLTSEGKEIKNKAEIIALLKALFLPQEVAIIHCPGHQKGQDPVAVGNRQADRVARQAAMAEVLTLATEPDNTSHITAGKRTADGSEFEKRTADGSEFESPKKKAKVE

SEQ ID NO: 2008 - protein, 2096 aa, synthetic construct
MPAAKRVKLDGGDKKYSIGLDIGTNSVGWAVITDEYKVPSKKFKVLGNTDRHSIKKNLIGALLFDSGETAEATRLKRTARRRYTRRKNRICYLQEIFSNEMAKVDDSFFHRLEESFLVEEDKKHERHPIFGNIVDEVAYHEKYPTIYHLRKKLVDSTDKADLRLIYLALAHMIKFRGHFLIEGDLNPDNSDVDKLFIQLVQTYNQLFEENPINASGVDAKAILSARLSKSRRLENLIAQLPGEKKNGLFGNLIALSLGLTPNFKSNFDLAEDAKLQLSKDTYDDDLDNLLAQIGDQYADLFLAAKNLSDAILLSDILRVNTEITKAPLSASMIKRYDEHHQDLTLLKALVRQQLPEKYKEIFFDQSKNGYAGYIDGGASQEEFYKFIKPILEKMDGTEELLVKLNREDLLRKQRTFDNGSIPHQIHLGELHAILRRQEDFYPFLKDNREKIEKILTFRIPYYVGPLARGNSRFAWMTRKSEETITPWNFEEVVDKGASAQSFIERMTNFDKNLPNEKVLPKHSLLYEYFTVYNELTKVKYVTEGMRKPAFLSGEQKKAIVDLLFKTNRKVTVKQLKEDYFKKIECFDSVEISGVEDRFNASLGTYHDLLKIIKDKDFLDNEENEDILEDIVLTLTLFEDREMIEERLKTYAHLFDDKVMKQLKRRRYTGWGRLSRKLINGIRDKQSGKTILDFLKSDGFANRNFMQLIHDDSLTFKEDIQKAQVSGQGDSLHEHIANLAGSPAIKKGILQTVKVVDELVKVMGRHKPENIVIEMARENQTTQKGQKNSRERMKRIEEGIKELGSQILKEHPVENTQLQNEKLYLYYLQNGRDMYVDQELDINRLSDYDVDHIVPQSFLKDDSIDNKVLTRSDKARGKSDNVPSEEVVKKMKNYWRQLLNAKLITQRKFDNLTKAERGGLSELDKAGFIKRQLVETRQITKHVAQILDSRMNTKYDENDKLIREVKVITLKSKLVSDFRKDFQFYKVREINNYHHAHDAYLNAVVGTALIKKYPKLESEFVYGDYKVYDVRKMIAKSEQEIGKATAKYFFYSNIMNFFKTEITLANGEIRKRPLIETNGETGEIVWDKGRDFATVRKVLSMPQVNIVKKTEVQTGGFSKESILPKRNSDKLIARKKDWDPKKYGGFDSPTVAYSVLVVAKVEKGKSKKLKSVKELLGITIMERSSFEKNPIDFLEAKGYKEVKKDLIIKLPKYSLFELENGRKRMLASAGELQKGNELALPSKYVNFLYLASHYEKLKGSPEDNEQKQLFVEQHKHYLDEIIEQISEFSKRVILADANLDKVLSAYNKHRDKPIREQAENIIHLFTLTNLGAPAAFKYFDTTIDRKRYTSTKEVLDATLIHQSITGLYETRIDLSQLGGDGGEAAAKGGTVSLQDEHRLFDIPVTTSLPDVWLQDFPQAWAETGGLGRAKCQAPIIIDLKPTAVPVSIKQYPMSLEAHMGIRQHIIKFLELGVLRPCRSPWNTPLLPVKKPGTQDYRPVQDLREINKRTVDIHPTVPNPYNLLSTLKPDYSWYTVLDLKDAFFCLPLAPQSQELFAFEWKDPERGISGQLTWTRLPQGFKNSPTLFNEALHRDLTDFRTQHPEVTLLQYVDDLLLAAPTKKACTQGTRHLLQELGEKGYRASAKKAQICQTKVTYLGYILSEGKRWLTPGRIETVARIPPPRNPREVREFLGKAGFCRLFIPGFAELAAPLYALTKPSTPFTWQTEHQLAFEALKKALLSAPALGLPDTSKPFTLFLDERQGIAKGVLTQKLGPWKRPVAYLSKKLDPVAAGWPPCLRIMAATAMLVKDSAKLTLGQPLTVITPHTLEAIVRQPPDRWITNARLTHYQALLLDTDRVQFGPPVTLNPATLLPVPENQPSPHDCRQVLAETHGTREDLKDQELPDADHTWYTDGSSYLDSGTRRAGAAVVDGHNTIWAQSLPPGTSAQKAELIALTKALELSKGKKANIYTDSRYAFATAHTHGSIYERRGWLTSEGKEIKNKAEIIALLKALFLPQEVAIIHCPGHQKGQDPVAVGNRQADRVARQAAMAEVLTLATEPDNTSHITAGKRTADGSEFEKRTADGSEFESPKKKAKVE

SEQ ID NO: 2009 - protein, 2102 aa, synthetic construct
MPAAKRVKLDGGDKKYSIGLDIGTNSVGWAVITDEYKVPSKKFKVLGNTDRHSIKKNLIGALLFDSGETAEATRLKRTARRRYTRRKNRICYLQEIFSNEMAKVDDSFFHRLEESFLVEEDKKHERHPIFGNIVDEVAYHEKYPTIYHLRKKLVDSTDKADLRLIYLALAHMIKFRGHFLIEGDLNPDNSDVDKLFIQLVQTYNQLFEENPINASGVDAKAILSARLSKSRRLENLIAQLPGEKKNGLFGNLIALSLGLTPNFKSNFDLAEDAKLQLSKDTYDDDLDNLLAQIGDQYADLFLAAKNLSDAILLSDILRVNTEITKAPLSASMIKRYDEHHQDLTLLKALVRQQLPEKYKEIFFDQSKNGYAGYIDGGASQEEFYKFIKPILEKMDGTEELLVKLNREDLLRKQRTFDNGSIPHQIHLGELHAILRRQEDFYPFLKDNREKIEKILTFRIPYYVGPLARGNSRFAWMTRKSEETITPWNFEEVVDKGASAQSFIERMTNFDKNLPNEKVLPKHSLLYEYFTVYNELTKVKYVTEGMRKPAFLSGEQKKAIVDLLFKTNRKVTVKQLKEDYFKKIECFDSVEISGVEDRFNASLGTYHDLLKIIKDKDFLDNEENEDILEDIVLTLTLFEDREMIEERLKTYAHLFDDKVMKQLKRRRYTGWGRLSRKLINGIRDKQSGKTILDFLKSDGFANRNFMQLIHDDSLTFKEDIQKAQVSGQGDSLHEHIANLAGSPAIKKGILQTVKVVDELVKVMGRHKPENIVIEMARENQTTQKGQKNSRERMKRIEEGIKELGSQILKEHPVENTQLQNEKLYLYYLQNGRDMYVDQELDINRLSDYDVDHIVPQSFLKDDSIDNKVLTRSDKARGKSDNVPSEEVVKKMKNYWRQLLNAKLITQRKFDNLTKAERGGLSELDKAGFIKRQLVETRQITKHVAQILDSRMNTKYDENDKLIREVKVITLKSKLVSDFRKDFQFYKVREINNYHHAHDAYLNAVVGTALIKKYPKLESEFVYGDYKVYDVRKMIAKSEQEIGKATAKYFFYSNIMNFFKTEITLANGEIRKRPLIETNGETGEIVWDKGRDFATVRKVLSMPQVNIVKKTEVQTGGFSKESILPKRNSDKLIARKKDWDPKKYGGFDSPTVAYSVLVVAKVEKGKSKKLKSVKELLGITIMERSSFEKNPIDFLEAKGYKEVKKDLIIKLPKYSLFELENGRKRMLASAGELQKGNELALPSKYVNFLYLASHYEKLKGSPEDNEQKQLFVEQHKHYLDEIIEQISEFSKRVILADANLDKVLSAYNKHRDKPIREQAENIIHLFTLTNLGAPAAFKYFDTTIDRKRYTSTKEVLDATLIHQSITGLYETRIDLSQLGGDGGEAAAKGGGGSSGGTVSLQDEHRLFDIPVTTSLPDVWLQDFPQAWAETGGLGRAKCQAPIIIDLKPTAVPVSIKQYPMSLEAHMGIRQHIIKFLELGVLRPCRSPWNTPLLPVKKPGTQDYRPVQDLREINKRTVDIHPTVPNPYNLLSTLKPDYSWYTVLDLKDAFFCLPLAPQSQELFAFEWKDPERGISGQLTWTRLPQGFKNSPTLFNEALHRDLTDFRTQHPEVTLLQYVDDLLLAAPTKKACTQGTRHLLQELGEKGYRASAKKAQICQTKVTYLGYILSEGKRWLTPGRIETVARIPPPRNPREVREFLGKAGFCRLFIPGFAELAAPLYALTKPSTPFTWQTEHQLAFEALKKALLSAPALGLPDTSKPFTLFLDERQGIAKGVLTQKLGPWKRPVAYLSKKLDPVAAGWPPCLRIMAATAMLVKDSAKLTLGQPLTVITPHTLEAIVRQPPDRWITNARLTHYQALLLDTDRVQFGPPVTLNPATLLPVPENQPSPHDCRQVLAETHGTREDLKDQELPDADHTWYTDGSSYLDSGTRRAGAAVVDGHNTIWAQSLPPGTSAQKAELIALTKALELSKGKKANIYTDSRYAFATAHTHGSIYERRGWLTSEGKEIKNKAEIIALLKALFLPQEVAIIHCPGHQKGQDPVAVGNRQADRVARQAAMAEVLTLATEPDNTSHITAGKRTADGSEFEKRTADGSEFESPKKKAKVE

SEQ ID NO: 2010 - protein, 2100 aa, synthetic construct
MPAAKRVKLDGGDKKYSIGLDIGTNSVGWAVITDEYKVPSKKFKVLGNTDRHSIKKNLIGALLFDSGETAEATRLKRTARRRYTRRKNRICYLQEIFSNEMAKVDDSFFHRLEESFLVEEDKKHERHPIFGNIVDEVAYHEKYPTIYHLRKKLVDSTDKADLRLIYLALAHMIKFRGHFLIEGDLNPDNSDVDKLFIQLVQTYNQLFEENPINASGVDAKAILSARLSKSRRLENLIAQLPGEKKNGLFGNLIALSLGLTPNFKSNFDLAEDAKLQLSKDTYDDDLDNLLAQIGDQYADLFLAAKNLSDAILLSDILRVNTEITKAPLSASMIKRYDEHHQDLTLLKALVRQQLPEKYKEIFFDQSKNGYAGYIDGGASQEEFYKFIKPILEKMDGTEELLVKLNREDLLRKQRTFDNGSIPHQIHLGELHAILRRQEDFYPFLKDNREKIEKILTFRIPYYVGPLARGNSRFAWMTRKSEETITPWNFEEVVDKGASAQSFIERMTNFDKNLPNEKVLPKHSLLYEYFTVYNELTKVKYVTEGMRKPAFLSGEQKKAIVDLLFKTNRKVTVKQLKEDYFKKIECFDSVEISGVEDRFNASLGTYHDLLKIIKDKDFLDNEENEDILEDIVLTLTLFEDREMIEERLKTYAHLFDDKVMKQLKRRRYTGWGRLSRKLINGIRDKQSGKTILDFLKSDGFANRNFMQLIHDDSLTFKEDIQKAQVSGQGDSLHEHIANLAGSPAIKKGILQTVKVVDELVKVMGRHKPENIVIEMARENQTTQKGQKNSRERMKRIEEGIKELGSQILKEHPVENTQLQNEKLYLYYLQNGRDMYVDQELDINRLSDYDVDHIVPQSFLKDDSIDNKVLTRSDKARGKSDNVPSEEVVKKMKNYWRQLLNAKLITQRKFDNLTKAERGGLSELDKAGFIKRQLVETRQITKHVAQILDSRMNTKYDENDKLIREVKVITLKSKLVSDFRKDFQFYKVREINNYHHAHDAYLNAVVGTALIKKYPKLESEFVYGDYKVYDVRKMIAKSEQEIGKATAKYFFYSNIMNFFKTEITLANGEIRKRPLIETNGETGEIVWDKGRDFATVRKVLSMPQVNIVKKTEVQTGGFSKESILPKRNSDKLIARKKDWDPKKYGGFDSPTVAYSVLVVAKVEKGKSKKLKSVKELLGITIMERSSFEKNPIDFLEAKGYKEVKKDLIIKLPKYSLFELENGRKRMLASAGELQKGNELALPSKYVNFLYLASHYEKLKGSPEDNEQKQLFVEQHKHYLDEIIEQISEFSKRVILADANLDKVLSAYNKHRDKPIREQAENIIHLFTLTNLGAPAAFKYFDTTIDRKRYTSTKEVLDATLIHQSITGLYETRIDLSQLGGDGGPAPGGSGGGGGTVSLQDEHRLFDIPVTTSLPDVWLQDFPQAWAETGGLGRAKCQAPIIIDLKPTAVPVSIKQYPMSLEAHMGIRQHIIKFLELGVLRPCRSPWNTPLLPVKKPGTQDYRPVQDLREINKRTVDIHPTVPNPYNLLSTLKPDYSWYTVLDLKDAFFCLPLAPQSQELFAFEWKDPERGISGQLTWTRLPQGFKNSPTLFNEALHRDLTDFRTQHPEVTLLQYVDDLLLAAPTKKACTQGTRHLLQELGEKGYRASAKKAQICQTKVTYLGYILSEGKRWLTPGRIETVARIPPPRNPREVREFLGKAGFCRLFIPGFAELAAPLYALTKPSTPFTWQTEHQLAFEALKKALLSAPALGLPDTSKPFTLFLDERQGIAKGVLTQKLGPWKRPVAYLSKKLDPVAAGWPPCLRIMAATAMLVKDSAKLTLGQPLTVITPHTLEAIVRQPPDRWITNARLTHYQALLLDTDRVQFGPPVTLNPATLLPVPENQPSPHDCRQVLAETHGTREDLKDQELPDADHTWYTDGSSYLDSGTRRAGAAVVDGHNTIWAQSLPPGTSAQKAELIALTKALELSKGKKANIYTDSRYAFATAHTHGSIYERRGWLTSEGKEIKNKAEIIALLKALFLPQEVAIIHCPGHQKGQDPVAVGNRQADRVARQAAMAEVLTLATEPDNTSHITAGKRTADGSEFEKRTADGSEFESPKKKAKVE

SEQ ID NO: 2011 - protein, 2100 aa, synthetic construct
MPAAKRVKLDGGDKKYSIGLDIGTNSVGWAVITDEYKVPSKKFKVLGNTDRHSIKKNLIGALLFDSGETAEATRLKRTARRRYTRRKNRICYLQEIFSNEMAKVDDSFFHRLEESFLVEEDKKHERHPIFGNIVDEVAYHEKYPTIYHLRKKLVDSTDKADLRLIYLALAHMIKFRGHFLIEGDLNPDNSDVDKLFIQLVQTYNQLFEENPINASGVDAKAILSARLSKSRRLENLIAQLPGEKKNGLFGNLIALSLGLTPNFKSNFDLAEDAKLQLSKDTYDDDLDNLLAQIGDQYADLFLAAKNLSDAILLSDILRVNTEITKAPLSASMIKRYDEHHQDLTLLKALVRQQLPEKYKEIFFDQSKNGYAGYIDGGASQEEFYKFIKPILEKMDGTEELLVKLNREDLLRKQRTFDNGSIPHQIHLGELHAILRRQEDFYPFLKDNREKIEKILTFRIPYYVGPLARGNSRFAWMTRKSEETITPWNFEEVVDKGASAQSFIERMTNFDKNLPNEKVLPKHSLLYEYFTVYNELTKVKYVTEGMRKPAFLSGEQKKAIVDLLFKTNRKVTVKQLKEDYFKKIECFDSVEISGVEDRFNASLGTYHDLLKIIKDKDFLDNEENEDILEDIVLTLTLFEDREMIEERLKTYAHLFDDKVMKQLKRRRYTGWGRLSRKLINGIRDKQSGKTILDFLKSDGFANRNFMQLIHDDSLTFKEDIQKAQVSGQGDSLHEHIANLAGSPAIKKGILQTVKVVDELVKVMGRHKPENIVIEMARENQTTQKGQKNSRERMKRIEEGIKELGSQILKEHPVENTQLQNEKLYLYYLQNGRDMYVDQELDINRLSDYDVDHIVPQSFLKDDSIDNKVLTRSDKARGKSDNVPSEEVVKKMKNYWRQLLNAKLITQRKFDNLTKAERGGLSELDKAGFIKRQLVETRQITKHVAQILDSRMNTKYDENDKLIREVKVITLKSKLVSDFRKDFQFYKVREINNYHHAHDAYLNAVVGTALIKKYPKLESEFVYGDYKVYDVRKMIAKSEQEIGKATAKYFFYSNIMNFFKTEITLANGEIRKRPLIETNGETGEIVWDKGRDFATVRKVLSMPQVNIVKKTEVQTGGFSKESILPKRNSDKLIARKKDWDPKKYGGFDSPTVAYSVLVVAKVEKGKSKKLKSVKELLGITIMERSSFEKNPIDFLEAKGYKEVKKDLIIKLPKYSLFELENGRKRMLASAGELQKGNELALPSKYVNFLYLASHYEKLKGSPEDNEQKQLFVEQHKHYLDEIIEQISEFSKRVILADANLDKVLSAYNKHRDKPIREQAENIIHLFTLTNLGAPAAFKYFDTTIDRKRYTSTKEVLDATLIHQSITGLYETRIDLSQLGGDGGGGGPAPGGSGGTVSLQDEHRLFDIPVTTSLPDVWLQDFPQAWAETGGLGRAKCQAPIIIDLKPTAVPVSIKQYPMSLEAHMGIRQHIIKFLELGVLRPCRSPWNTPLLPVKKPGTQDYRPVQDLREINKRTVDIHPTVPNPYNLLSTLKPDYSWYTVLDLKDAFFCLPLAPQSQELFAFEWKDPERGISGQLTWTRLPQGFKNSPTLFNEALHRDLTDFRTQHPEVTLLQYVDDLLLAAPTKKACTQGTRHLLQELGEKGYRASAKKAQICQTKVTYLGYILSEGKRWLTPGRIETVARIPPPRNPREVREFLGKAGFCRLFIPGFAELAAPLYALTKPSTPFTWQTEHQLAFEALKKALLSAPALGLPDTSKPFTLFLDERQGIAKGVLTQKLGPWKRPVAYLSKKLDPVAAGWPPCLRIMAATAMLVKDSAKLTLGQPLTVITPHTLEAIVRQPPDRWITNARLTHYQALLLDTDRVQFGPPVTLNPATLLPVPENQPSPHDCRQVLAETHGTREDLKDQELPDADHTWYTDGSSYLDSGTRRAGAAVVDGHNTIWAQSLPPGTSAQKAELIALTKALELSKGKKANIYTDSRYAFATAHTHGSIYERRGWLTSEGKEIKNKAEIIALLKALFLPQEVAIIHCPGHQKGQDPVAVGNRQADRVARQAAMAEVLTLATEPDNTSHITAGKRTADGSEFEKRTADGSEFESPKKKAKVE

SEQ ID NO: 2012 - protein, 2099 aa, synthetic construct
MPAAKRVKLDGGDKKYSIGLDIGTNSVGWAVITDEYKVPSKKFKVLGNTDRHSIKKNLIGALLFDSGETAEATRLKRTARRRYTRRKNRICYLQEIFSNEMAKVDDSFFHRLEESFLVEEDKKHERHPIFGNIVDEVAYHEKYPTIYHLRKKLVDSTDKADLRLIYLALAHMIKFRGHFLIEGDLNPDNSDVDKLFIQLVQTYNQLFEENPINASGVDAKAILSARLSKSRRLENLIAQLPGEKKNGLFGNLIALSLGLTPNFKSNFDLAEDAKLQLSKDTYDDDLDNLLAQIGDQYADLFLAAKNLSDAILLSDILRVNTEITKAPLSASMIKRYDEHHQDLTLLKALVRQQLPEKYKEIFFDQSKNGYAGYIDGGASQEEFYKFIKPILEKMDGTEELLVKLNREDLLRKQRTFDNGSIPHQIHLGELHAILRRQEDFYPFLKDNREKIEKILTFRIPYYVGPLARGNSRFAWMTRKSEETITPWNFEEVVDKGASAQSFIERMTNFDKNLPNEKVLPKHSLLYEYFTVYNELTKVKYVTEGMRKPAFLSGEQKKAIVDLLFKTNRKVTVKQLKEDYFKKIECFDSVEISGVEDRFNASLGTYHDLLKIIKDKDFLDNEENEDILEDIVLTLTLFEDREMIEERLKTYAHLFDDKVMKQLKRRRYTGWGRLSRKLINGIRDKQSGKTILDFLKSDGFANRNFMQLIHDDSLTFKEDIQKAQVSGQGDSLHEHIANLAGSPAIKKGILQTVKVVDELVKVMGRHKPENIVIEMARENQTTQKGQKNSRERMKRIEEGIKELGSQILKEHPVENTQLQNEKLYLYYLQNGRDMYVDQELDINRLSDYDVDHIVPQSFLKDDSIDNKVLTRSDKARGKSDNVPSEEVVKKMKNYWRQLLNAKLITQRKFDNLTKAERGGLSELDKAGFIKRQLVETRQITKHVAQILDSRMNTKYDENDKLIREVKVITLKSKLVSDFRKDFQFYKVREINNYHHAHDAYLNAVVGTALIKKYPKLESEFVYGDYKVYDVRKMIAKSEQEIGKATAKYFFYSNIMNFFKTEITLANGEIRKRPLIETNGETGEIVWDKGRDFATVRKVLSMPQVNIVKKTEVQTGGFSKESILPKRNSDKLIARKKDWDPKKYGGFDSPTVAYSVLVVAKVEKGKSKKLKSVKELLGITIMERSSFEKNPIDFLEAKGYKEVKKDLIIKLPKYSLFELENGRKRMLASAGELQKGNELALPSKYVNFLYLASHYEKLKGSPEDNEQKQLFVEQHKHYLDEIIEQISEFSKRVILADANLDKVLSAYNKHRDKPIREQAENIIHLFTLTNLGAPAAFKYFDTTIDRKRYTSTKEVLDATLIHQSITGLYETRIDLSQLGGDGGEAAAKGGSGGTVSLQDEHRLFDIPVTTSLPDVWLQDFPQAWAETGGLGRAKCQAPIIIDLKPTAVPVSIKQYPMSLEAHMGIRQHIIKFLELGVLRPCRSPWNTPLLPVKKPGTQDYRPVQDLREINKRTVDIHPTVPNPYNLLSTLKPDYSWYTVLDLKDAFFCLPLAPQSQELFAFEWKDPERGISGQLTWTRLPQGFKNSPTLFNEALHRDLTDFRTQHPEVTLLQYVDDLLLAAPTKKACTQGTRHLLQELGEKGYRASAKKAQICQTKVTYLGYILSEGKRWLTPGRIETVARIPPPRNPREVREFLGKAGFCRLFIPGFAELAAPLYALTKPSTPFTWQTEHQLAFEALKKALLSAPALGLPDTSKPFTLFLDERQGIAKGVLTQKLGPWKRPVAYLSKKLDPVAAGWPPCLRIMAATAMLVKDSAKLTLGQPLTVITPHTLEAIVRQPPDRWITNARLTHYQALLLDTDRVQFGPPVTLNPATLLPVPENQPSPHDCRQVLAETHGTREDLKDQELPDADHTWYTDGSSYLDSGTRRAGAAVVDGHNTIWAQSLPPGTSAQKAELIALTKALELSKGKKANIYTDSRYAFATAHTHGSIYERRGWLTSEGKEIKNKAEIIALLKALFLPQEVAIIHCPGHQKGQDPVAVGNRQADRVARQAAMAEVLTLATEPDNTSHITAGKRTADGSEFEKRTADGSEFESPKKKAKVE

SEQ ID NO: 2013 - protein, 2100 aa, synthetic construct
MPAAKRVKLDGGDKKYSIGLDIGTNSVGWAVITDEYKVPSKKFKVLGNTDRHSIKKNLIGALLFDSGETAEATRLKRTARRRYTRRKNRICYLQEIFSNEMAKVDDSFFHRLEESFLVEEDKKHERHPIFGNIVDEVAYHEKYPTIYHLRKKLVDSTDKADLRLIYLALAHMIKFRGHFLIEGDLNPDNSDVDKLFIQLVQTYNQLFEENPINASGVDAKAILSARLSKSRRLENLIAQLPGEKKNGLFGNLIALSLGLTPNFKSNFDLAEDAKLQLSKDTYDDDLDNLLAQIGDQYADLFLAAKNLSDAILLSDILRVNTEITKAPLSASMIKRYDEHHQDLTLLKALVRQQLPEKYKEIFFDQSKNGYAGYIDGGASQEEFYKFIKPILEKMDGTEELLVKLNREDLLRKQRTFDNGSIPHQIHLGELHAILRRQEDFYPFLKDNREKIEKILTFRIPYYVGPLARGNSRFAWMTRKSEETITPWNFEEVVDKGASAQSFIERMTNFDKNLPNEKVLPKHSLLYEYFTVYNELTKVKYVTEGMRKPAFLSGEQKKAIVDLLFKTNRKVTVKQLKEDYFKKIECFDSVEISGVEDRFNASLGTYHDLLKIIKDKDFLDNEENEDILEDIVLTLTLFEDREMIEERLKTYAHLFDDKVMKQLKRRRYTGWGRLSRKLINGIRDKQSGKTILDFLKSDGFANRNFMQLIHDDSLTFKEDIQKAQVSGQGDSLHEHIANLAGSPAIKKGILQTVKVVDELVKVMGRHKPENIVIEMARENQTTQKGQKNSRERMKRIEEGIKELGSQILKEHPVENTQLQNEKLYLYYLQNGRDMYVDQELDINRLSDYDVDHIVPQSFLKDDSIDNKVLTRSDKARGKSDNVPSEEVVKKMKNYWRQLLNAKLITQRKFDNLTKAERGGLSELDKAGFIKRQLVETRQITKHVAQILDSRMNTKYDENDKLIREVKVITLKSKLVSDFRKDFQFYKVREINNYHHAHDAYLNAVVGTALIKKYPKLESEFVYGDYKVYDVRKMIAKSEQEIGKATAKYFFYSNIMNFFKTEITLANGEIRKRPLIETNGETGEIVWDKGRDFATVRKVLSMPQVNIVKKTEVQTGGFSKESILPKRNSDKLIARKKDWDPKKYGGFDSPTVAYSVLVVAKVEKGKSKKLKSVKELLGITIMERSSFEKNPIDFLEAKGYKEVKKDLIIKLPKYSLFELENGRKRMLASAGELQKGNELALPSKYVNFLYLASHYEKLKGSPEDNEQKQLFVEQHKHYLDEIIEQISEFSKRVILADANLDKVLSAYNKHRDKPIREQAENIIHLFTLTNLGAPAAFKYFDTTIDRKRYTSTKEVLDATLIHQSITGLYETRIDLSQLGGDGGPAPGGGGSSGGTVSLQDEHRLFDIPVTTSLPDVWLQDFPQAWAETGGLGRAKCQAPIIIDLKPTAVPVSIKQYPMSLEAHMGIRQHIIKFLELGVLRPCRSPWNTPLLPVKKPGTQDYRPVQDLREINKRTVDIHPTVPNPYNLLSTLKPDYSWYTVLDLKDAFFCLPLAPQSQELFAFEWKDPERGISGQLTWTRLPQGFKNSPTLFNEALHRDLTDFRTQHPEVTLLQYVDDLLLAAPTKKACTQGTRHLLQELGEKGYRASAKKAQICQTKVTYLGYILSEGKRWLTPGRIETVARIPPPRNPREVREFLGKAGFCRLFIPGFAELAAPLYALTKPSTPFTWQTEHQLAFEALKKALLSAPALGLPDTSKPFTLFLDERQGIAKGVLTQKLGPWKRPVAYLSKKLDPVAAGWPPCLRIMAATAMLVKDSAKLTLGQPLTVITPHTLEAIVRQPPDRWITNARLTHYQALLLDTDRVQFGPPVTLNPATLLPVPENQPSPHDCRQVLAETHGTREDLKDQELPDADHTWYTDGSSYLDSGTRRAGAAVVDGHNTIWAQSLPPGTSAQKAELIALTKALELSKGKKANIYTDSRYAFATAHTHGSIYERRGWLTSEGKEIKNKAEIIALLKALFLPQEVAIIHCPGHQKGQDPVAVGNRQADRVARQAAMAEVLTLATEPDNTSHITAGKRTADGSEFEKRTADGSEFESPKKKAKVE

SEQ ID NO: 2014 - protein, 2102 aa, synthetic construct
MPAAKRVKLDGGDKKYSIGLDIGTNSVGWAVITDEYKVPSKKFKVLGNTDRHSIKKNLIGALLFDSGETAEATRLKRTARRRYTRRKNRICYLQEIFSNEMAKVDDSFFHRLEESFLVEEDKKHERHPIFGNIVDEVAYHEKYPTIYHLRKKLVDSTDKADLRLIYLALAHMIKFRGHFLIEGDLNPDNSDVDKLFIQLVQTYNQLFEENPINASGVDAKAILSARLSKSRRLENLIAQLPGEKKNGLFGNLIALSLGLTPNFKSNFDLAEDAKLQLSKDTYDDDLDNLLAQIGDQYADLFLAAKNLSDAILLSDILRVNTEITKAPLSASMIKRYDEHHQDLTLLKALVRQQLPEKYKEIFFDQSKNGYAGYIDGGASQEEFYKFIKPILEKMDGTEELLVKLNREDLLRKQRTFDNGSIPHQIHLGELHAILRRQEDFYPFLKDNREKIEKILTFRIPYYVGPLARGNSRFAWMTRKSEETITPWNFEEVVDKGASAQSFIERMTNFDKNLPNEKVLPKHSLLYEYFTVYNELTKVKYVTEGMRKPAFLSGEQKKAIVDLLFKTNRKVTVKQLKEDYFKKIECFDSVEISGVEDRFNASLGTYHDLLKIIKDKDFLDNEENEDILEDIVLTLTLFEDREMIEERLKTYAHLFDDKVMKQLKRRRYTGWGRLSRKLINGIRDKQSGKTILDFLKSDGFANRNFMQLIHDDSLTFKEDIQKAQVSGQGDSLHEHIANLAGSPAIKKGILQTVKVVDELVKVMGRHKPENIVIEMARENQTTQKGQKNSRERMKRIEEGIKELGSQILKEHPVENTQLQNEKLYLYYLQNGRDMYVDQELDINRLSDYDVDHIVPQSFLKDDSIDNKVLTRSDKARGKSDNVPSEEVVKKMKNYWRQLLNAKLITQRKFDNLTKAERGGLSELDKAGFIKRQLVETRQITKHVAQILDSRMNTKYDENDKLIREVKVITLKSKLVSDFRKDFQFYKVREINNYHHAHDAYLNAVVGTALIKKYPKLESEFVYGDYKVYDVRKMIAKSEQEIGKATAKYFFYSNIMNFFKTEITLANGEIRKRPLIETNGETGEIVWDKGRDFATVRKVLSMPQVNIVKKTEVQTGGFSKESILPKRNSDKLIARKKDWDPKKYGGFDSPTVAYSVLVVAKVEKGKSKKLKSVKELLGITIMERSSFEKNPIDFLEAKGYKEVKKDLIIKLPKYSLFELENGRKRMLASAGELQKGNELALPSKYVNFLYLASHYEKLKGSPEDNEQKQLFVEQHKHYLDEIIEQISEFSKRVILADANLDKVLSAYNKHRDKPIREQAENIIHLFTLTNLGAPAAFKYFDTTIDRKRYTSTKEVLDATLIHQSITGLYETRIDLSQLGGDGGEAAAKGSSGGGGGTVSLQDEHRLFDIPVTTSLPDVWLQDFPQAWAETGGLGRAKCQAPIIIDLKPTAVPVSIKQYPMSLEAHMGIRQHIIKFLELGVLRPCRSPWNTPLLPVKKPGTQDYRPVQDLREINKRTVDIHPTVPNPYNLLSTLKPDYSWYTVLDLKDAFFCLPLAPQSQELFAFEWKDPERGISGQLTWTRLPQGFKNSPTLFNEALHRDLTDFRTQHPEVTLLQYVDDLLLAAPTKKACTQGTRHLLQELGEKGYRASAKKAQICQTKVTYLGYILSEGKRWLTPGRIETVARIPPPRNPREVREFLGKAGFCRLFIPGFAELAAPLYALTKPSTPFTWQTEHQLAFEALKKALLSAPALGLPDTSKPFTLFLDERQGIAKGVLTQKLGPWKRPVAYLSKKLDPVAAGWPPCLRIMAATAMLVKDSAKLTLGQPLTVITPHTLEAIVRQPPDRWITNARLTHYQALLLDTDRVQFGPPVTLNPATLLPVPENQPSPHDCRQVLAETHGTREDLKDQELPDADHTWYTDGSSYLDSGTRRAGAAVVDGHNTIWAQSLPPGTSAQKAELIALTKALELSKGKKANIYTDSRYAFATAHTHGSIYERRGWLTSEGKEIKNKAEIIALLKALFLPQEVAIIHCPGHQKGQDPVAVGNRQADRVARQAAMAEVLTLATEPDNTSHITAGKRTADGSEFEKRTADGSEFESPKKKAKVE

SEQ ID NO: 2015 - protein, 2100 aa, synthetic construct
MPAAKRVKLDGGDKKYSIGLDIGTNSVGWAVITDEYKVPSKKFKVLGNTDRHSIKKNLIGALLFDSGETAEATRLKRTARRRYTRRKNRICYLQEIFSNEMAKVDDSFFHRLEESFLVEEDKKHERHPIFGNIVDEVAYHEKYPTIYHLRKKLVDSTDKADLRLIYLALAHMIKFRGHFLIEGDLNPDNSDVDKLFIQLVQTYNQLFEENPINASGVDAKAILSARLSKSRRLENLIAQLPGEKKNGLFGNLIALSLGLTPNFKSNFDLAEDAKLQLSKDTYDDDLDNLLAQIGDQYADLFLAAKNLSDAILLSDILRVNTEITKAPLSASMIKRYDEHHQDLTLLKALVRQQLPEKYKEIFFDQSKNGYAGYIDGGASQEEFYKFIKPILEKMDGTEELLVKLNREDLLRKQRTFDNGSIPHQIHLGELHAILRRQEDFYPFLKDNREKIEKILTFRIPYYVGPLARGNSRFAWMTRKSEETITPWNFEEVVDKGASAQSFIERMTNFDKNLPNEKVLPKHSLLYEYFTVYNELTKVKYVTEGMRKPAFLSGEQKKAIVDLLFKTNRKVTVKQLKEDYFKKIECFDSVEISGVEDRFNASLGTYHDLLKIIKDKDFLDNEENEDILEDIVLTLTLFEDREMIEERLKTYAHLFDDKVMKQLKRRRYTGWGRLSRKLINGIRDKQSGKTILDFLKSDGFANRNFMQLIHDDSLTFKEDIQKAQVSGQGDSLHEHIANLAGSPAIKKGILQTVKVVDELVKVMGRHKPENIVIEMARENQTTQKGQKNSRERMKRIEEGIKELGSQILKEHPVENTQLQNEKLYLYYLQNGRDMYVDQELDINRLSDYDVDHIVPQSFLKDDSIDNKVLTRSDKARGKSDNVPSEEVVKKMKNYWRQLLNAKLITQRKFDNLTKAERGGLSELDKAGFIKRQLVETRQITKHVAQILDSRMNTKYDENDKLIREVKVITLKSKLVSDFRKDFQFYKVREINNYHHAHDAYLNAVVGTALIKKYPKLESEFVYGDYKVYDVRKMIAKSEQEIGKATAKYFFYSNIMNFFKTEITLANGEIRKRPLIETNGETGEIVWDKGRDFATVRKVLSMPQVNIVKKTEVQTGGFSKESILPKRNSDKLIARKKDWDPKKYGGFDSPTVAYSVLVVAKVEKGKSKKLKSVKELLGITIMERSSFEKNPIDFLEAKGYKEVKKDLIIKLPKYSLFELENGRKRMLASAGELQKGNELALPSKYVNFLYLASHYEKLKGSPEDNEQKQLFVEQHKHYLDEIIEQISEFSKRVILADANLDKVLSAYNKHRDKPIREQAENIIHLFTLTNLGAPAAFKYFDTTIDRKRYTSTKEVLDATLIHQSITGLYETRIDLSQLGGDGGPAPGGGGGSGGTVSLQDEHRLFDIPVTTSLPDVWLQDFPQAWAETGGLGRAKCQAPIIIDLKPTAVPVSIKQYPMSLEAHMGIRQHIIKFLELGVLRPCRSPWNTPLLPVKKPGTQDYRPVQDLREINKRTVDIHPTVPNPYNLLSTLKPDYSWYTVLDLKDAFFCLPLAPQSQELFAFEWKDPERGISGQLTWTRLPQGFKNSPTLFNEALHRDLTDFRTQHPEVTLLQYVDDLLLAAPTKKACTQGTRHLLQELGEKGYRASAKKAQICQTKVTYLGYILSEGKRWLTPGRIETVARIPPPRNPREVREFLGKAGFCRLFIPGFAELAAPLYALTKPSTPFTWQTEHQLAFEALKKALLSAPALGLPDTSKPFTLFLDERQGIAKGVLTQKLGPWKRPVAYLSKKLDPVAAGWPPCLRIMAATAMLVKDSAKLTLGQPLTVITPHTLEAIVRQPPDRWITNARLTHYQALLLDTDRVQFGPPVTLNPATLLPVPENQPSPHDCRQVLAETHGTREDLKDQELPDADHTWYTDGSSYLDSGTRRAGAAVVDGHNTIWAQSLPPGTSAQKAELIALTKALELSKGKKANIYTDSRYAFATAHTHGSIYERRGWLTSEGKEIKNKAEIIALLKALFLPQEVAIIHCPGHQKGQDPVAVGNRQADRVARQAAMAEVLTLATEPDNTSHITAGKRTADGSEFEKRTADGSEFESPKKKAKVE

SEQ ID NO: 2016 - protein, 2095 aa, synthetic construct
MPAAKRVKLDGGDKKYSIGLDIGTNSVGWAVITDEYKVPSKKFKVLGNTDRHSIKKNLIGALLFDSGETAEATRLKRTARRRYTRRKNRICYLQEIFSNEMAKVDDSFFHRLEESFLVEEDKKHERHPIFGNIVDEVAYHEKYPTIYHLRKKLVDSTDKADLRLIYLALAHMIKFRGHFLIEGDLNPDNSDVDKLFIQLVQTYNQLFEENPINASGVDAKAILSARLSKSRRLENLIAQLPGEKKNGLFGNLIALSLGLTPNFKSNFDLAEDAKLQLSKDTYDDDLDNLLAQIGDQYADLFLAAKNLSDAILLSDILRVNTEITKAPLSASMIKRYDEHHQDLTLLKALVRQQLPEKYKEIFFDQSKNGYAGYIDGGASQEEFYKFIKPILEKMDGTEELLVKLNREDLLRKQRTFDNGSIPHQIHLGELHAILRRQEDFYPFLKDNREKIEKILTFRIPYYVGPLARGNSRFAWMTRKSEETITPWNFEEVVDKGASAQSFIERMTNFDKNLPNEKVLPKHSLLYEYFTVYNELTKVKYVTEGMRKPAFLSGEQKKAIVDLLFKTNRKVTVKQLKEDYFKKIECFDSVEISGVEDRFNASLGTYHDLLKIIKDKDFLDNEENEDILEDIVLTLTLFEDREMIEERLKTYAHLFDDKVMKQLKRRRYTGWGRLSRKLINGIRDKQSGKTILDFLKSDGFANRNFMQLIHDDSLTFKEDIQKAQVSGQGDSLHEHIANLAGSPAIKKGILQTVKVVDELVKVMGRHKPENIVIEMARENQTTQKGQKNSRERMKRIEEGIKELGSQILKEHPVENTQLQNEKLYLYYLQNGRDMYVDQELDINRLSDYDVDHIVPQSFLKDDSIDNKVLTRSDKARGKSDNVPSEEVVKKMKNYWRQLLNAKLITQRKFDNLTKAERGGLSELDKAGFIKRQLVETRQITKHVAQILDSRMNTKYDENDKLIREVKVITLKSKLVSDFRKDFQFYKVREINNYHHAHDAYLNAVVGTALIKKYPKLESEFVYGDYKVYDVRKMIAKSEQEIGKATAKYFFYSNIMNFFKTEITLANGEIRKRPLIETNGETGEIVWDKGRDFATVRKVLSMPQVNIVKKTEVQTGGFSKESILPKRNSDKLIARKKDWDPKKYGGFDSPTVAYSVLVVAKVEKGKSKKLKSVKELLGITIMERSSFEKNPIDFLEAKGYKEVKKDLIIKLPKYSLFELENGRKRMLASAGELQKGNELALPSKYVNFLYLASHYEKLKGSPEDNEQKQLFVEQHKHYLDEIIEQISEFSKRVILADANLDKVLSAYNKHRDKPIREQAENIIHLFTLTNLGAPAAFKYFDTTIDRKRYTSTKEVLDATLIHQSITGLYETRIDLSQLGGDGGGGGGGGTVSLQDEHRLFDIPVTTSLPDVWLQDFPQAWAETGGLGRAKCQAPIIIDLKPTAVPVSIKQYPMSLEAHMGIRQHIIKFLELGVLRPCRSPWNTPLLPVKKPGTQDYRPVQDLREINKRTVDIHPTVPNPYNLLSTLKPDYSWYTVLDLKDAFFCLPLAPQSQELFAFEWKDPERGISGQLTWTRLPQGFKNSPTLFNEALHRDLTDFRTQHPEVTLLQYVDDLLLAAPTKKACTQGTRHLLQELGEKGYRASAKKAQICQTKVTYLGYILSEGKRWLTPGRIETVARIPPPRNPREVREFLGKAGFCRLFIPGFAELAAPLYALTKPSTPFTWQTEHQLAFEALKKALLSAPALGLPDTSKPFTLFLDERQGIAKGVLTQKLGPWKRPVAYLSKKLDPVAAGWPPCLRIMAATAMLVKDSAKLTLGQPLTVITPHTLEAIVRQPPDRWITNARLTHYQALLLDTDRVQFGPPVTLNPATLLPVPENQPSPHDCRQVLAETHGTREDLKDQELPDADHTWYTDGSSYLDSGTRRAGAAVVDGHNTIWAQSLPPGTSAQKAELIALTKALELSKGKKANIYTDSRYAFATAHTHGSIYERRGWLTSEGKEIKNKAEIIALLKALFLPQEVAIIHCPGHQKGQDPVAVGNRQADRVARQAAMAEVLTLATEPDNTSHITAGKRTADGSEFEKRTADGSEFESPKKKAKVE

SEQ ID NO: 2017 - protein, 2102 aa, synthetic construct
MPAAKRVKLDGGDKKYSIGLDIGTNSVGWAVITDEYKVPSKKFKVLGNTDRHSIKKNLIGALLFDSGETAEATRLKRTARRRYTRRKNRICYLQEIFSNEMAKVDDSFFHRLEESFLVEEDKKHERHPIFGNIVDEVAYHEKYPTIYHLRKKLVDSTDKADLRLIYLALAHMIKFRGHFLIEGDLNPDNSDVDKLFIQLVQTYNQLFEENPINASGVDAKAILSARLSKSRRLENLIAQLPGEKKNGLFGNLIALSLGLTPNFKSNFDLAEDAKLQLSKDTYDDDLDNLLAQIGDQYADLFLAAKNLSDAILLSDILRVNTEITKAPLSASMIKRYDEHHQDLTLLKALVRQQLPEKYKEIFFDQSKNGYAGYIDGGASQEEFYKFIKPILEKMDGTEELLVKLNREDLLRKQRTFDNGSIPHQIHLGELHAILRRQEDFYPFLKDNREKIEKILTFRIPYYVGPLARGNSRFAWMTRKSEETITPWNFEEVVDKGASAQSFIERMTNFDKNLPNEKVLPKHSLLYEYFTVYNELTKVKYVTEGMRKPAFLSGEQKKAIVDLLFKTNRKVTVKQLKEDYFKKIECFDSVEISGVEDRFNASLGTYHDLLKIIKDKDFLDNEENEDILEDIVLTLTLFEDREMIEERLKTYAHLFDDKVMKQLKRRRYTGWGRLSRKLINGIRDKQSGKTILDFLKSDGFANRNFMQLIHDDSLTFKEDIQKAQVSGQGDSLHEHIANLAGSPAIKKGILQTVKVVDELVKVMGRHKPENIVIEMARENQTTQKGQKNSRERMKRIEEGIKELGSQILKEHPVENTQLQNEKLYLYYLQNGRDMYVDQELDINRLSDYDVDHIVPQSFLKDDSIDNKVLTRSDKARGKSDNVPSEEVVKKMKNYWRQLLNAKLITQRKFDNLTKAERGGLSELDKAGFIKRQLVETRQITKHVAQILDSRMNTKYDENDKLIREVKVITLKSKLVSDFRKDFQFYKVREINNYHHAHDAYLNAVVGTALIKKYPKLESEFVYGDYKVYDVRKMIAKSEQEIGKATAKYFFYSNIMNFFKTEITLANGEIRKRPLIETNGETGEIVWDKGRDFATVRKVLSMPQVNIVKKTEVQTGGFSKESILPKRNSDKLIARKKDWDPKKYGGFDSPTVAYSVLVVAKVEKGKSKKLKSVKELLGITIMERSSFEKNPIDFLEAKGYKEVKKDLIIKLPKYSLFELENGRKRMLASAGELQKGNELALPSKYVNFLYLASHYEKLKGSPEDNEQKQLFVEQHKHYLDEIIEQISEFSKRVILADANLDKVLSAYNKHRDKPIREQAENIIHLFTLTNLGAPAAFKYFDTTIDRKRYTSTKEVLDATLIHQSITGLYETRIDLSQLGGDGGGGGEAAAKGSSGGTVSLQDEHRLFDIPVTTSLPDVWLQDFPQAWAETGGLGRAKCQAPIIIDLKPTAVPVSIKQYPMSLEAHMGIRQHIIKFLELGVLRPCRSPWNTPLLPVKKPGTQDYRPVQDLREINKRTVDIHPTVPNPYNLLSTLKPDYSWYTVLDLKDAFFCLPLAPQSQELFAFEWKDPERGISGQLTWTRLPQGFKNSPTLFNEALHRDLTDFRTQHPEVTLLQYVDDLLLAAPTKKACTQGTRHLLQELGEKGYRASAKKAQICQTKVTYLGYILSEGKRWLTPGRIETVARIPPPRNPREVREFLGKAGFCRLFIPGFAELAAPLYALTKPSTPFTWQTEHQLAFEALKKALLSAPALGLPDTSKPFTLFLDERQGIAKGVLTQKLGPWKRPVAYLSKKLDPVAAGWPPCLRIMAATAMLVKDSAKLTLGQPLTVITPHTLEAIVRQPPDRWITNARLTHYQALLLDTDRVQFGPPVTLNPATLLPVPENQPSPHDCRQVLAETHGTREDLKDQELPDADHTWYTDGSSYLDSGTRRAGAAVVDGHNTIWAQSLPPGTSAQKAELIALTKALELSKGKKANIYTDSRYAFATAHTHGSIYERRGWLTSEGKEIKNKAEIIALLKALFLPQEVAIIHCPGHQKGQDPVAVGNRQADRVARQAAMAEVLTLATEPDNTSHITAGKRTADGSEFEKRTADGSEFESPKKKAKVE

SEQ ID NO: 2018 - protein, 2104 aa, synthetic construct
MPAAKRVKLDGGDKKYSIGLDIGTNSVGWAVITDEYKVPSKKFKVLGNTDRHSIKKNLIGALLFDSGETAEATRLKRTARRRYTRRKNRICYLQEIFSNEMAKVDDSFFHRLEESFLVEEDKKHERHPIFGNIVDEVAYHEKYPTIYHLRKKLVDSTDKADLRLIYLALAHMIKFRGHFLIEGDLNPDNSDVDKLFIQLVQTYNQLFEENPINASGVDAKAILSARLSKSRRLENLIAQLPGEKKNGLFGNLIALSLGLTPNFKSNFDLAEDAKLQLSKDTYDDDLDNLLAQIGDQYADLFLAAKNLSDAILLSDILRVNTEITKAPLSASMIKRYDEHHQDLTLLKALVRQQLPEKYKEIFFDQSKNGYAGYIDGGASQEEFYKFIKPILEKMDGTEELLVKLNREDLLRKQRTFDNGSIPHQIHLGELHAILRRQEDFYPFLKDNREKIEKILTFRIPYYVGPLARGNSRFAWMTRKSEETITPWNFEEVVDKGASAQSFIERMTNFDKNLPNEKVLPKHSLLYEYFTVYNELTKVKYVTEGMRKPAFLSGEQKKAIVDLLFKTNRKVTVKQLKEDYFKKIECFDSVEISGVEDRFNASLGTYHDLLKIIKDKDFLDNEENEDILEDIVLTLTLFEDREMIEERLKTYAHLFDDKVMKQLKRRRYTGWGRLSRKLINGIRDKQSGKTILDFLKSDGFANRNFMQLIHDDSLTFKEDIQKAQVSGQGDSLHEHIANLAGSPAIKKGILQTVKVVDELVKVMGRHKPENIVIEMARENQTTQKGQKNSRERMKRIEEGIKELGSQILKEHPVENTQLQNEKLYLYYLQNGRDMYVDQELDINRLSDYDVDHIVPQSFLKDDSIDNKVLTRSDKARGKSDNVPSEEVVKKMKNYWRQLLNAKLITQRKFDNLTKAERGGLSELDKAGFIKRQLVETRQITKHVAQILDSRMNTKYDENDKLIREVKVITLKSKLVSDFRKDFQFYKVREINNYHHAHDAYLNAVVGTALIKKYPKLESEFVYGDYKVYDVRKMIAKSEQEIGKATAKYFFYSNIMNFFKTEITLANGEIRKRPLIETNGETGEIVWDKGRDFATVRKVLSMPQVNIVKKTEVQTGGFSKESILPKRNSDKLIARKKDWDPKKYGGFDSPTVAYSVLVVAKVEKGKSKKLKSVKELLGITIMERSSFEKNPIDFLEAKGYKEVKKDLIIKLPKYSLFELENGRKRMLASAGELQKGNELALPSKYVNFLYLASHYEKLKGSPEDNEQKQLFVEQHKHYLDEIIEQISEFSKRVILADANLDKVLSAYNKHRDKPIREQAENIIHLFTLTNLGAPAAFKYFDTTIDRKRYTSTKEVLDATLIHQSITGLYETRIDLSQLGGDGGPAPAPAPAPAPAPGGTVSLQDEHRLFDIPVTTSLPDVWLQDFPQAWAETGGLGRAKCQAPIIIDLKPTAVPVSIKQYPMSLEAHMGIRQHIIKFLELGVLRPCRSPWNTPLLPVKKPGTQDYRPVQDLREINKRTVDIHPTVPNPYNLLSTLKPDYSWYTVLDLKDAFFCLPLAPQSQELFAFEWKDPERGISGQLTWTRLPQGFKNSPTLFNEALHRDLTDFRTQHPEVTLLQYVDDLLLAAPTKKACTQGTRHLLQELGEKGYRASAKKAQICQTKVTYLGYILSEGKRWLTPGRIETVARIPPPRNPREVREFLGKAGFCRLFIPGFAELAAPLYALTKPSTPFTWQTEHQLAFEALKKALLSAPALGLPDTSKPFTLFLDERQGIAKGVLTQKLGPWKRPVAYLSKKLDPVAAGWPPCLRIMAATAMLVKDSAKLTLGQPLTVITPHTLEAIVRQPPDRWITNARLTHYQALLLDTDRVQFGPPVTLNPATLLPVPENQPSPHDCRQVLAETHGTREDLKDQELPDADHTWYTDGSSYLDSGTRRAGAAVVDGHNTIWAQSLPPGTSAQKAELIALTKALELSKGKKANIYTDSRYAFATAHTHGSIYERRGWLTSEGKEIKNKAEIIALLKALFLPQEVAIIHCPGHQKGQDPVAVGNRQADRVARQAAMAEVLTLATEPDNTSHITAGKRTADGSEFEKRTADGSEFESPKKKAKVE

SEQ ID NO: 2019 - protein, 2100 aa, synthetic construct
MPAAKRVKLDGGDKKYSIGLDIGTNSVGWAVITDEYKVPSKKFKVLGNTDRHSIKKNLIGALLFDSGETAEATRLKRTARRRYTRRKNRICYLQEIFSNEMAKVDDSFFHRLEESFLVEEDKKHERHPIFGNIVDEVAYHEKYPTIYHLRKKLVDSTDKADLRLIYLALAHMIKFRGHFLIEGDLNPDNSDVDKLFIQLVQTYNQLFEENPINASGVDAKAILSARLSKSRRLENLIAQLPGEKKNGLFGNLIALSLGLTPNFKSNFDLAEDAKLQLSKDTYDDDLDNLLAQIGDQYADLFLAAKNLSDAILLSDILRVNTEITKAPLSASMIKRYDEHHQDLTLLKALVRQQLPEKYKEIFFDQSKNGYAGYIDGGASQEEFYKFIKPILEKMDGTEELLVKLNREDLLRKQRTFDNGSIPHQIHLGELHAILRRQEDFYPFLKDNREKIEKILTFRIPYYVGPLARGNSRFAWMTRKSEETITPWNFEEVVDKGASAQSFIERMTNFDKNLPNEKVLPKHSLLYEYFTVYNELTKVKYVTEGMRKPAFLSGEQKKAIVDLLFKTNRKVTVKQLKEDYFKKIECFDSVEISGVEDRFNASLGTYHDLLKIIKDKDFLDNEENEDILEDIVLTLTLFEDREMIEERLKTYAHLFDDKVMKQLKRRRYTGWGRLSRKLINGIRDKQSGKTILDFLKSDGFANRNFMQLIHDDSLTFKEDIQKAQVSGQGDSLHEHIANLAGSPAIKKGILQTVKVVDELVKVMGRHKPENIVIEMARENQTTQKGQKNSRERMKRIEEGIKELGSQILKEHPVENTQLQNEKLYLYYLQNGRDMYVDQELDINRLSDYDVDHIVPQSFLKDDSIDNKVLTRSDKARGKSDNVPSEEVVKKMKNYWRQLLNAKLITQRKFDNLTKAERGGLSELDKAGFIKRQLVETRQITKHVAQILDSRMNTKYDENDKLIREVKVITLKSKLVSDFRKDFQFYKVREINNYHHAHDAYLNAVVGTALIKKYPKLESEFVYGDYKVYDVRKMIAKSEQEIGKATAKYFFYSNIMNFFKTEITLANGEIRKRPLIETNGETGEIVWDKGRDFATVRKVLSMPQVNIVKKTEVQTGGFSKESILPKRNSDKLIARKKDWDPKKYGGFDSPTVAYSVLVVAKVEKGKSKKLKSVKELLGITIMERSSFEKNPIDFLEAKGYKEVKKDLIIKLPKYSLFELENGRKRMLASAGELQKGNELALPSKYVNFLYLASHYEKLKGSPEDNEQKQLFVEQHKHYLDEIIEQISEFSKRVILADANLDKVLSAYNKHRDKPIREQAENIIHLFTLTNLGAPAAFKYFDTTIDRKRYTSTKEVLDATLIHQSITGLYETRIDLSQLGGDGGPAPGSSGGGGGTVSLQDEHRLFDIPVTTSLPDVWLQDFPQAWAETGGLGRAKCQAPIIIDLKPTAVPVSIKQYPMSLEAHMGIRQHIIKFLELGVLRPCRSPWNTPLLPVKKPGTQDYRPVQDLREINKRTVDIHPTVPNPYNLLSTLKPDYSWYTVLDLKDAFFCLPLAPQSQELFAFEWKDPERGISGQLTWTRLPQGFKNSPTLFNEALHRDLTDFRTQHPEVTLLQYVDDLLLAAPTKKACTQGTRHLLQELGEKGYRASAKKAQICQTKVTYLGYILSEGKRWLTPGRIETVARIPPPRNPREVREFLGKAGFCRLFIPGFAELAAPLYALTKPSTPFTWQTEHQLAFEALKKALLSAPALGLPDTSKPFTLFLDERQGIAKGVLTQKLGPWKRPVAYLSKKLDPVAAGWPPCLRIMAATAMLVKDSAKLTLGQPLTVITPHTLEAIVRQPPDRWITNARLTHYQALLLDTDRVQFGPPVTLNPATLLPVPENQPSPHDCRQVLAETHGTREDLKDQELPDADHTWYTDGSSYLDSGTRRAGAAVVDGHNTIWAQSLPPGTSAQKAELIALTKALELSKGKKANIYTDSRYAFATAHTHGSIYERRGWLTSEGKEIKNKAEIIALLKALFLPQEVAIIHCPGHQKGQDPVAVGNRQADRVARQAAMAEVLTLATEPDNTSHITAGKRTADGSEFEKRTADGSEFESPKKKAKVE

SEQ ID NO: 2020 - protein, 2100 aa, synthetic construct
MPAAKRVKLDGGDKKYSIGLDIGTNSVGWAVITDEYKVPSKKFKVLGNTDRHSIKKNLIGALLFDSGETAEATRLKRTARRRYTRRKNRICYLQEIFSNEMAKVDDSFFHRLEESFLVEEDKKHERHPIFGNIVDEVAYHEKYPTIYHLRKKLVDSTDKADLRLIYLALAHMIKFRGHFLIEGDLNPDNSDVDKLFIQLVQTYNQLFEENPINASGVDAKAILSARLSKSRRLENLIAQLPGEKKNGLFGNLIALSLGLTPNFKSNFDLAEDAKLQLSKDTYDDDLDNLLAQIGDQYADLFLAAKNLSDAILLSDILRVNTEITKAPLSASMIKRYDEHHQDLTLLKALVRQQLPEKYKEIFFDQSKNGYAGYIDGGASQEEFYKFIKPILEKMDGTEELLVKLNREDLLRKQRTFDNGSIPHQIHLGELHAILRRQEDFYPFLKDNREKIEKILTFRIPYYVGPLARGNSRFAWMTRKSEETITPWNFEEVVDKGASAQSFIERMTNFDKNLPNEKVLPKHSLLYEYFTVYNELTKVKYVTEGMRKPAFLSGEQKKAIVDLLFKTNRKVTVKQLKEDYFKKIECFDSVEISGVEDRFNASLGTYHDLLKIIKDKDFLDNEENEDILEDIVLTLTLFEDREMIEERLKTYAHLFDDKVMKQLKRRRYTGWGRLSRKLINGIRDKQSGKTILDFLKSDGFANRNFMQLIHDDSLTFKEDIQKAQVSGQGDSLHEHIANLAGSPAIKKGILQTVKVVDELVKVMGRHKPENIVIEMARENQTTQKGQKNSRERMKRIEEGIKELGSQILKEHPVENTQLQNEKLYLYYLQNGRDMYVDQELDINRLSDYDVDHIVPQSFLKDDSIDNKVLTRSDKARGKSDNVPSEEVVKKMKNYWRQLLNAKLITQRKFDNLTKAERGGLSELDKAGFIKRQLVETRQITKHVAQILDSRMNTKYDENDKLIREVKVITLKSKLVSDFRKDFQFYKVREINNYHHAHDAYLNAVVGTALIKKYPKLESEFVYGDYKVYDVRKMIAKSEQEIGKATAKYFFYSNIMNFFKTEITLANGEIRKRPLIETNGETGEIVWDKGRDFATVRKVLSMPQVNIVKKTEVQTGGFSKESILPKRNSDKLIARKKDWDPKKYGGFDSPTVAYSVLVVAKVEKGKSKKLKSVKELLGITIMERSSFEKNPIDFLEAKGYKEVKKDLIIKLPKYSLFELENGRKRMLASAGELQKGNELALPSKYVNFLYLASHYEKLKGSPEDNEQKQLFVEQHKHYLDEIIEQISEFSKRVILADANLDKVLSAYNKHRDKPIREQAENIIHLFTLTNLGAPAAFKYFDTTIDRKRYTSTKEVLDATLIHQSITGLYETRIDLSQLGGDGGGSSGGSPAPGGTVSLQDEHRLFDIPVTTSLPDVWLQDFPQAWAETGGLGRAKCQAPIIIDLKPTAVPVSIKQYPMSLEAHMGIRQHIIKFLELGVLRPCRSPWNTPLLPVKKPGTQDYRPVQDLREINKRTVDIHPTVPNPYNLLSTLKPDYSWYTVLDLKDAFFCLPLAPQSQELFAFEWKDPERGISGQLTWTRLPQGFKNSPTLFNEALHRDLTDFRTQHPEVTLLQYVDDLLLAAPTKKACTQGTRHLLQELGEKGYRASAKKAQICQTKVTYLGYILSEGKRWLTPGRIETVARIPPPRNPREVREFLGKAGFCRLFIPGFAELAAPLYALTKPSTPFTWQTEHQLAFEALKKALLSAPALGLPDTSKPFTLFLDERQGIAKGVLTQKLGPWKRPVAYLSKKLDPVAAGWPPCLRIMAATAMLVKDSAKLTLGQPLTVITPHTLEAIVRQPPDRWITNARLTHYQALLLDTDRVQFGPPVTLNPATLLPVPENQPSPHDCRQVLAETHGTREDLKDQELPDADHTWYTDGSSYLDSGTRRAGAAVVDGHNTIWAQSLPPGTSAQKAELIALTKALELSKGKKANIYTDSRYAFATAHTHGSIYERRGWLTSEGKEIKNKAEIIALLKALFLPQEVAIIHCPGHQKGQDPVAVGNRQADRVARQAAMAEVLTLATEPDNTSHITAGKRTADGSEFEKRTADGSEFESPKKKAKVE

SEQ ID NO: 2021 - protein, 2097 aa, synthetic construct
MPAAKRVKLDGGDKKYSIGLDIGTNSVGWAVITDEYKVPSKKFKVLGNTDRHSIKKNLIGALLFDSGETAEATRLKRTARRRYTRRKNRICYLQEIFSNEMAKVDDSFFHRLEESFLVEEDKKHERHPIFGNIVDEVAYHEKYPTIYHLRKKLVDSTDKADLRLIYLALAHMIKFRGHFLIEGDLNPDNSDVDKLFIQLVQTYNQLFEENPINASGVDAKAILSARLSKSRRLENLIAQLPGEKKNGLFGNLIALSLGLTPNFKSNFDLAEDAKLQLSKDTYDDDLDNLLAQIGDQYADLFLAAKNLSDAILLSDILRVNTEITKAPLSASMIKRYDEHHQDLTLLKALVRQQLPEKYKEIFFDQSKNGYAGYIDGGASQEEFYKFIKPILEKMDGTEELLVKLNREDLLRKQRTFDNGSIPHQIHLGELHAILRRQEDFYPFLKDNREKIEKILTFRIPYYVGPLARGNSRFAWMTRKSEETITPWNFEEVVDKGASAQSFIERMTNFDKNLPNEKVLPKHSLLYEYFTVYNELTKVKYVTEGMRKPAFLSGEQKKAIVDLLFKTNRKVTVKQLKEDYFKKIECFDSVEISGVEDRFNASLGTYHDLLKIIKDKDFLDNEENEDILEDIVLTLTLFEDREMIEERLKTYAHLFDDKVMKQLKRRRYTGWGRLSRKLINGIRDKQSGKTILDFLKSDGFANRNFMQLIHDDSLTFKEDIQKAQVSGQGDSLHEHIANLAGSPAIKKGILQTVKVVDELVKVMGRHKPENIVIEMARENQTTQKGQKNSRERMKRIEEGIKELGSQILKEHPVENTQLQNEKLYLYYLQNGRDMYVDQELDINRLSDYDVDHIVPQSFLKDDSIDNKVLTRSDKARGKSDNVPSEEVVKKMKNYWRQLLNAKLITQRKFDNLTKAERGGLSELDKAGFIKRQLVETRQITKHVAQILDSRMNTKYDENDKLIREVKVITLKSKLVSDFRKDFQFYKVREINNYHHAHDAYLNAVVGTALIKKYPKLESEFVYGDYKVYDVRKMIAKSEQEIGKATAKYFFYSNIMNFFKTEITLANGEIRKRPLIETNGETGEIVWDKGRDFATVRKVLSMPQVNIVKKTEVQTGGFSKESILPKRNSDKLIARKKDWDPKKYGGFDSPTVAYSVLVVAKVEKGKSKKLKSVKELLGITIMERSSFEKNPIDFLEAKGYKEVKKDLIIKLPKYSLFELENGRKRMLASAGELQKGNELALPSKYVNFLYLASHYEKLKGSPEDNEQKQLFVEQHKHYLDEIIEQISEFSKRVILADANLDKVLSAYNKHRDKPIREQAENIIHLFTLTNLGAPAAFKYFDTTIDRKRYTSTKEVLDATLIHQSITGLYETRIDLSQLGGDGGGGSPAPGGTVSLQDEHRLFDIPVTTSLPDVWLQDFPQAWAETGGLGRAKCQAPIIIDLKPTAVPVSIKQYPMSLEAHMGIRQHIIKFLELGVLRPCRSPWNTPLLPVKKPGTQDYRPVQDLREINKRTVDIHPTVPNPYNLLSTLKPDYSWYTVLDLKDAFFCLPLAPQSQELFAFEWKDPERGISGQLTWTRLPQGFKNSPTLFNEALHRDLTDFRTQHPEVTLLQYVDDLLLAAPTKKACTQGTRHLLQELGEKGYRASAKKAQICQTKVTYLGYILSEGKRWLTPGRIETVARIPPPRNPREVREFLGKAGFCRLFIPGFAELAAPLYALTKPSTPFTWQTEHQLAFEALKKALLSAPALGLPDTSKPFTLFLDERQGIAKGVLTQKLGPWKRPVAYLSKKLDPVAAGWPPCLRIMAATAMLVKDSAKLTLGQPLTVITPHTLEAIVRQPPDRWITNARLTHYQALLLDTDRVQFGPPVTLNPATLLPVPENQPSPHDCRQVLAETHGTREDLKDQELPDADHTWYTDGSSYLDSGTRRAGAAVVDGHNTIWAQSLPPGTSAQKAELIALTKALELSKGKKANIYTDSRYAFATAHTHGSIYERRGWLTSEGKEIKNKAEIIALLKALFLPQEVAIIHCPGHQKGQDPVAVGNRQADRVARQAAMAEVLTLATEPDNTSHITAGKRTADGSEFEKRTADGSEFESPKKKAKVE

SEQ ID NO: 2022 - protein, 2102 aa, synthetic construct
MPAAKRVKLDGGDKKYSIGLDIGTNSVGWAVITDEYKVPSKKFKVLGNTDRHSIKKNLIGALLFDSGETAEATRLKRTARRRYTRRKNRICYLQEIFSNEMAKVDDSFFHRLEESFLVEEDKKHERHPIFGNIVDEVAYHEKYPTIYHLRKKLVDSTDKADLRLIYLALAHMIKFRGHFLIEGDLNPDNSDVDKLFIQLVQTYNQLFEENPINASGVDAKAILSARLSKSRRLENLIAQLPGEKKNGLFGNLIALSLGLTPNFKSNFDLAEDAKLQLSKDTYDDDLDNLLAQIGDQYADLFLAAKNLSDAILLSDILRVNTEITKAPLSASMIKRYDEHHQDLTLLKALVRQQLPEKYKEIFFDQSKNGYAGYIDGGASQEEFYKFIKPILEKMDGTEELLVKLNREDLLRKQRTFDNGSIPHQIHLGELHAILRRQEDFYPFLKDNREKIEKILTFRIPYYVGPLARGNSRFAWMTRKSEETITPWNFEEVVDKGASAQSFIERMTNFDKNLPNEKVLPKHSLLYEYFTVYNELTKVKYVTEGMRKPAFLSGEQKKAIVDLLFKTNRKVTVKQLKEDYFKKIECFDSVEISGVEDRFNASLGTYHDLLKIIKDKDFLDNEENEDILEDIVLTLTLFEDREMIEERLKTYAHLFDDKVMKQLKRRRYTGWGRLSRKLINGIRDKQSGKTILDFLKSDGFANRNFMQLIHDDSLTFKEDIQKAQVSGQGDSLHEHIANLAGSPAIKKGILQTVKVVDELVKVMGRHKPENIVIEMARENQTTQKGQKNSRERMKRIEEGIKELGSQILKEHPVENTQLQNEKLYLYYLQNGRDMYVDQELDINRLSDYDVDHIVPQSFLKDDSIDNKVLTRSDKARGKSDNVPSEEVVKKMKNYWRQLLNAKLITQRKFDNLTKAERGGLSELDKAGFIKRQLVETRQITKHVAQILDSRMNTKYDENDKLIREVKVITLKSKLVSDFRKDFQFYKVREINNYHHAHDAYLNAVVGTALIKKYPKLESEFVYGDYKVYDVRKMIAKSEQEIGKATAKYFFYSNIMNFFKTEITLANGEIRKRPLIETNGETGEIVWDKGRDFATVRKVLSMPQVNIVKKTEVQTGGFSKESILPKRNSDKLIARKKDWDPKKYGGFDSPTVAYSVLVVAKVEKGKSKKLKSVKELLGITIMERSSFEKNPIDFLEAKGYKEVKKDLIIKLPKYSLFELENGRKRMLASAGELQKGNELALPSKYVNFLYLASHYEKLKGSPEDNEQKQLFVEQHKHYLDEIIEQISEFSKRVILADANLDKVLSAYNKHRDKPIREQAENIIHLFTLTNLGAPAAFKYFDTTIDRKRYTSTKEVLDATLIHQSITGLYETRIDLSQLGGDGGEAAAKPAPGSSGGTVSLQDEHRLFDIPVTTSLPDVWLQDFPQAWAETGGLGRAKCQAPIIIDLKPTAVPVSIKQYPMSLEAHMGIRQHIIKFLELGVLRPCRSPWNTPLLPVKKPGTQDYRPVQDLREINKRTVDIHPTVPNPYNLLSTLKPDYSWYTVLDLKDAFFCLPLAPQSQELFAFEWKDPERGISGQLTWTRLPQGFKNSPTLFNEALHRDLTDFRTQHPEVTLLQYVDDLLLAAPTKKACTQGTRHLLQELGEKGYRASAKKAQICQTKVTYLGYILSEGKRWLTPGRIETVARIPPPRNPREVREFLGKAGFCRLFIPGFAELAAPLYALTKPSTPFTWQTEHQLAFEALKKALLSAPALGLPDTSKPFTLFLDERQGIAKGVLTQKLGPWKRPVAYLSKKLDPVAAGWPPCLRIMAATAMLVKDSAKLTLGQPLTVITPHTLEAIVRQPPDRWITNARLTHYQALLLDTDRVQFGPPVTLNPATLLPVPENQPSPHDCRQVLAETHGTREDLKDQELPDADHTWYTDGSSYLDSGTRRAGAAVVDGHNTIWAQSLPPGTSAQKAELIALTKALELSKGKKANIYTDSRYAFATAHTHGSIYERRGWLTSEGKEIKNKAEIIALLKALFLPQEVAIIHCPGHQKGQDPVAVGNRQADRVARQAAMAEVLTLATEPDNTSHITAGKRTADGSEFEKRTADGSEFESPKKKAKVE

SEQ ID NO: 2023 - protein, 2094 aa, synthetic construct
MPAAKRVKLDGGDKKYSIGLDIGTNSVGWAVITDEYKVPSKKFKVLGNTDRHSIKKNLIGALLFDSGETAEATRLKRTARRRYTRRKNRICYLQEIFSNEMAKVDDSFFHRLEESFLVEEDKKHERHPIFGNIVDEVAYHEKYPTIYHLRKKLVDSTDKADLRLIYLALAHMIKFRGHFLIEGDLNPDNSDVDKLFIQLVQTYNQLFEENPINASGVDAKAILSARLSKSRRLENLIAQLPGEKKNGLFGNLIALSLGLTPNFKSNFDLAEDAKLQLSKDTYDDDLDNLLAQIGDQYADLFLAAKNLSDAILLSDILRVNTEITKAPLSASMIKRYDEHHQDLTLLKALVRQQLPEKYKEIFFDQSKNGYAGYIDGGASQEEFYKFIKPILEKMDGTEELLVKLNREDLLRKQRTFDNGSIPHQIHLGELHAILRRQEDFYPFLKDNREKIEKILTFRIPYYVGPLARGNSRFAWMTRKSEETITPWNFEEVVDKGASAQSFIERMTNFDKNLPNEKVLPKHSLLYEYFTVYNELTKVKYVTEGMRKPAFLSGEQKKAIVDLLFKTNRKVTVKQLKEDYFKKIECFDSVEISGVEDRFNASLGTYHDLLKIIKDKDFLDNEENEDILEDIVLTLTLFEDREMIEERLKTYAHLFDDKVMKQLKRRRYTGWGRLSRKLINGIRDKQSGKTILDFLKSDGFANRNFMQLIHDDSLTFKEDIQKAQVSGQGDSLHEHIANLAGSPAIKKGILQTVKVVDELVKVMGRHKPENIVIEMARENQTTQKGQKNSRERMKRIEEGIKELGSQILKEHPVENTQLQNEKLYLYYLQNGRDMYVDQELDINRLSDYDVDHIVPQSFLKDDSIDNKVLTRSDKARGKSDNVPSEEVVKKMKNYWRQLLNAKLITQRKFDNLTKAERGGLSELDKAGFIKRQLVETRQITKHVAQILDSRMNTKYDENDKLIREVKVITLKSKLVSDFRKDFQFYKVREINNYHHAHDAYLNAVVGTALIKKYPKLESEFVYGDYKVYDVRKMIAKSEQEIGKATAKYFFYSNIMNFFKTEITLANGEIRKRPLIETNGETGEIVWDKGRDFATVRKVLSMPQVNIVKKTEVQTGGFSKESILPKRNSDKLIARKKDWDPKKYGGFDSPTVAYSVLVVAKVEKGKSKKLKSVKELLGITIMERSSFEKNPIDFLEAKGYKEVKKDLIIKLPKYSLFELENGRKRMLASAGELQKGNELALPSKYVNFLYLASHYEKLKGSPEDNEQKQLFVEQHKHYLDEIIEQISEFSKRVILADANLDKVLSAYNKHRDKPIREQAENIIHLFTLTNLGAPAAFKYFDTTIDRKRYTSTKEVLDATLIHQSITGLYETRIDLSQLGGDGGPAPGGTVSLQDEHRLFDIPVTTSLPDVWLQDFPQAWAETGGLGRAKCQAPIIIDLKPTAVPVSIKQYPMSLEAHMGIRQHIIKFLELGVLRPCRSPWNTPLLPVKKPGTQDYRPVQDLREINKRTVDIHPTVPNPYNLLSTLKPDYSWYTVLDLKDAFFCLPLAPQSQELFAFEWKDPERGISGQLTWTRLPQGFKNSPTLFNEALHRDLTDFRTQHPEVTLLQYVDDLLLAAPTKKACTQGTRHLLQELGEKGYRASAKKAQICQTKVTYLGYILSEGKRWLTPGRIETVARIPPPRNPREVREFLGKAGFCRLFIPGFAELAAPLYALTKPSTPFTWQTEHQLAFEALKKALLSAPALGLPDTSKPFTLFLDERQGIAKGVLTQKLGPWKRPVAYLSKKLDPVAAGWPPCLRIMAATAMLVKDSAKLTLGQPLTVITPHTLEAIVRQPPDRWITNARLTHYQALLLDTDRVQFGPPVTLNPATLLPVPENQPSPHDCRQVLAETHGTREDLKDQELPDADHTWYTDGSSYLDSGTRRAGAAVVDGHNTIWAQSLPPGTSAQKAELIALTKALELSKGKKANIYTDSRYAFATAHTHGSIYERRGWLTSEGKEIKNKAEIIALLKALFLPQEVAIIHCPGHQKGQDPVAVGNRQADRVARQAAMAEVLTLATEPDNTSHITAGKRTADGSEFEKRTADGSEFESPKKKAKVE

SEQ ID NO: 2024 - protein, 2097 aa, synthetic construct
MPAAKRVKLDGGDKKYSIGLDIGTNSVGWAVITDEYKVPSKKFKVLGNTDRHSIKKNLIGALLFDSGETAEATRLKRTARRRYTRRKNRICYLQEIFSNEMAKVDDSFFHRLEESFLVEEDKKHERHPIFGNIVDEVAYHEKYPTIYHLRKKLVDSTDKADLRLIYLALAHMIKFRGHFLIEGDLNPDNSDVDKLFIQLVQTYNQLFEENPINASGVDAKAILSARLSKSRRLENLIAQLPGEKKNGLFGNLIALSLGLTPNFKSNFDLAEDAKLQLSKDTYDDDLDNLLAQIGDQYADLFLAAKNLSDAILLSDILRVNTEITKAPLSASMIKRYDEHHQDLTLLKALVRQQLPEKYKEIFFDQSKNGYAGYIDGGASQEEFYKFIKPILEKMDGTEELLVKLNREDLLRKQRTFDNGSIPHQIHLGELHAILRRQEDFYPFLKDNREKIEKILTFRIPYYVGPLARGNSRFAWMTRKSEETITPWNFEEVVDKGASAQSFIERMTNFDKNLPNEKVLPKHSLLYEYFTVYNELTKVKYVTEGMRKPAFLSGEQKKAIVDLLFKTNRKVTVKQLKEDYFKKIECFDSVEISGVEDRFNASLGTYHDLLKIIKDKDFLDNEENEDILEDIVLTLTLFEDREMIEERLKTYAHLFDDKVMKQLKRRRYTGWGRLSRKLINGIRDKQSGKTILDFLKSDGFANRNFMQLIHDDSLTFKEDIQKAQVSGQGDSLHEHIANLAGSPAIKKGILQTVKVVDELVKVMGRHKPENIVIEMARENQTTQKGQKNSRERMKRIEEGIKELGSQILKEHPVENTQLQNEKLYLYYLQNGRDMYVDQELDINRLSDYDVDHIVPQSFLKDDSIDNKVLTRSDKARGKSDNVPSEEVVKKMKNYWRQLLNAKLITQRKFDNLTKAERGGLSELDKAGFIKRQLVETRQITKHVAQILDSRMNTKYDENDKLIREVKVITLKSKLVSDFRKDFQFYKVREINNYHHAHDAYLNAVVGTALIKKYPKLESEFVYGDYKVYDVRKMIAKSEQEIGKATAKYFFYSNIMNFFKTEITLANGEIRKRPLIETNGETGEIVWDKGRDFATVRKVLSMPQVNIVKKTEVQTGGFSKESILPKRNSDKLIARKKDWDPKKYGGFDSPTVAYSVLVVAKVEKGKSKKLKSVKELLGITIMERSSFEKNPIDFLEAKGYKEVKKDLIIKLPKYSLFELENGRKRMLASAGELQKGNELALPSKYVNFLYLASHYEKLKGSPEDNEQKQLFVEQHKHYLDEIIEQISEFSKRVILADANLDKVLSAYNKHRDKPIREQAENIIHLFTLTNLGAPAAFKYFDTTIDRKRYTSTKEVLDATLIHQSITGLYETRIDLSQLGGDGGGGSGGSGGTVSLQDEHRLFDIPVTTSLPDVWLQDFPQAWAETGGLGRAKCQAPIIIDLKPTAVPVSIKQYPMSLEAHMGIRQHIIKFLELGVLRPCRSPWNTPLLPVKKPGTQDYRPVQDLREINKRTVDIHPTVPNPYNLLSTLKPDYSWYTVLDLKDAFFCLPLAPQSQELFAFEWKDPERGISGQLTWTRLPQGFKNSPTLFNEALHRDLTDFRTQHPEVTLLQYVDDLLLAAPTKKACTQGTRHLLQELGEKGYRASAKKAQICQTKVTYLGYILSEGKRWLTPGRIETVARIPPPRNPREVREFLGKAGFCRLFIPGFAELAAPLYALTKPSTPFTWQTEHQLAFEALKKALLSAPALGLPDTSKPFTLFLDERQGIAKGVLTQKLGPWKRPVAYLSKKLDPVAAGWPPCLRIMAATAMLVKDSAKLTLGQPLTVITPHTLEAIVRQPPDRWITNARLTHYQALLLDTDRVQFGPPVTLNPATLLPVPENQPSPHDCRQVLAETHGTREDLKDQELPDADHTWYTDGSSYLDSGTRRAGAAVVDGHNTIWAQSLPPGTSAQKAELIALTKALELSKGKKANIYTDSRYAFATAHTHGSIYERRGWLTSEGKEIKNKAEIIALLKALFLPQEVAIIHCPGHQKGQDPVAVGNRQADRVARQAAMAEVLTLATEPDNTSHITAGKRTADGSEFEKRTADGSEFESPKKKAKVE

SEQ ID NO: 2025 - protein, 2102 aa, synthetic construct
MPAAKRVKLDGGDKKYSIGLDIGTNSVGWAVITDEYKVPSKKFKVLGNTDRHSIKKNLIGALLFDSGETAEATRLKRTARRRYTRRKNRICYLQEIFSNEMAKVDDSFFHRLEESFLVEEDKKHERHPIFGNIVDEVAYHEKYPTIYHLRKKLVDSTDKADLRLIYLALAHMIKFRGHFLIEGDLNPDNSDVDKLFIQLVQTYNQLFEENPINASGVDAKAILSARLSKSRRLENLIAQLPGEKKNGLFGNLIALSLGLTPNFKSNFDLAEDAKLQLSKDTYDDDLDNLLAQIGDQYADLFLAAKNLSDAILLSDILRVNTEITKAPLSASMIKRYDEHHQDLTLLKALVRQQLPEKYKEIFFDQSKNGYAGYIDGGASQEEFYKFIKPILEKMDGTEELLVKLNREDLLRKQRTFDNGSIPHQIHLGELHAILRRQEDFYPFLKDNREKIEKILTFRIPYYVGPLARGNSRFAWMTRKSEETITPWNFEEVVDKGASAQSFIERMTNFDKNLPNEKVLPKHSLLYEYFTVYNELTKVKYVTEGMRKPAFLSGEQKKAIVDLLFKTNRKVTVKQLKEDYFKKIECFDSVEISGVEDRFNASLGTYHDLLKIIKDKDFLDNEENEDILEDIVLTLTLFEDREMIEERLKTYAHLFDDKVMKQLKRRRYTGWGRLSRKLINGIRDKQSGKTILDFLKSDGFANRNFMQLIHDDSLTFKEDIQKAQVSGQGDSLHEHIANLAGSPAIKKGILQTVKVVDELVKVMGRHKPENIVIEMARENQTTQKGQKNSRERMKRIEEGIKELGSQILKEHPVENTQLQNEKLYLYYLQNGRDMYVDQELDINRLSDYDVDHIVPQSFLKDDSIDNKVLTRSDKARGKSDNVPSEEVVKKMKNYWRQLLNAKLITQRKFDNLTKAERGGLSELDKAGFIKRQLVETRQITKHVAQILDSRMNTKYDENDKLIREVKVITLKSKLVSDFRKDFQFYKVREINNYHHAHDAYLNAVVGTALIKKYPKLESEFVYGDYKVYDVRKMIAKSEQEIGKATAKYFFYSNIMNFFKTEITLANGEIRKRPLIETNGETGEIVWDKGRDFATVRKVLSMPQVNIVKKTEVQTGGFSKESILPKRNSDKLIARKKDWDPKKYGGFDSPTVAYSVLVVAKVEKGKSKKLKSVKELLGITIMERSSFEKNPIDFLEAKGYKEVKKDLIIKLPKYSLFELENGRKRMLASAGELQKGNELALPSKYVNFLYLASHYEKLKGSPEDNEQKQLFVEQHKHYLDEIIEQISEFSKRVILADANLDKVLSAYNKHRDKPIREQAENIIHLFTLTNLGAPAAFKYFDTTIDRKRYTSTKEVLDATLIHQSITGLYETRIDLSQLGGDGGGSSGGSEAAAKGGTVSLQDEHRLFDIPVTTSLPDVWLQDFPQAWAETGGLGRAKCQAPIIIDLKPTAVPVSIKQYPMSLEAHMGIRQHIIKFLELGVLRPCRSPWNTPLLPVKKPGTQDYRPVQDLREINKRTVDIHPTVPNPYNLLSTLKPDYSWYTVLDLKDAFFCLPLAPQSQELFAFEWKDPERGISGQLTWTRLPQGFKNSPTLFNEALHRDLTDFRTQHPEVTLLQYVDDLLLAAPTKKACTQGTRHLLQELGEKGYRASAKKAQICQTKVTYLGYILSEGKRWLTPGRIETVARIPPPRNPREVREFLGKAGFCRLFIPGFAELAAPLYALTKPSTPFTWQTEHQLAFEALKKALLSAPALGLPDTSKPFTLFLDERQGIAKGVLTQKLGPWKRPVAYLSKKLDPVAAGWPPCLRIMAATAMLVKDSAKLTLGQPLTVITPHTLEAIVRQPPDRWITNARLTHYQALLLDTDRVQFGPPVTLNPATLLPVPENQPSPHDCRQVLAETHGTREDLKDQELPDADHTWYTDGSSYLDSGTRRAGAAVVDGHNTIWAQSLPPGTSAQKAELIALTKALELSKGKKANIYTDSRYAFATAHTHGSIYERRGWLTSEGKEIKNKAEIIALLKALFLPQEVAIIHCPGHQKGQDPVAVGNRQADRVARQAAMAEVLTLATEPDNTSHITAGKRTADGSEFEKRTADGSEFESPKKKAKVE

SEQ ID NO: 2026 - protein, 2100 aa, synthetic construct
MPAAKRVKLDGGDKKYSIGLDIGTNSVGWAVITDEYKVPSKKFKVLGNTDRHSIKKNLIGALLFDSGETAEATRLKRTARRRYTRRKNRICYLQEIFSNEMAKVDDSFFHRLEESFLVEEDKKHERHPIFGNIVDEVAYHEKYPTIYHLRKKLVDSTDKADLRLIYLALAHMIKFRGHFLIEGDLNPDNSDVDKLFIQLVQTYNQLFEENPINASGVDAKAILSARLSKSRRLENLIAQLPGEKKNGLFGNLIALSLGLTPNFKSNFDLAEDAKLQLSKDTYDDDLDNLLAQIGDQYADLFLAAKNLSDAILLSDILRVNTEITKAPLSASMIKRYDEHHQDLTLLKALVRQQLPEKYKEIFFDQSKNGYAGYIDGGASQEEFYKFIKPILEKMDGTEELLVKLNREDLLRKQRTFDNGSIPHQIHLGELHAILRRQEDFYPFLKDNREKIEKILTFRIPYYVGPLARGNSRFAWMTRKSEETITPWNFEEVVDKGASAQSFIERMTNFDKNLPNEKVLPKHSLLYEYFTVYNELTKVKYVTEGMRKPAFLSGEQKKAIVDLLFKTNRKVTVKQLKEDYFKKIECFDSVEISGVEDRFNASLGTYHDLLKIIKDKDFLDNEENEDILEDIVLTLTLFEDREMIEERLKTYAHLFDDKVMKQLKRRRYTGWGRLSRKLINGIRDKQSGKTILDFLKSDGFANRNFMQLIHDDSLTFKEDIQKAQVSGQGDSLHEHIANLAGSPAIKKGILQTVKVVDELVKVMGRHKPENIVIEMARENQTTQKGQKNSRERMKRIEEGIKELGSQILKEHPVENTQLQNEKLYLYYLQNGRDMYVDQELDINRLSDYDVDHIVPQSFLKDDSIDNKVLTRSDKARGKSDNVPSEEVVKKMKNYWRQLLNAKLITQRKFDNLTKAERGGLSELDKAGFIKRQLVETRQITKHVAQILDSRMNTKYDENDKLIREVKVITLKSKLVSDFRKDFQFYKVREINNYHHAHDAYLNAVVGTALIKKYPKLESEFVYGDYKVYDVRKMIAKSEQEIGKATAKYFFYSNIMNFFKTEITLANGEIRKRPLIETNGETGEIVWDKGRDFATVRKVLSMPQVNIVKKTEVQTGGFSKESILPKRNSDKLIARKKDWDPKKYGGFDSPTVAYSVLVVAKVEKGKSKKLKSVKELLGITIMERSSFEKNPIDFLEAKGYKEVKKDLIIKLPKYSLFELENGRKRMLASAGELQKGNELALPSKYVNFLYLASHYEKLKGSPEDNEQKQLFVEQHKHYLDEIIEQISEFSKRVILADANLDKVLSAYNKHRDKPIREQAENIIHLFTLTNLGAPAAFKYFDTTIDRKRYTSTKEVLDATLIHQSITGLYETRIDLSQLGGDGGGGGGGSGSSGGTVSLQDEHRLFDIPVTTSLPDVWLQDFPQAWAETGGLGRAKCQAPIIIDLKPTAVPVSIKQYPMSLEAHMGIRQHIIKFLELGVLRPCRSPWNTPLLPVKKPGTQDYRPVQDLREINKRTVDIHPTVPNPYNLLSTLKPDYSWYTVLDLKDAFFCLPLAPQSQELFAFEWKDPERGISGQLTWTRLPQGFKNSPTLFNEALHRDLTDFRTQHPEVTLLQYVDDLLLAAPTKKACTQGTRHLLQELGEKGYRASAKKAQICQTKVTYLGYILSEGKRWLTPGRIETVARIPPPRNPREVREFLGKAGFCRLFIPGFAELAAPLYALTKPSTPFTWQTEHQLAFEALKKALLSAPALGLPDTSKPFTLFLDERQGIAKGVLTQKLGPWKRPVAYLSKKLDPVAAGWPPCLRIMAATAMLVKDSAKLTLGQPLTVITPHTLEAIVRQPPDRWITNARLTHYQALLLDTDRVQFGPPVTLNPATLLPVPENQPSPHDCRQVLAETHGTREDLKDQELPDADHTWYTDGSSYLDSGTRRAGAAVVDGHNTIWAQSLPPGTSAQKAELIALTKALELSKGKKANIYTDSRYAFATAHTHGSIYERRGWLTSEGKEIKNKAEIIALLKALFLPQEVAIIHCPGHQKGQDPVAVGNRQADRVARQAAMAEVLTLATEPDNTSHITAGKRTADGSEFEKRTADGSEFESPKKKAKVE

SEQ ID NO: 2027 - protein, 2102 aa, synthetic construct
MPAAKRVKLDGGDKKYSIGLDIGTNSVGWAVITDEYKVPSKKFKVLGNTDRHSIKKNLIGALLFDSGETAEATRLKRTARRRYTRRKNRICYLQEIFSNEMAKVDDSFFHRLEESFLVEEDKKHERHPIFGNIVDEVAYHEKYPTIYHLRKKLVDSTDKADLRLIYLALAHMIKFRGHFLIEGDLNPDNSDVDKLFIQLVQTYNQLFEENPINASGVDAKAILSARLSKSRRLENLIAQLPGEKKNGLFGNLIALSLGLTPNFKSNFDLAEDAKLQLSKDTYDDDLDNLLAQIGDQYADLFLAAKNLSDAILLSDILRVNTEITKAPLSASMIKRYDEHHQDLTLLKALVRQQLPEKYKEIFFDQSKNGYAGYIDGGASQEEFYKFIKPILEKMDGTEELLVKLNREDLLRKQRTFDNGSIPHQIHLGELHAILRRQEDFYPFLKDNREKIEKILTFRIPYYVGPLARGNSRFAWMTRKSEETITPWNFEEVVDKGASAQSFIERMTNFDKNLPNEKVLPKHSLLYEYFTVYNELTKVKYVTEGMRKPAFLSGEQKKAIVDLLFKTNRKVTVKQLKEDYFKKIECFDSVEISGVEDRFNASLGTYHDLLKIIKDKDFLDNEENEDILEDIVLTLTLFEDREMIEERLKTYAHLFDDKVMKQLKRRRYTGWGRLSRKLINGIRDKQSGKTILDFLKSDGFANRNFMQLIHDDSLTFKEDIQKAQVSGQGDSLHEHIANLAGSPAIKKGILQTVKVVDELVKVMGRHKPENIVIEMARENQTTQKGQKNSRERMKRIEEGIKELGSQILKEHPVENTQLQNEKLYLYYLQNGRDMYVDQELDINRLSDYDVDHIVPQSFLKDDSIDNKVLTRSDKARGKSDNVPSEEVVKKMKNYWRQLLNAKLITQRKFDNLTKAERGGLSELDKAGFIKRQLVETRQITKHVAQILDSRMNTKYDENDKLIREVKVITLKSKLVSDFRKDFQFYKVREINNYHHAHDAYLNAVVGTALIKKYPKLESEFVYGDYKVYDVRKMIAKSEQEIGKATAKYFFYSNIMNFFKTEITLANGEIRKRPLIETNGETGEIVWDKGRDFATVRKVLSMPQVNIVKKTEVQTGGFSKESILPKRNSDKLIARKKDWDPKKYGGFDSPTVAYSVLVVAKVEKGKSKKLKSVKELLGITIMERSSFEKNPIDFLEAKGYKEVKKDLIIKLPKYSLFELENGRKRMLASAGELQKGNELALPSKYVNFLYLASHYEKLKGSPEDNEQKQLFVEQHKHYLDEIIEQISEFSKRVILADANLDKVLSAYNKHRDKPIREQAENIIHLFTLTNLGAPAAFKYFDTTIDRKRYTSTKEVLDATLIHQSITGLYETRIDLSQLGGDGGEAAAKGGSPAPGGTVSLQDEHRLFDIPVTTSLPDVWLQDFPQAWAETGGLGRAKCQAPIIIDLKPTAVPVSIKQYPMSLEAHMGIRQHIIKFLELGVLRPCRSPWNTPLLPVKKPGTQDYRPVQDLREINKRTVDIHPTVPNPYNLLSTLKPDYSWYTVLDLKDAFFCLPLAPQSQELFAFEWKDPERGISGQLTWTRLPQGFKNSPTLFNEALHRDLTDFRTQHPEVTLLQYVDDLLLAAPTKKACTQGTRHLLQELGEKGYRASAKKAQICQTKVTYLGYILSEGKRWLTPGRIETVARIPPPRNPREVREFLGKAGFCRLFIPGFAELAAPLYALTKPSTPFTWQTEHQLAFEALKKALLSAPALGLPDTSKPFTLFLDERQGIAKGVLTQKLGPWKRPVAYLSKKLDPVAAGWPPCLRIMAATAMLVKDSAKLTLGQPLTVITPHTLEAIVRQPPDRWITNARLTHYQALLLDTDRVQFGPPVTLNPATLLPVPENQPSPHDCRQVLAETHGTREDLKDQELPDADHTWYTDGSSYLDSGTRRAGAAVVDGHNTIWAQSLPPGTSAQKAELIALTKALELSKGKKANIYTDSRYAFATAHTHGSIYERRGWLTSEGKEIKNKAEIIALLKALFLPQEVAIIHCPGHQKGQDPVAVGNRQADRVARQAAMAEVLTLATEPDNTSHITAGKRTADGSEFEKRTADGSEFESPKKKAKVE

SEQ ID NO: 2028 - protein, 2102 aa, synthetic construct
MPAAKRVKLDGGDKKYSIGLDIGTNSVGWAVITDEYKVPSKKFKVLGNTDRHSIKKNLIGALLFDSGETAEATRLKRTARRRYTRRKNRICYLQEIFSNEMAKVDDSFFHRLEESFLVEEDKKHERHPIFGNIVDEVAYHEKYPTIYHLRKKLVDSTDKADLRLIYLALAHMIKFRGHFLIEGDLNPDNSDVDKLFIQLVQTYNQLFEENPINASGVDAKAILSARLSKSRRLENLIAQLPGEKKNGLFGNLIALSLGLTPNFKSNFDLAEDAKLQLSKDTYDDDLDNLLAQIGDQYADLFLAAKNLSDAILLSDILRVNTEITKAPLSASMIKRYDEHHQDLTLLKALVRQQLPEKYKEIFFDQSKNGYAGYIDGGASQEEFYKFIKPILEKMDGTEELLVKLNREDLLRKQRTFDNGSIPHQIHLGELHAILRRQEDFYPFLKDNREKIEKILTFRIPYYVGPLARGNSRFAWMTRKSEETITPWNFEEVVDKGASAQSFIERMTNFDKNLPNEKVLPKHSLLYEYFTVYNELTKVKYVTEGMRKPAFLSGEQKKAIVDLLFKTNRKVTVKQLKEDYFKKIECFDSVEISGVEDRFNASLGTYHDLLKIIKDKDFLDNEENEDILEDIVLTLTLFEDREMIEERLKTYAHLFDDKVMKQLKRRRYTGWGRLSRKLINGIRDKQSGKTILDFLKSDGFANRNFMQLIHDDSLTFKEDIQKAQVSGQGDSLHEHIANLAGSPAIKKGILQTVKVVDELVKVMGRHKPENIVIEMARENQTTQKGQKNSRERMKRIEEGIKELGSQILKEHPVENTQLQNEKLYLYYLQNGRDMYVDQELDINRLSDYDVDHIVPQSFLKDDSIDNKVLTRSDKARGKSDNVPSEEVVKKMKNYWRQLLNAKLITQRKFDNLTKAERGGLSELDKAGFIKRQLVETRQITKHVAQILDSRMNTKYDENDKLIREVKVITLKSKLVSDFRKDFQFYKVREINNYHHAHDAYLNAVVGTALIKKYPKLESEFVYGDYKVYDVRKMIAKSEQEIGKATAKYFFYSNIMNFFKTEITLANGEIRKRPLIETNGETGEIVWDKGRDFATVRKVLSMPQVNIVKKTEVQTGGFSKESILPKRNSDKLIARKKDWDPKKYGGFDSPTVAYSVLVVAKVEKGKSKKLKSVKELLGITIMERSSFEKNPIDFLEAKGYKEVKKDLIIKLPKYSLFELENGRKRMLASAGELQKGNELALPSKYVNFLYLASHYEKLKGSPEDNEQKQLFVEQHKHYLDEIIEQISEFSKRVILADANLDKVLSAYNKHRDKPIREQAENIIHLFTLTNLGAPAAFKYFDTTIDRKRYTSTKEVLDATLIHQSITGLYETRIDLSQLGGDGGEAAAKPAPGGSGGTVSLQDEHRLFDIPVTTSLPDVWLQDFPQAWAETGGLGRAKCQAPIIIDLKPTAVPVSIKQYPMSLEAHMGIRQHIIKFLELGVLRPCRSPWNTPLLPVKKPGTQDYRPVQDLREINKRTVDIHPTVPNPYNLLSTLKPDYSWYTVLDLKDAFFCLPLAPQSQELFAFEWKDPERGISGQLTWTRLPQGFKNSPTLFNEALHRDLTDFRTQHPEVTLLQYVDDLLLAAPTKKACTQGTRHLLQELGEKGYRASAKKAQICQTKVTYLGYILSEGKRWLTPGRIETVARIPPPRNPREVREFLGKAGFCRLFIPGFAELAAPLYALTKPSTPFTWQTEHQLAFEALKKALLSAPALGLPDTSKPFTLFLDERQGIAKGVLTQKLGPWKRPVAYLSKKLDPVAAGWPPCLRIMAATAMLVKDSAKLTLGQPLTVITPHTLEAIVRQPPDRWITNARLTHYQALLLDTDRVQFGPPVTLNPATLLPVPENQPSPHDCRQVLAETHGTREDLKDQELPDADHTWYTDGSSYLDSGTRRAGAAVVDGHNTIWAQSLPPGTSAQKAELIALTKALELSKGKKANIYTDSRYAFATAHTHGSIYERRGWLTSEGKEIKNKAEIIALLKALFLPQEVAIIHCPGHQKGQDPVAVGNRQADRVARQAAMAEVLTLATEPDNTSHITAGKRTADGSEFEKRTADGSEFESPKKKAKVE

SEQ ID NO: 2029 - protein, 2097 aa, synthetic construct
MPAAKRVKLDGGDKKYSIGLDIGTNSVGWAVITDEYKVPSKKFKVLGNTDRHSIKKNLIGALLFDSGETAEATRLKRTARRRYTRRKNRICYLQEIFSNEMAKVDDSFFHRLEESFLVEEDKKHERHPIFGNIVDEVAYHEKYPTIYHLRKKLVDSTDKADLRLIYLALAHMIKFRGHFLIEGDLNPDNSDVDKLFIQLVQTYNQLFEENPINASGVDAKAILSARLSKSRRLENLIAQLPGEKKNGLFGNLIALSLGLTPNFKSNFDLAEDAKLQLSKDTYDDDLDNLLAQIGDQYADLFLAAKNLSDAILLSDILRVNTEITKAPLSASMIKRYDEHHQDLTLLKALVRQQLPEKYKEIFFDQSKNGYAGYIDGGASQEEFYKFIKPILEKMDGTEELLVKLNREDLLRKQRTFDNGSIPHQIHLGELHAILRRQEDFYPFLKDNREKIEKILTFRIPYYVGPLARGNSRFAWMTRKSEETITPWNFEEVVDKGASAQSFIERMTNFDKNLPNEKVLPKHSLLYEYFTVYNELTKVKYVTEGMRKPAFLSGEQKKAIVDLLFKTNRKVTVKQLKEDYFKKIECFDSVEISGVEDRFNASLGTYHDLLKIIKDKDFLDNEENEDILEDIVLTLTLFEDREMIEERLKTYAHLFDDKVMKQLKRRRYTGWGRLSRKLINGIRDKQSGKTILDFLKSDGFANRNFMQLIHDDSLTFKEDIQKAQVSGQGDSLHEHIANLAGSPAIKKGILQTVKVVDELVKVMGRHKPENIVIEMARENQTTQKGQKNSRERMKRIEEGIKELGSQILKEHPVENTQLQNEKLYLYYLQNGRDMYVDQELDINRLSDYDVDHIVPQSFLKDDSIDNKVLTRSDKARGKSDNVPSEEVVKKMKNYWRQLLNAKLITQRKFDNLTKAERGGLSELDKAGFIKRQLVETRQITKHVAQILDSRMNTKYDENDKLIREVKVITLKSKLVSDFRKDFQFYKVREINNYHHAHDAYLNAVVGTALIKKYPKLESEFVYGDYKVYDVRKMIAKSEQEIGKATAKYFFYSNIMNFFKTEITLANGEIRKRPLIETNGETGEIVWDKGRDFATVRKVLSMPQVNIVKKTEVQTGGFSKESILPKRNSDKLIARKKDWDPKKYGGFDSPTVAYSVLVVAKVEKGKSKKLKSVKELLGITIMERSSFEKNPIDFLEAKGYKEVKKDLIIKLPKYSLFELENGRKRMLASAGELQKGNELALPSKYVNFLYLASHYEKLKGSPEDNEQKQLFVEQHKHYLDEIIEQISEFSKRVILADANLDKVLSAYNKHRDKPIREQAENIIHLFTLTNLGAPAAFKYFDTTIDRKRYTSTKEVLDATLIHQSITGLYETRIDLSQLGGDGGGGGGGSGGTVSLQDEHRLFDIPVTTSLPDVWLQDFPQAWAETGGLGRAKCQAPIIIDLKPTAVPVSIKQYPMSLEAHMGIRQHIIKFLELGVLRPCRSPWNTPLLPVKKPGTQDYRPVQDLREINKRTVDIHPTVPNPYNLLSTLKPDYSWYTVLDLKDAFFCLPLAPQSQELFAFEWKDPERGISGQLTWTRLPQGFKNSPTLFNEALHRDLTDFRTQHPEVTLLQYVDDLLLAAPTKKACTQGTRHLLQELGEKGYRASAKKAQICQTKVTYLGYILSEGKRWLTPGRIETVARIPPPRNPREVREFLGKAGFCRLFIPGFAELAAPLYALTKPSTPFTWQTEHQLAFEALKKALLSAPALGLPDTSKPFTLFLDERQGIAKGVLTQKLGPWKRPVAYLSKKLDPVAAGWPPCLRIMAATAMLVKDSAKLTLGQPLTVITPHTLEAIVRQPPDRWITNARLTHYQALLLDTDRVQFGPPVTLNPATLLPVPENQPSPHDCRQVLAETHGTREDLKDQELPDADHTWYTDGSSYLDSGTRRAGAAVVDGHNTIWAQSLPPGTSAQKAELIALTKALELSKGKKANIYTDSRYAFATAHTHGSIYERRGWLTSEGKEIKNKAEIIALLKALFLPQEVAIIHCPGHQKGQDPVAVGNRQADRVARQAAMAEVLTLATEPDNTSHITAGKRTADGSEFEKRTADGSEFESPKKKAKVE

SEQ ID NO: 2030 - protein, 2100 aa, synthetic construct
MPAAKRVKLDGGDKKYSIGLDIGTNSVGWAVITDEYKVPSKKFKVLGNTDRHSIKKNLIGALLFDSGETAEATRLKRTARRRYTRRKNRICYLQEIFSNEMAKVDDSFFHRLEESFLVEEDKKHERHPIFGNIVDEVAYHEKYPTIYHLRKKLVDSTDKADLRLIYLALAHMIKFRGHFLIEGDLNPDNSDVDKLFIQLVQTYNQLFEENPINASGVDAKAILSARLSKSRRLENLIAQLPGEKKNGLFGNLIALSLGLTPNFKSNFDLAEDAKLQLSKDTYDDDLDNLLAQIGDQYADLFLAAKNLSDAILLSDILRVNTEITKAPLSASMIKRYDEHHQDLTLLKALVRQQLPEKYKEIFFDQSKNGYAGYIDGGASQEEFYKFIKPILEKMDGTEELLVKLNREDLLRKQRTFDNGSIPHQIHLGELHAILRRQEDFYPFLKDNREKIEKILTFRIPYYVGPLARGNSRFAWMTRKSEETITPWNFEEVVDKGASAQSFIERMTNFDKNLPNEKVLPKHSLLYEYFTVYNELTKVKYVTEGMRKPAFLSGEQKKAIVDLLFKTNRKVTVKQLKEDYFKKIECFDSVEISGVEDRFNASLGTYHDLLKIIKDKDFLDNEENEDILEDIVLTLTLFEDREMIEERLKTYAHLFDDKVMKQLKRRRYTGWGRLSRKLINGIRDKQSGKTILDFLKSDGFANRNFMQLIHDDSLTFKEDIQKAQVSGQGDSLHEHIANLAGSPAIKKGILQTVKVVDELVKVMGRHKPENIVIEMARENQTTQKGQKNSRERMKRIEEGIKELGSQILKEHPVENTQLQNEKLYLYYLQNGRDMYVDQELDINRLSDYDVDHIVPQSFLKDDSIDNKVLTRSDKARGKSDNVPSEEVVKKMKNYWRQLLNAKLITQRKFDNLTKAERGGLSELDKAGFIKRQLVETRQITKHVAQILDSRMNTKYDENDKLIREVKVITLKSKLVSDFRKDFQFYKVREINNYHHAHDAYLNAVVGTALIKKYPKLESEFVYGDYKVYDVRKMIAKSEQEIGKATAKYFFYSNIMNFFKTEITLANGEIRKRPLIETNGETGEIVWDKGRDFATVRKVLSMPQVNIVKKTEVQTGGFSKESILPKRNSDKLIARKKDWDPKKYGGFDSPTVAYSVLVVAKVEKGKSKKLKSVKELLGITIMERSSFEKNPIDFLEAKGYKEVKKDLIIKLPKYSLFELENGRKRMLASAGELQKGNELALPSKYVNFLYLASHYEKLKGSPEDNEQKQLFVEQHKHYLDEIIEQISEFSKRVILADANLDKVLSAYNKHRDKPIREQAENIIHLFTLTNLGAPAAFKYFDTTIDRKRYTSTKEVLDATLIHQSITGLYETRIDLSQLGGDGGGGSGGSGGSGGTVSLQDEHRLFDIPVTTSLPDVWLQDFPQAWAETGGLGRAKCQAPIIIDLKPTAVPVSIKQYPMSLEAHMGIRQHIIKFLELGVLRPCRSPWNTPLLPVKKPGTQDYRPVQDLREINKRTVDIHPTVPNPYNLLSTLKPDYSWYTVLDLKDAFFCLPLAPQSQELFAFEWKDPERGISGQLTWTRLPQGFKNSPTLFNEALHRDLTDFRTQHPEVTLLQYVDDLLLAAPTKKACTQGTRHLLQELGEKGYRASAKKAQICQTKVTYLGYILSEGKRWLTPGRIETVARIPPPRNPREVREFLGKAGFCRLFIPGFAELAAPLYALTKPSTPFTWQTEHQLAFEALKKALLSAPALGLPDTSKPFTLFLDERQGIAKGVLTQKLGPWKRPVAYLSKKLDPVAAGWPPCLRIMAATAMLVKDSAKLTLGQPLTVITPHTLEAIVRQPPDRWITNARLTHYQALLLDTDRVQFGPPVTLNPATLLPVPENQPSPHDCRQVLAETHGTREDLKDQELPDADHTWYTDGSSYLDSGTRRAGAAVVDGHNTIWAQSLPPGTSAQKAELIALTKALELSKGKKANIYTDSRYAFATAHTHGSIYERRGWLTSEGKEIKNKAEIIALLKALFLPQEVAIIHCPGHQKGQDPVAVGNRQADRVARQAAMAEVLTLATEPDNTSHITAGKRTADGSEFEKRTADGSEFESPKKKAKVE

SEQ ID NO: 2031 - protein, 2097 aa, synthetic construct
MPAAKRVKLDGGDKKYSIGLDIGTNSVGWAVITDEYKVPSKKFKVLGNTDRHSIKKNLIGALLFDSGETAEATRLKRTARRRYTRRKNRICYLQEIFSNEMAKVDDSFFHRLEESFLVEEDKKHERHPIFGNIVDEVAYHEKYPTIYHLRKKLVDSTDKADLRLIYLALAHMIKFRGHFLIEGDLNPDNSDVDKLFIQLVQTYNQLFEENPINASGVDAKAILSARLSKSRRLENLIAQLPGEKKNGLFGNLIALSLGLTPNFKSNFDLAEDAKLQLSKDTYDDDLDNLLAQIGDQYADLFLAAKNLSDAILLSDILRVNTEITKAPLSASMIKRYDEHHQDLTLLKALVRQQLPEKYKEIFFDQSKNGYAGYIDGGASQEEFYKFIKPILEKMDGTEELLVKLNREDLLRKQRTFDNGSIPHQIHLGELHAILRRQEDFYPFLKDNREKIEKILTFRIPYYVGPLARGNSRFAWMTRKSEETITPWNFEEVVDKGASAQSFIERMTNFDKNLPNEKVLPKHSLLYEYFTVYNELTKVKYVTEGMRKPAFLSGEQKKAIVDLLFKTNRKVTVKQLKEDYFKKIECFDSVEISGVEDRFNASLGTYHDLLKIIKDKDFLDNEENEDILEDIVLTLTLFEDREMIEERLKTYAHLFDDKVMKQLKRRRYTGWGRLSRKLINGIRDKQSGKTILDFLKSDGFANRNFMQLIHDDSLTFKEDIQKAQVSGQGDSLHEHIANLAGSPAIKKGILQTVKVVDELVKVMGRHKPENIVIEMARENQTTQKGQKNSRERMKRIEEGIKELGSQILKEHPVENTQLQNEKLYLYYLQNGRDMYVDQELDINRLSDYDVDHIVPQSFLKDDSIDNKVLTRSDKARGKSDNVPSEEVVKKMKNYWRQLLNAKLITQRKFDNLTKAERGGLSELDKAGFIKRQLVETRQITKHVAQILDSRMNTKYDENDKLIREVKVITLKSKLVSDFRKDFQFYKVREINNYHHAHDAYLNAVVGTALIKKYPKLESEFVYGDYKVYDVRKMIAKSEQEIGKATAKYFFYSNIMNFFKTEITLANGEIRKRPLIETNGETGEIVWDKGRDFATVRKVLSMPQVNIVKKTEVQTGGFSKESILPKRNSDKLIARKKDWDPKKYGGFDSPTVAYSVLVVAKVEKGKSKKLKSVKELLGITIMERSSFEKNPIDFLEAKGYKEVKKDLIIKLPKYSLFELENGRKRMLASAGELQKGNELALPSKYVNFLYLASHYEKLKGSPEDNEQKQLFVEQHKHYLDEIIEQISEFSKRVILADANLDKVLSAYNKHRDKPIREQAENIIHLFTLTNLGAPAAFKYFDTTIDRKRYTSTKEVLDATLIHQSITGLYETRIDLSQLGGDGGGGSGSSGGTVSLQDEHRLFDIPVTTSLPDVWLQDFPQAWAETGGLGRAKCQAPIIIDLKPTAVPVSIKQYPMSLEAHMGIRQHIIKFLELGVLRPCRSPWNTPLLPVKKPGTQDYRPVQDLREINKRTVDIHPTVPNPYNLLSTLKPDYSWYTVLDLKDAFFCLPLAPQSQELFAFEWKDPERGISGQLTWTRLPQGFKNSPTLFNEALHRDLTDFRTQHPEVTLLQYVDDLLLAAPTKKACTQGTRHLLQELGEKGYRASAKKAQICQTKVTYLGYILSEGKRWLTPGRIETVARIPPPRNPREVREFLGKAGFCRLFIPGFAELAAPLYALTKPSTPFTWQTEHQLAFEALKKALLSAPALGLPDTSKPFTLFLDERQGIAKGVLTQKLGPWKRPVAYLSKKLDPVAAGWPPCLRIMAATAMLVKDSAKLTLGQPLTVITPHTLEAIVRQPPDRWITNARLTHYQALLLDTDRVQFGPPVTLNPATLLPVPENQPSPHDCRQVLAETHGTREDLKDQELPDADHTWYTDGSSYLDSGTRRAGAAVVDGHNTIWAQSLPPGTSAQKAELIALTKALELSKGKKANIYTDSRYAFATAHTHGSIYERRGWLTSEGKEIKNKAEIIALLKALFLPQEVAIIHCPGHQKGQDPVAVGNRQADRVARQAAMAEVLTLATEPDNTSHITAGKRTADGSEFEKRTADGSEFESPKKKAKVE

SEQ ID NO: 2032 - protein, 2097 aa, synthetic construct
MPAAKRVKLDGGDKKYSIGLDIGTNSVGWAVITDEYKVPSKKFKVLGNTDRHSIKKNLIGALLFDSGETAEATRLKRTARRRYTRRKNRICYLQEIFSNEMAKVDDSFFHRLEESFLVEEDKKHERHPIFGNIVDEVAYHEKYPTIYHLRKKLVDSTDKADLRLIYLALAHMIKFRGHFLIEGDLNPDNSDVDKLFIQLVQTYNQLFEENPINASGVDAKAILSARLSKSRRLENLIAQLPGEKKNGLFGNLIALSLGLTPNFKSNFDLAEDAKLQLSKDTYDDDLDNLLAQIGDQYADLFLAAKNLSDAILLSDILRVNTEITKAPLSASMIKRYDEHHQDLTLLKALVRQQLPEKYKEIFFDQSKNGYAGYIDGGASQEEFYKFIKPILEKMDGTEELLVKLNREDLLRKQRTFDNGSIPHQIHLGELHAILRRQEDFYPFLKDNREKIEKILTFRIPYYVGPLARGNSRFAWMTRKSEETITPWNFEEVVDKGASAQSFIERMTNFDKNLPNEKVLPKHSLLYEYFTVYNELTKVKYVTEGMRKPAFLSGEQKKAIVDLLFKTNRKVTVKQLKEDYFKKIECFDSVEISGVEDRFNASLGTYHDLLKIIKDKDFLDNEENEDILEDIVLTLTLFEDREMIEERLKTYAHLFDDKVMKQLKRRRYTGWGRLSRKLINGIRDKQSGKTILDFLKSDGFANRNFMQLIHDDSLTFKEDIQKAQVSGQGDSLHEHIANLAGSPAIKKGILQTVKVVDELVKVMGRHKPENIVIEMARENQTTQKGQKNSRERMKRIEEGIKELGSQILKEHPVENTQLQNEKLYLYYLQNGRDMYVDQELDINRLSDYDVDHIVPQSFLKDDSIDNKVLTRSDKARGKSDNVPSEEVVKKMKNYWRQLLNAKLITQRKFDNLTKAERGGLSELDKAGFIKRQLVETRQITKHVAQILDSRMNTKYDENDKLIREVKVITLKSKLVSDFRKDFQFYKVREINNYHHAHDAYLNAVVGTALIKKYPKLESEFVYGDYKVYDVRKMIAKSEQEIGKATAKYFFYSNIMNFFKTEITLANGEIRKRPLIETNGETGEIVWDKGRDFATVRKVLSMPQVNIVKKTEVQTGGFSKESILPKRNSDKLIARKKDWDPKKYGGFDSPTVAYSVLVVAKVEKGKSKKLKSVKELLGITIMERSSFEKNPIDFLEAKGYKEVKKDLIIKLPKYSLFELENGRKRMLASAGELQKGNELALPSKYVNFLYLASHYEKLKGSPEDNEQKQLFVEQHKHYLDEIIEQISEFSKRVILADANLDKVLSAYNKHRDKPIREQAENIIHLFTLTNLGAPAAFKYFDTTIDRKRYTSTKEVLDATLIHQSITGLYETRIDLSQLGGDGGPAPGGSGGTVSLQDEHRLFDIPVTTSLPDVWLQDFPQAWAETGGLGRAKCQAPIIIDLKPTAVPVSIKQYPMSLEAHMGIRQHIIKFLELGVLRPCRSPWNTPLLPVKKPGTQDYRPVQDLREINKRTVDIHPTVPNPYNLLSTLKPDYSWYTVLDLKDAFFCLPLAPQSQELFAFEWKDPERGISGQLTWTRLPQGFKNSPTLFNEALHRDLTDFRTQHPEVTLLQYVDDLLLAAPTKKACTQGTRHLLQELGEKGYRASAKKAQICQTKVTYLGYILSEGKRWLTPGRIETVARIPPPRNPREVREFLGKAGFCRLFIPGFAELAAPLYALTKPSTPFTWQTEHQLAFEALKKALLSAPALGLPDTSKPFTLFLDERQGIAKGVLTQKLGPWKRPVAYLSKKLDPVAAGWPPCLRIMAATAMLVKDSAKLTLGQPLTVITPHTLEAIVRQPPDRWITNARLTHYQALLLDTDRVQFGPPVTLNPATLLPVPENQPSPHDCRQVLAETHGTREDLKDQELPDADHTWYTDGSSYLDSGTRRAGAAVVDGHNTIWAQSLPPGTSAQKAELIALTKALELSKGKKANIYTDSRYAFATAHTHGSIYERRGWLTSEGKEIKNKAEIIALLKALFLPQEVAIIHCPGHQKGQDPVAVGNRQADRVARQAAMAEVLTLATEPDNTSHITAGKRTADGSEFEKRTADGSEFESPKKKAKVE

SEQ ID NO: 2033 - protein, 2094 aa, synthetic construct
MPAAKRVKLDGGDKKYSIGLDIGTNSVGWAVITDEYKVPSKKFKVLGNTDRHSIKKNLIGALLFDSGETAEATRLKRTARRRYTRRKNRICYLQEIFSNEMAKVDDSFFHRLEESFLVEEDKKHERHPIFGNIVDEVAYHEKYPTIYHLRKKLVDSTDKADLRLIYLALAHMIKFRGHFLIEGDLNPDNSDVDKLFIQLVQTYNQLFEENPINASGVDAKAILSARLSKSRRLENLIAQLPGEKKNGLFGNLIALSLGLTPNFKSNFDLAEDAKLQLSKDTYDDDLDNLLAQIGDQYADLFLAAKNLSDAILLSDILRVNTEITKAPLSASMIKRYDEHHQDLTLLKALVRQQLPEKYKEIFFDQSKNGYAGYIDGGASQEEFYKFIKPILEKMDGTEELLVKLNREDLLRKQRTFDNGSIPHQIHLGELHAILRRQEDFYPFLKDNREKIEKILTFRIPYYVGPLARGNSRFAWMTRKSEETITPWNFEEVVDKGASAQSFIERMTNFDKNLPNEKVLPKHSLLYEYFTVYNELTKVKYVTEGMRKPAFLSGEQKKAIVDLLFKTNRKVTVKQLKEDYFKKIECFDSVEISGVEDRFNASLGTYHDLLKIIKDKDFLDNEENEDILEDIVLTLTLFEDREMIEERLKTYAHLFDDKVMKQLKRRRYTGWGRLSRKLINGIRDKQSGKTILDFLKSDGFANRNFMQLIHDDSLTFKEDIQKAQVSGQGDSLHEHIANLAGSPAIKKGILQTVKVVDELVKVMGRHKPENIVIEMARENQTTQKGQKNSRERMKRIEEGIKELGSQILKEHPVENTQLQNEKLYLYYLQNGRDMYVDQELDINRLSDYDVDHIVPQSFLKDDSIDNKVLTRSDKARGKSDNVPSEEVVKKMKNYWRQLLNAKLITQRKFDNLTKAERGGLSELDKAGFIKRQLVETRQITKHVAQILDSRMNTKYDENDKLIREVKVITLKSKLVSDFRKDFQFYKVREINNYHHAHDAYLNAVVGTALIKKYPKLESEFVYGDYKVYDVRKMIAKSEQEIGKATAKYFFYSNIMNFFKTEITLANGEIRKRPLIETNGETGEIVWDKGRDFATVRKVLSMPQVNIVKKTEVQTGGFSKESILPKRNSDKLIARKKDWDPKKYGGFDSPTVAYSVLVVAKVEKGKSKKLKSVKELLGITIMERSSFEKNPIDFLEAKGYKEVKKDLIIKLPKYSLFELENGRKRMLASAGELQKGNELALPSKYVNFLYLASHYEKLKGSPEDNEQKQLFVEQHKHYLDEIIEQISEFSKRVILADANLDKVLSAYNKHRDKPIREQAENIIHLFTLTNLGAPAAFKYFDTTIDRKRYTSTKEVLDATLIHQSITGLYETRIDLSQLGGDGGGSSGGTVSLQDEHRLFDIPVTTSLPDVWLQDFPQAWAETGGLGRAKCQAPIIIDLKPTAVPVSIKQYPMSLEAHMGIRQHIIKFLELGVLRPCRSPWNTPLLPVKKPGTQDYRPVQDLREINKRTVDIHPTVPNPYNLLSTLKPDYSWYTVLDLKDAFFCLPLAPQSQELFAFEWKDPERGISGQLTWTRLPQGFKNSPTLFNEALHRDLTDFRTQHPEVTLLQYVDDLLLAAPTKKACTQGTRHLLQELGEKGYRASAKKAQICQTKVTYLGYILSEGKRWLTPGRIETVARIPPPRNPREVREFLGKAGFCRLFIPGFAELAAPLYALTKPSTPFTWQTEHQLAFEALKKALLSAPALGLPDTSKPFTLFLDERQGIAKGVLTQKLGPWKRPVAYLSKKLDPVAAGWPPCLRIMAATAMLVKDSAKLTLGQPLTVITPHTLEAIVRQPPDRWITNARLTHYQALLLDTDRVQFGPPVTLNPATLLPVPENQPSPHDCRQVLAETHGTREDLKDQELPDADHTWYTDGSSYLDSGTRRAGAAVVDGHNTIWAQSLPPGTSAQKAELIALTKALELSKGKKANIYTDSRYAFATAHTHGSIYERRGWLTSEGKEIKNKAEIIALLKALFLPQEVAIIHCPGHQKGQDPVAVGNRQADRVARQAAMAEVLTLATEPDNTSHITAGKRTADGSEFEKRTADGSEFESPKKKAKVE

SEQ ID NO: 2034 - protein, 2100 aa, synthetic construct
MPAAKRVKLDGGDKKYSIGLDIGTNSVGWAVITDEYKVPSKKFKVLGNTDRHSIKKNLIGALLFDSGETAEATRLKRTARRRYTRRKNRICYLQEIFSNEMAKVDDSFFHRLEESFLVEEDKKHERHPIFGNIVDEVAYHEKYPTIYHLRKKLVDSTDKADLRLIYLALAHMIKFRGHFLIEGDLNPDNSDVDKLFIQLVQTYNQLFEENPINASGVDAKAILSARLSKSRRLENLIAQLPGEKKNGLFGNLIALSLGLTPNFKSNFDLAEDAKLQLSKDTYDDDLDNLLAQIGDQYADLFLAAKNLSDAILLSDILRVNTEITKAPLSASMIKRYDEHHQDLTLLKALVRQQLPEKYKEIFFDQSKNGYAGYIDGGASQEEFYKFIKPILEKMDGTEELLVKLNREDLLRKQRTFDNGSIPHQIHLGELHAILRRQEDFYPFLKDNREKIEKILTFRIPYYVGPLARGNSRFAWMTRKSEETITPWNFEEVVDKGASAQSFIERMTNFDKNLPNEKVLPKHSLLYEYFTVYNELTKVKYVTEGMRKPAFLSGEQKKAIVDLLFKTNRKVTVKQLKEDYFKKIECFDSVEISGVEDRFNASLGTYHDLLKIIKDKDFLDNEENEDILEDIVLTLTLFEDREMIEERLKTYAHLFDDKVMKQLKRRRYTGWGRLSRKLINGIRDKQSGKTILDFLKSDGFANRNFMQLIHDDSLTFKEDIQKAQVSGQGDSLHEHIANLAGSPAIKKGILQTVKVVDELVKVMGRHKPENIVIEMARENQTTQKGQKNSRERMKRIEEGIKELGSQILKEHPVENTQLQNEKLYLYYLQNGRDMYVDQELDINRLSDYDVDHIVPQSFLKDDSIDNKVLTRSDKARGKSDNVPSEEVVKKMKNYWRQLLNAKLITQRKFDNLTKAERGGLSELDKAGFIKRQLVETRQITKHVAQILDSRMNTKYDENDKLIREVKVITLKSKLVSDFRKDFQFYKVREINNYHHAHDAYLNAVVGTALIKKYPKLESEFVYGDYKVYDVRKMIAKSEQEIGKATAKYFFYSNIMNFFKTEITLANGEIRKRPLIETNGETGEIVWDKGRDFATVRKVLSMPQVNIVKKTEVQTGGFSKESILPKRNSDKLIARKKDWDPKKYGGFDSPTVAYSVLVVAKVEKGKSKKLKSVKELLGITIMERSSFEKNPIDFLEAKGYKEVKKDLIIKLPKYSLFELENGRKRMLASAGELQKGNELALPSKYVNFLYLASHYEKLKGSPEDNEQKQLFVEQHKHYLDEIIEQISEFSKRVILADANLDKVLSAYNKHRDKPIREQAENIIHLFTLTNLGAPAAFKYFDTTIDRKRYTSTKEVLDATLIHQSITGLYETRIDLSQLGGDGGGGGGGSPAPGGTVSLQDEHRLFDIPVTTSLPDVWLQDFPQAWAETGGLGRAKCQAPIIIDLKPTAVPVSIKQYPMSLEAHMGIRQHIIKFLELGVLRPCRSPWNTPLLPVKKPGTQDYRPVQDLREINKRTVDIHPTVPNPYNLLSTLKPDYSWYTVLDLKDAFFCLPLAPQSQELFAFEWKDPERGISGQLTWTRLPQGFKNSPTLFNEALHRDLTDFRTQHPEVTLLQYVDDLLLAAPTKKACTQGTRHLLQELGEKGYRASAKKAQICQTKVTYLGYILSEGKRWLTPGRIETVARIPPPRNPREVREFLGKAGFCRLFIPGFAELAAPLYALTKPSTPFTWQTEHQLAFEALKKALLSAPALGLPDTSKPFTLFLDERQGIAKGVLTQKLGPWKRPVAYLSKKLDPVAAGWPPCLRIMAATAMLVKDSAKLTLGQPLTVITPHTLEAIVRQPPDRWITNARLTHYQALLLDTDRVQFGPPVTLNPATLLPVPENQPSPHDCRQVLAETHGTREDLKDQELPDADHTWYTDGSSYLDSGTRRAGAAVVDGHNTIWAQSLPPGTSAQKAELIALTKALELSKGKKANIYTDSRYAFATAHTHGSIYERRGWLTSEGKEIKNKAEIIALLKALFLPQEVAIIHCPGHQKGQDPVAVGNRQADRVARQAAMAEVLTLATEPDNTSHITAGKRTADGSEFEKRTADGSEFESPKKKAKVE

SEQ ID NO: 2035 - protein, 2109 aa, synthetic construct
MPAAKRVKLDGGDKKYSIGLDIGTNSVGWAVITDEYKVPSKKFKVLGNTDRHSIKKNLIGALLFDSGETAEATRLKRTARRRYTRRKNRICYLQEIFSNEMAKVDDSFFHRLEESFLVEEDKKHERHPIFGNIVDEVAYHEKYPTIYHLRKKLVDSTDKADLRLIYLALAHMIKFRGHFLIEGDLNPDNSDVDKLFIQLVQTYNQLFEENPINASGVDAKAILSARLSKSRRLENLIAQLPGEKKNGLFGNLIALSLGLTPNFKSNFDLAEDAKLQLSKDTYDDDLDNLLAQIGDQYADLFLAAKNLSDAILLSDILRVNTEITKAPLSASMIKRYDEHHQDLTLLKALVRQQLPEKYKEIFFDQSKNGYAGYIDGGASQEEFYKFIKPILEKMDGTEELLVKLNREDLLRKQRTFDNGSIPHQIHLGELHAILRRQEDFYPFLKDNREKIEKILTFRIPYYVGPLARGNSRFAWMTRKSEETITPWNFEEVVDKGASAQSFIERMTNFDKNLPNEKVLPKHSLLYEYFTVYNELTKVKYVTEGMRKPAFLSGEQKKAIVDLLFKTNRKVTVKQLKEDYFKKIECFDSVEISGVEDRFNASLGTYHDLLKIIKDKDFLDNEENEDILEDIVLTLTLFEDREMIEERLKTYAHLFDDKVMKQLKRRRYTGWGRLSRKLINGIRDKQSGKTILDFLKSDGFANRNFMQLIHDDSLTFKEDIQKAQVSGQGDSLHEHIANLAGSPAIKKGILQTVKVVDELVKVMGRHKPENIVIEMARENQTTQKGQKNSRERMKRIEEGIKELGSQILKEHPVENTQLQNEKLYLYYLQNGRDMYVDQELDINRLSDYDVDHIVPQSFLKDDSIDNKVLTRSDKARGKSDNVPSEEVVKKMKNYWRQLLNAKLITQRKFDNLTKAERGGLSELDKAGFIKRQLVETRQITKHVAQILDSRMNTKYDENDKLIREVKVITLKSKLVSDFRKDFQFYKVREINNYHHAHDAYLNAVVGTALIKKYPKLESEFVYGDYKVYDVRKMIAKSEQEIGKATAKYFFYSNIMNFFKTEITLANGEIRKRPLIETNGETGEIVWDKGRDFATVRKVLSMPQVNIVKKTEVQTGGFSKESILPKRNSDKLIARKKDWDPKKYGGFDSPTVAYSVLVVAKVEKGKSKKLKSVKELLGITIMERSSFEKNPIDFLEAKGYKEVKKDLIIKLPKYSLFELENGRKRMLASAGELQKGNELALPSKYVNFLYLASHYEKLKGSPEDNEQKQLFVEQHKHYLDEIIEQISEFSKRVILADANLDKVLSAYNKHRDKPIREQAENIIHLFTLTNLGAPAAFKYFDTTIDRKRYTSTKEVLDATLIHQSITGLYETRIDLSQLGGDGGGSSGSSGSSGSSGSSGSSGGTVSLQDEHRLFDIPVTTSLPDVWLQDFPQAWAETGGLGRAKCQAPIIIDLKPTAVPVSIKQYPMSLEAHMGIRQHIIKFLELGVLRPCRSPWNTPLLPVKKPGTQDYRPVQDLREINKRTVDIHPTVPNPYNLLSTLKPDYSWYTVLDLKDAFFCLPLAPQSQELFAFEWKDPERGISGQLTWTRLPQGFKNSPTLFNEALHRDLTDFRTQHPEVTLLQYVDDLLLAAPTKKACTQGTRHLLQELGEKGYRASAKKAQICQTKVTYLGYILSEGKRWLTPGRIETVARIPPPRNPREVREFLGKAGFCRLFIPGFAELAAPLYALTKPSTPFTWQTEHQLAFEALKKALLSAPALGLPDTSKPFTLFLDERQGIAKGVLTQKLGPWKRPVAYLSKKLDPVAAGWPPCLRIMAATAMLVKDSAKLTLGQPLTVITPHTLEAIVRQPPDRWITNARLTHYQALLLDTDRVQFGPPVTLNPATLLPVPENQPSPHDCRQVLAETHGTREDLKDQELPDADHTWYTDGSSYLDSGTRRAGAAVVDGHNTIWAQSLPPGTSAQKAELIALTKALELSKGKKANIYTDSRYAFATAHTHGSIYERRGWLTSEGKEIKNKAEIIALLKALFLPQEVAIIHCPGHQKGQDPVAVGNRQADRVARQAAMAEVLTLATEPDNTSHITAGKRTADGSEFEKRTADGSEFESPKKKAKVE

SEQ ID NO: 2036 - protein, 2097 aa, synthetic construct
MPAAKRVKLDGGDKKYSIGLDIGTNSVGWAVITDEYKVPSKKFKVLGNTDRHSIKKNLIGALLFDSGETAEATRLKRTARRRYTRRKNRICYLQEIFSNEMAKVDDSFFHRLEESFLVEEDKKHERHPIFGNIVDEVAYHEKYPTIYHLRKKLVDSTDKADLRLIYLALAHMIKFRGHFLIEGDLNPDNSDVDKLFIQLVQTYNQLFEENPINASGVDAKAILSARLSKSRRLENLIAQLPGEKKNGLFGNLIALSLGLTPNFKSNFDLAEDAKLQLSKDTYDDDLDNLLAQIGDQYADLFLAAKNLSDAILLSDILRVNTEITKAPLSASMIKRYDEHHQDLTLLKALVRQQLPEKYKEIFFDQSKNGYAGYIDGGASQEEFYKFIKPILEKMDGTEELLVKLNREDLLRKQRTFDNGSIPHQIHLGELHAILRRQEDFYPFLKDNREKIEKILTFRIPYYVGPLARGNSRFAWMTRKSEETITPWNFEEVVDKGASAQSFIERMTNFDKNLPNEKVLPKHSLLYEYFTVYNELTKVKYVTEGMRKPAFLSGEQKKAIVDLLFKTNRKVTVKQLKEDYFKKIECFDSVEISGVEDRFNASLGTYHDLLKIIKDKDFLDNEENEDILEDIVLTLTLFEDREMIEERLKTYAHLFDDKVMKQLKRRRYTGWGRLSRKLINGIRDKQSGKTILDFLKSDGFANRNFMQLIHDDSLTFKEDIQKAQVSGQGDSLHEHIANLAGSPAIKKGILQTVKVVDELVKVMGRHKPENIVIEMARENQTTQKGQKNSRERMKRIEEGIKELGSQILKEHPVENTQLQNEKLYLYYLQNGRDMYVDQELDINRLSDYDVDHIVPQSFLKDDSIDNKVLTRSDKARGKSDNVPSEEVVKKMKNYWRQLLNAKLITQRKFDNLTKAERGGLSELDKAGFIKRQLVETRQITKHVAQILDSRMNTKYDENDKLIREVKVITLKSKLVSDFRKDFQFYKVREINNYHHAHDAYLNAVVGTALIKKYPKLESEFVYGDYKVYDVRKMIAKSEQEIGKATAKYFFYSNIMNFFKTEITLANGEIRKRPLIETNGETGEIVWDKGRDFATVRKVLSMPQVNIVKKTEVQTGGFSKESILPKRNSDKLIARKKDWDPKKYGGFDSPTVAYSVLVVAKVEKGKSKKLKSVKELLGITIMERSSFEKNPIDFLEAKGYKEVKKDLIIKLPKYSLFELENGRKRMLASAGELQKGNELALPSKYVNFLYLASHYEKLKGSPEDNEQKQLFVEQHKHYLDEIIEQISEFSKRVILADANLDKVLSAYNKHRDKPIREQAENIIHLFTLTNLGAPAAFKYFDTTIDRKRYTSTKEVLDATLIHQSITGLYETRIDLSQLGGDGGPAPGSSGGTVSLQDEHRLFDIPVTTSLPDVWLQDFPQAWAETGGLGRAKCQAPIIIDLKPTAVPVSIKQYPMSLEAHMGIRQHIIKFLELGVLRPCRSPWNTPLLPVKKPGTQDYRPVQDLREINKRTVDIHPTVPNPYNLLSTLKPDYSWYTVLDLKDAFFCLPLAPQSQELFAFEWKDPERGISGQLTWTRLPQGFKNSPTLFNEALHRDLTDFRTQHPEVTLLQYVDDLLLAAPTKKACTQGTRHLLQELGEKGYRASAKKAQICQTKVTYLGYILSEGKRWLTPGRIETVARIPPPRNPREVREFLGKAGFCRLFIPGFAELAAPLYALTKPSTPFTWQTEHQLAFEALKKALLSAPALGLPDTSKPFTLFLDERQGIAKGVLTQKLGPWKRPVAYLSKKLDPVAAGWPPCLRIMAATAMLVKDSAKLTLGQPLTVITPHTLEAIVRQPPDRWITNARLTHYQALLLDTDRVQFGPPVTLNPATLLPVPENQPSPHDCRQVLAETHGTREDLKDQELPDADHTWYTDGSSYLDSGTRRAGAAVVDGHNTIWAQSLPPGTSAQKAELIALTKALELSKGKKANIYTDSRYAFATAHTHGSIYERRGWLTSEGKEIKNKAEIIALLKALFLPQEVAIIHCPGHQKGQDPVAVGNRQADRVARQAAMAEVLTLATEPDNTSHITAGKRTADGSEFEKRTADGSEFESPKKKAKVE

SEQ ID NO: 2037 - protein, 2102 aa, synthetic construct
MPAAKRVKLDGGDKKYSIGLDIGTNSVGWAVITDEYKVPSKKFKVLGNTDRHSIKKNLIGALLFDSGETAEATRLKRTARRRYTRRKNRICYLQEIFSNEMAKVDDSFFHRLEESFLVEEDKKHERHPIFGNIVDEVAYHEKYPTIYHLRKKLVDSTDKADLRLIYLALAHMIKFRGHFLIEGDLNPDNSDVDKLFIQLVQTYNQLFEENPINASGVDAKAILSARLSKSRRLENLIAQLPGEKKNGLFGNLIALSLGLTPNFKSNFDLAEDAKLQLSKDTYDDDLDNLLAQIGDQYADLFLAAKNLSDAILLSDILRVNTEITKAPLSASMIKRYDEHHQDLTLLKALVRQQLPEKYKEIFFDQSKNGYAGYIDGGASQEEFYKFIKPILEKMDGTEELLVKLNREDLLRKQRTFDNGSIPHQIHLGELHAILRRQEDFYPFLKDNREKIEKILTFRIPYYVGPLARGNSRFAWMTRKSEETITPWNFEEVVDKGASAQSFIERMTNFDKNLPNEKVLPKHSLLYEYFTVYNELTKVKYVTEGMRKPAFLSGEQKKAIVDLLFKTNRKVTVKQLKEDYFKKIECFDSVEISGVEDRFNASLGTYHDLLKIIKDKDFLDNEENEDILEDIVLTLTLFEDREMIEERLKTYAHLFDDKVMKQLKRRRYTGWGRLSRKLINGIRDKQSGKTILDFLKSDGFANRNFMQLIHDDSLTFKEDIQKAQVSGQGDSLHEHIANLAGSPAIKKGILQTVKVVDELVKVMGRHKPENIVIEMARENQTTQKGQKNSRERMKRIEEGIKELGSQILKEHPVENTQLQNEKLYLYYLQNGRDMYVDQELDINRLSDYDVDHIVPQSFLKDDSIDNKVLTRSDKARGKSDNVPSEEVVKKMKNYWRQLLNAKLITQRKFDNLTKAERGGLSELDKAGFIKRQLVETRQITKHVAQILDSRMNTKYDENDKLIREVKVITLKSKLVSDFRKDFQFYKVREINNYHHAHDAYLNAVVGTALIKKYPKLESEFVYGDYKVYDVRKMIAKSEQEIGKATAKYFFYSNIMNFFKTEITLANGEIRKRPLIETNGETGEIVWDKGRDFATVRKVLSMPQVNIVKKTEVQTGGFSKESILPKRNSDKLIARKKDWDPKKYGGFDSPTVAYSVLVVAKVEKGKSKKLKSVKELLGITIMERSSFEKNPIDFLEAKGYKEVKKDLIIKLPKYSLFELENGRKRMLASAGELQKGNELALPSKYVNFLYLASHYEKLKGSPEDNEQKQLFVEQHKHYLDEIIEQISEFSKRVILADANLDKVLSAYNKHRDKPIREQAENIIHLFTLTNLGAPAAFKYFDTTIDRKRYTSTKEVLDATLIHQSITGLYETRIDLSQLGGDGGGSSEAAAKPAPGGTVSLQDEHRLFDIPVTTSLPDVWLQDFPQAWAETGGLGRAKCQAPIIIDLKPTAVPVSIKQYPMSLEAHMGIRQHIIKFLELGVLRPCRSPWNTPLLPVKKPGTQDYRPVQDLREINKRTVDIHPTVPNPYNLLSTLKPDYSWYTVLDLKDAFFCLPLAPQSQELFAFEWKDPERGISGQLTWTRLPQGFKNSPTLFNEALHRDLTDFRTQHPEVTLLQYVDDLLLAAPTKKACTQGTRHLLQELGEKGYRASAKKAQICQTKVTYLGYILSEGKRWLTPGRIETVARIPPPRNPREVREFLGKAGFCRLFIPGFAELAAPLYALTKPSTPFTWQTEHQLAFEALKKALLSAPALGLPDTSKPFTLFLDERQGIAKGVLTQKLGPWKRPVAYLSKKLDPVAAGWPPCLRIMAATAMLVKDSAKLTLGQPLTVITPHTLEAIVRQPPDRWITNARLTHYQALLLDTDRVQFGPPVTLNPATLLPVPENQPSPHDCRQVLAETHGTREDLKDQELPDADHTWYTDGSSYLDSGTRRAGAAVVDGHNTIWAQSLPPGTSAQKAELIALTKALELSKGKKANIYTDSRYAFATAHTHGSIYERRGWLTSEGKEIKNKAEIIALLKALFLPQEVAIIHCPGHQKGQDPVAVGNRQADRVARQAAMAEVLTLATEPDNTSHITAGKRTADGSEFEKRTADGSEFESPKKKAKVE

SEQ ID NO: 2038 - protein, 2100 aa, synthetic construct
MPAAKRVKLDGGDKKYSIGLDIGTNSVGWAVITDEYKVPSKKFKVLGNTDRHSIKKNLIGALLFDSGETAEATRLKRTARRRYTRRKNRICYLQEIFSNEMAKVDDSFFHRLEESFLVEEDKKHERHPIFGNIVDEVAYHEKYPTIYHLRKKLVDSTDKADLRLIYLALAHMIKFRGHFLIEGDLNPDNSDVDKLFIQLVQTYNQLFEENPINASGVDAKAILSARLSKSRRLENLIAQLPGEKKNGLFGNLIALSLGLTPNFKSNFDLAEDAKLQLSKDTYDDDLDNLLAQIGDQYADLFLAAKNLSDAILLSDILRVNTEITKAPLSASMIKRYDEHHQDLTLLKALVRQQLPEKYKEIFFDQSKNGYAGYIDGGASQEEFYKFIKPILEKMDGTEELLVKLNREDLLRKQRTFDNGSIPHQIHLGELHAILRRQEDFYPFLKDNREKIEKILTFRIPYYVGPLARGNSRFAWMTRKSEETITPWNFEEVVDKGASAQSFIERMTNFDKNLPNEKVLPKHSLLYEYFTVYNELTKVKYVTEGMRKPAFLSGEQKKAIVDLLFKTNRKVTVKQLKEDYFKKIECFDSVEISGVEDRFNASLGTYHDLLKIIKDKDFLDNEENEDILEDIVLTLTLFEDREMIEERLKTYAHLFDDKVMKQLKRRRYTGWGRLSRKLINGIRDKQSGKTILDFLKSDGFANRNFMQLIHDDSLTFKEDIQKAQVSGQGDSLHEHIANLAGSPAIKKGILQTVKVVDELVKVMGRHKPENIVIEMARENQTTQKGQKNSRERMKRIEEGIKELGSQILKEHPVENTQLQNEKLYLYYLQNGRDMYVDQELDINRLSDYDVDHIVPQSFLKDDSIDNKVLTRSDKARGKSDNVPSEEVVKKMKNYWRQLLNAKLITQRKFDNLTKAERGGLSELDKAGFIKRQLVETRQITKHVAQILDSRMNTKYDENDKLIREVKVITLKSKLVSDFRKDFQFYKVREINNYHHAHDAYLNAVVGTALIKKYPKLESEFVYGDYKVYDVRKMIAKSEQEIGKATAKYFFYSNIMNFFKTEITLANGEIRKRPLIETNGETGEIVWDKGRDFATVRKVLSMPQVNIVKKTEVQTGGFSKESILPKRNSDKLIARKKDWDPKKYGGFDSPTVAYSVLVVAKVEKGKSKKLKSVKELLGITIMERSSFEKNPIDFLEAKGYKEVKKDLIIKLPKYSLFELENGRKRMLASAGELQKGNELALPSKYVNFLYLASHYEKLKGSPEDNEQKQLFVEQHKHYLDEIIEQISEFSKRVILADANLDKVLSAYNKHRDKPIREQAENIIHLFTLTNLGAPAAFKYFDTTIDRKRYTSTKEVLDATLIHQSITGLYETRIDLSQLGGDGGGGSGGGGSSGGTVSLQDEHRLFDIPVTTSLPDVWLQDFPQAWAETGGLGRAKCQAPIIIDLKPTAVPVSIKQYPMSLEAHMGIRQHIIKFLELGVLRPCRSPWNTPLLPVKKPGTQDYRPVQDLREINKRTVDIHPTVPNPYNLLSTLKPDYSWYTVLDLKDAFFCLPLAPQSQELFAFEWKDPERGISGQLTWTRLPQGFKNSPTLFNEALHRDLTDFRTQHPEVTLLQYVDDLLLAAPTKKACTQGTRHLLQELGEKGYRASAKKAQICQTKVTYLGYILSEGKRWLTPGRIETVARIPPPRNPREVREFLGKAGFCRLFIPGFAELAAPLYALTKPSTPFTWQTEHQLAFEALKKALLSAPALGLPDTSKPFTLFLDERQGIAKGVLTQKLGPWKRPVAYLSKKLDPVAAGWPPCLRIMAATAMLVKDSAKLTLGQPLTVITPHTLEAIVRQPPDRWITNARLTHYQALLLDTDRVQFGPPVTLNPATLLPVPENQPSPHDCRQVLAETHGTREDLKDQELPDADHTWYTDGSSYLDSGTRRAGAAVVDGHNTIWAQSLPPGTSAQKAELIALTKALELSKGKKANIYTDSRYAFATAHTHGSIYERRGWLTSEGKEIKNKAEIIALLKALFLPQEVAIIHCPGHQKGQDPVAVGNRQADRVARQAAMAEVLTLATEPDNTSHITAGKRTADGSEFEKRTADGSEFESPKKKAKVE

SEQ ID NO: 2039 - protein, 2102 aa, synthetic construct
MPAAKRVKLDGGDKKYSIGLDIGTNSVGWAVITDEYKVPSKKFKVLGNTDRHSIKKNLIGALLFDSGETAEATRLKRTARRRYTRRKNRICYLQEIFSNEMAKVDDSFFHRLEESFLVEEDKKHERHPIFGNIVDEVAYHEKYPTIYHLRKKLVDSTDKADLRLIYLALAHMIKFRGHFLIEGDLNPDNSDVDKLFIQLVQTYNQLFEENPINASGVDAKAILSARLSKSRRLENLIAQLPGEKKNGLFGNLIALSLGLTPNFKSNFDLAEDAKLQLSKDTYDDDLDNLLAQIGDQYADLFLAAKNLSDAILLSDILRVNTEITKAPLSASMIKRYDEHHQDLTLLKALVRQQLPEKYKEIFFDQSKNGYAGYIDGGASQEEFYKFIKPILEKMDGTEELLVKLNREDLLRKQRTFDNGSIPHQIHLGELHAILRRQEDFYPFLKDNREKIEKILTFRIPYYVGPLARGNSRFAWMTRKSEETITPWNFEEVVDKGASAQSFIERMTNFDKNLPNEKVLPKHSLLYEYFTVYNELTKVKYVTEGMRKPAFLSGEQKKAIVDLLFKTNRKVTVKQLKEDYFKKIECFDSVEISGVEDRFNASLGTYHDLLKIIKDKDFLDNEENEDILEDIVLTLTLFEDREMIEERLKTYAHLFDDKVMKQLKRRRYTGWGRLSRKLINGIRDKQSGKTILDFLKSDGFANRNFMQLIHDDSLTFKEDIQKAQVSGQGDSLHEHIANLAGSPAIKKGILQTVKVVDELVKVMGRHKPENIVIEMARENQTTQKGQKNSRERMKRIEEGIKELGSQILKEHPVENTQLQNEKLYLYYLQNGRDMYVDQELDINRLSDYDVDHIVPQSFLKDDSIDNKVLTRSDKARGKSDNVPSEEVVKKMKNYWRQLLNAKLITQRKFDNLTKAERGGLSELDKAGFIKRQLVETRQITKHVAQILDSRMNTKYDENDKLIREVKVITLKSKLVSDFRKDFQFYKVREINNYHHAHDAYLNAVVGTALIKKYPKLESEFVYGDYKVYDVRKMIAKSEQEIGKATAKYFFYSNIMNFFKTEITLANGEIRKRPLIETNGETGEIVWDKGRDFATVRKVLSMPQVNIVKKTEVQTGGFSKESILPKRNSDKLIARKKDWDPKKYGGFDSPTVAYSVLVVAKVEKGKSKKLKSVKELLGITIMERSSFEKNPIDFLEAKGYKEVKKDLIIKLPKYSLFELENGRKRMLASAGELQKGNELALPSKYVNFLYLASHYEKLKGSPEDNEQKQLFVEQHKHYLDEIIEQISEFSKRVILADANLDKVLSAYNKHRDKPIREQAENIIHLFTLTNLGAPAAFKYFDTTIDRKRYTSTKEVLDATLIHQSITGLYETRIDLSQLGGDGGEAAAKGSSPAPGGTVSLQDEHRLFDIPVTTSLPDVWLQDFPQAWAETGGLGRAKCQAPIIIDLKPTAVPVSIKQYPMSLEAHMGIRQHIIKFLELGVLRPCRSPWNTPLLPVKKPGTQDYRPVQDLREINKRTVDIHPTVPNPYNLLSTLKPDYSWYTVLDLKDAFFCLPLAPQSQELFAFEWKDPERGISGQLTWTRLPQGFKNSPTLFNEALHRDLTDFRTQHPEVTLLQYVDDLLLAAPTKKACTQGTRHLLQELGEKGYRASAKKAQICQTKVTYLGYILSEGKRWLTPGRIETVARIPPPRNPREVREFLGKAGFCRLFIPGFAELAAPLYALTKPSTPFTWQTEHQLAFEALKKALLSAPALGLPDTSKPFTLFLDERQGIAKGVLTQKLGPWKRPVAYLSKKLDPVAAGWPPCLRIMAATAMLVKDSAKLTLGQPLTVITPHTLEAIVRQPPDRWITNARLTHYQALLLDTDRVQFGPPVTLNPATLLPVPENQPSPHDCRQVLAETHGTREDLKDQELPDADHTWYTDGSSYLDSGTRRAGAAVVDGHNTIWAQSLPPGTSAQKAELIALTKALELSKGKKANIYTDSRYAFATAHTHGSIYERRGWLTSEGKEIKNKAEIIALLKALFLPQEVAIIHCPGHQKGQDPVAVGNRQADRVARQAAMAEVLTLATEPDNTSHITAGKRTADGSEFEKRTADGSEFESPKKKAKVE

SEQ ID NO: 2040 - protein, 2102 aa, synthetic construct
MPAAKRVKLDGGDKKYSIGLDIGTNSVGWAVITDEYKVPSKKFKVLGNTDRHSIKKNLIGALLFDSGETAEATRLKRTARRRYTRRKNRICYLQEIFSNEMAKVDDSFFHRLEESFLVEEDKKHERHPIFGNIVDEVAYHEKYPTIYHLRKKLVDSTDKADLRLIYLALAHMIKFRGHFLIEGDLNPDNSDVDKLFIQLVQTYNQLFEENPINASGVDAKAILSARLSKSRRLENLIAQLPGEKKNGLFGNLIALSLGLTPNFKSNFDLAEDAKLQLSKDTYDDDLDNLLAQIGDQYADLFLAAKNLSDAILLSDILRVNTEITKAPLSASMIKRYDEHHQDLTLLKALVRQQLPEKYKEIFFDQSKNGYAGYIDGGASQEEFYKFIKPILEKMDGTEELLVKLNREDLLRKQRTFDNGSIPHQIHLGELHAILRRQEDFYPFLKDNREKIEKILTFRIPYYVGPLARGNSRFAWMTRKSEETITPWNFEEVVDKGASAQSFIERMTNFDKNLPNEKVLPKHSLLYEYFTVYNELTKVKYVTEGMRKPAFLSGEQKKAIVDLLFKTNRKVTVKQLKEDYFKKIECFDSVEISGVEDRFNASLGTYHDLLKIIKDKDFLDNEENEDILEDIVLTLTLFEDREMIEERLKTYAHLFDDKVMKQLKRRRYTGWGRLSRKLINGIRDKQSGKTILDFLKSDGFANRNFMQLIHDDSLTFKEDIQKAQVSGQGDSLHEHIANLAGSPAIKKGILQTVKVVDELVKVMGRHKPENIVIEMARENQTTQKGQKNSRERMKRIEEGIKELGSQILKEHPVENTQLQNEKLYLYYLQNGRDMYVDQELDINRLSDYDVDHIVPQSFLKDDSIDNKVLTRSDKARGKSDNVPSEEVVKKMKNYWRQLLNAKLITQRKFDNLTKAERGGLSELDKAGFIKRQLVETRQITKHVAQILDSRMNTKYDENDKLIREVKVITLKSKLVSDFRKDFQFYKVREINNYHHAHDAYLNAVVGTALIKKYPKLESEFVYGDYKVYDVRKMIAKSEQEIGKATAKYFFYSNIMNFFKTEITLANGEIRKRPLIETNGETGEIVWDKGRDFATVRKVLSMPQVNIVKKTEVQTGGFSKESILPKRNSDKLIARKKDWDPKKYGGFDSPTVAYSVLVVAKVEKGKSKKLKSVKELLGITIMERSSFEKNPIDFLEAKGYKEVKKDLIIKLPKYSLFELENGRKRMLASAGELQKGNELALPSKYVNFLYLASHYEKLKGSPEDNEQKQLFVEQHKHYLDEIIEQISEFSKRVILADANLDKVLSAYNKHRDKPIREQAENIIHLFTLTNLGAPAAFKYFDTTIDRKRYTSTKEVLDATLIHQSITGLYETRIDLSQLGGDGGPAPEAAAKGSSGGTVSLQDEHRLFDIPVTTSLPDVWLQDFPQAWAETGGLGRAKCQAPIIIDLKPTAVPVSIKQYPMSLEAHMGIRQHIIKFLELGVLRPCRSPWNTPLLPVKKPGTQDYRPVQDLREINKRTVDIHPTVPNPYNLLSTLKPDYSWYTVLDLKDAFFCLPLAPQSQELFAFEWKDPERGISGQLTWTRLPQGFKNSPTLFNEALHRDLTDFRTQHPEVTLLQYVDDLLLAAPTKKACTQGTRHLLQELGEKGYRASAKKAQICQTKVTYLGYILSEGKRWLTPGRIETVARIPPPRNPREVREFLGKAGFCRLFIPGFAELAAPLYALTKPSTPFTWQTEHQLAFEALKKALLSAPALGLPDTSKPFTLFLDERQGIAKGVLTQKLGPWKRPVAYLSKKLDPVAAGWPPCLRIMAATAMLVKDSAKLTLGQPLTVITPHTLEAIVRQPPDRWITNARLTHYQALLLDTDRVQFGPPVTLNPATLLPVPENQPSPHDCRQVLAETHGTREDLKDQELPDADHTWYTDGSSYLDSGTRRAGAAVVDGHNTIWAQSLPPGTSAQKAELIALTKALELSKGKKANIYTDSRYAFATAHTHGSIYERRGWLTSEGKEIKNKAEIIALLKALFLPQEVAIIHCPGHQKGQDPVAVGNRQADRVARQAAMAEVLTLATEPDNTSHITAGKRTADGSEFEKRTADGSEFESPKKKAKVE

SEQ ID NO: 2041 - protein, 2102 aa, synthetic construct
MPAAKRVKLDGGDKKYSIGLDIGTNSVGWAVITDEYKVPSKKFKVLGNTDRHSIKKNLIGALLFDSGETAEATRLKRTARRRYTRRKNRICYLQEIFSNEMAKVDDSFFHRLEESFLVEEDKKHERHPIFGNIVDEVAYHEKYPTIYHLRKKLVDSTDKADLRLIYLALAHMIKFRGHFLIEGDLNPDNSDVDKLFIQLVQTYNQLFEENPINASGVDAKAILSARLSKSRRLENLIAQLPGEKKNGLFGNLIALSLGLTPNFKSNFDLAEDAKLQLSKDTYDDDLDNLLAQIGDQYADLFLAAKNLSDAILLSDILRVNTEITKAPLSASMIKRYDEHHQDLTLLKALVRQQLPEKYKEIFFDQSKNGYAGYIDGGASQEEFYKFIKPILEKMDGTEELLVKLNREDLLRKQRTFDNGSIPHQIHLGELHAILRRQEDFYPFLKDNREKIEKILTFRIPYYVGPLARGNSRFAWMTRKSEETITPWNFEEVVDKGASAQSFIERMTNFDKNLPNEKVLPKHSLLYEYFTVYNELTKVKYVTEGMRKPAFLSGEQKKAIVDLLFKTNRKVTVKQLKEDYFKKIECFDSVEISGVEDRFNASLGTYHDLLKIIKDKDFLDNEENEDILEDIVLTLTLFEDREMIEERLKTYAHLFDDKVMKQLKRRRYTGWGRLSRKLINGIRDKQSGKTILDFLKSDGFANRNFMQLIHDDSLTFKEDIQKAQVSGQGDSLHEHIANLAGSPAIKKGILQTVKVVDELVKVMGRHKPENIVIEMARENQTTQKGQKNSRERMKRIEEGIKELGSQILKEHPVENTQLQNEKLYLYYLQNGRDMYVDQELDINRLSDYDVDHIVPQSFLKDDSIDNKVLTRSDKARGKSDNVPSEEVVKKMKNYWRQLLNAKLITQRKFDNLTKAERGGLSELDKAGFIKRQLVETRQITKHVAQILDSRMNTKYDENDKLIREVKVITLKSKLVSDFRKDFQFYKVREINNYHHAHDAYLNAVVGTALIKKYPKLESEFVYGDYKVYDVRKMIAKSEQEIGKATAKYFFYSNIMNFFKTEITLANGEIRKRPLIETNGETGEIVWDKGRDFATVRKVLSMPQVNIVKKTEVQTGGFSKESILPKRNSDKLIARKKDWDPKKYGGFDSPTVAYSVLVVAKVEKGKSKKLKSVKELLGITIMERSSFEKNPIDFLEAKGYKEVKKDLIIKLPKYSLFELENGRKRMLASAGELQKGNELALPSKYVNFLYLASHYEKLKGSPEDNEQKQLFVEQHKHYLDEIIEQISEFSKRVILADANLDKVLSAYNKHRDKPIREQAENIIHLFTLTNLGAPAAFKYFDTTIDRKRYTSTKEVLDATLIHQSITGLYETRIDLSQLGGDGGEAAAKGGGPAPGGTVSLQDEHRLFDIPVTTSLPDVWLQDFPQAWAETGGLGRAKCQAPIIIDLKPTAVPVSIKQYPMSLEAHMGIRQHIIKFLELGVLRPCRSPWNTPLLPVKKPGTQDYRPVQDLREINKRTVDIHPTVPNPYNLLSTLKPDYSWYTVLDLKDAFFCLPLAPQSQELFAFEWKDPERGISGQLTWTRLPQGFKNSPTLFNEALHRDLTDFRTQHPEVTLLQYVDDLLLAAPTKKACTQGTRHLLQELGEKGYRASAKKAQICQTKVTYLGYILSEGKRWLTPGRIETVARIPPPRNPREVREFLGKAGFCRLFIPGFAELAAPLYALTKPSTPFTWQTEHQLAFEALKKALLSAPALGLPDTSKPFTLFLDERQGIAKGVLTQKLGPWKRPVAYLSKKLDPVAAGWPPCLRIMAATAMLVKDSAKLTLGQPLTVITPHTLEAIVRQPPDRWITNARLTHYQALLLDTDRVQFGPPVTLNPATLLPVPENQPSPHDCRQVLAETHGTREDLKDQELPDADHTWYTDGSSYLDSGTRRAGAAVVDGHNTIWAQSLPPGTSAQKAELIALTKALELSKGKKANIYTDSRYAFATAHTHGSIYERRGWLTSEGKEIKNKAEIIALLKALFLPQEVAIIHCPGHQKGQDPVAVGNRQADRVARQAAMAEVLTLATEPDNTSHITAGKRTADGSEFEKRTADGSEFESPKKKAKVE

SEQ ID NO: 2042 - protein, 2100 aa, synthetic construct
MPAAKRVKLDGGDKKYSIGLDIGTNSVGWAVITDEYKVPSKKFKVLGNTDRHSIKKNLIGALLFDSGETAEATRLKRTARRRYTRRKNRICYLQEIFSNEMAKVDDSFFHRLEESFLVEEDKKHERHPIFGNIVDEVAYHEKYPTIYHLRKKLVDSTDKADLRLIYLALAHMIKFRGHFLIEGDLNPDNSDVDKLFIQLVQTYNQLFEENPINASGVDAKAILSARLSKSRRLENLIAQLPGEKKNGLFGNLIALSLGLTPNFKSNFDLAEDAKLQLSKDTYDDDLDNLLAQIGDQYADLFLAAKNLSDAILLSDILRVNTEITKAPLSASMIKRYDEHHQDLTLLKALVRQQLPEKYKEIFFDQSKNGYAGYIDGGASQEEFYKFIKPILEKMDGTEELLVKLNREDLLRKQRTFDNGSIPHQIHLGELHAILRRQEDFYPFLKDNREKIEKILTFRIPYYVGPLARGNSRFAWMTRKSEETITPWNFEEVVDKGASAQSFIERMTNFDKNLPNEKVLPKHSLLYEYFTVYNELTKVKYVTEGMRKPAFLSGEQKKAIVDLLFKTNRKVTVKQLKEDYFKKIECFDSVEISGVEDRFNASLGTYHDLLKIIKDKDFLDNEENEDILEDIVLTLTLFEDREMIEERLKTYAHLFDDKVMKQLKRRRYTGWGRLSRKLINGIRDKQSGKTILDFLKSDGFANRNFMQLIHDDSLTFKEDIQKAQVSGQGDSLHEHIANLAGSPAIKKGILQTVKVVDELVKVMGRHKPENIVIEMARENQTTQKGQKNSRERMKRIEEGIKELGSQILKEHPVENTQLQNEKLYLYYLQNGRDMYVDQELDINRLSDYDVDHIVPQSFLKDDSIDNKVLTRSDKARGKSDNVPSEEVVKKMKNYWRQLLNAKLITQRKFDNLTKAERGGLSELDKAGFIKRQLVETRQITKHVAQILDSRMNTKYDENDKLIREVKVITLKSKLVSDFRKDFQFYKVREINNYHHAHDAYLNAVVGTALIKKYPKLESEFVYGDYKVYDVRKMIAKSEQEIGKATAKYFFYSNIMNFFKTEITLANGEIRKRPLIETNGETGEIVWDKGRDFATVRKVLSMPQVNIVKKTEVQTGGFSKESILPKRNSDKLIARKKDWDPKKYGGFDSPTVAYSVLVVAKVEKGKSKKLKSVKELLGITIMERSSFEKNPIDFLEAKGYKEVKKDLIIKLPKYSLFELENGRKRMLASAGELQKGNELALPSKYVNFLYLASHYEKLKGSPEDNEQKQLFVEQHKHYLDEIIEQISEFSKRVILADANLDKVLSAYNKHRDKPIREQAENIIHLFTLTNLGAPAAFKYFDTTIDRKRYTSTKEVLDATLIHQSITGLYETRIDLSQLGGDGGGSSGSSGSSGGTVSLQDEHRLFDIPVTTSLPDVWLQDFPQAWAETGGLGRAKCQAPIIIDLKPTAVPVSIKQYPMSLEAHMGIRQHIIKFLELGVLRPCRSPWNTPLLPVKKPGTQDYRPVQDLREINKRTVDIHPTVPNPYNLLSTLKPDYSWYTVLDLKDAFFCLPLAPQSQELFAFEWKDPERGISGQLTWTRLPQGFKNSPTLFNEALHRDLTDFRTQHPEVTLLQYVDDLLLAAPTKKACTQGTRHLLQELGEKGYRASAKKAQICQTKVTYLGYILSEGKRWLTPGRIETVARIPPPRNPREVREFLGKAGFCRLFIPGFAELAAPLYALTKPSTPFTWQTEHQLAFEALKKALLSAPALGLPDTSKPFTLFLDERQGIAKGVLTQKLGPWKRPVAYLSKKLDPVAAGWPPCLRIMAATAMLVKDSAKLTLGQPLTVITPHTLEAIVRQPPDRWITNARLTHYQALLLDTDRVQFGPPVTLNPATLLPVPENQPSPHDCRQVLAETHGTREDLKDQELPDADHTWYTDGSSYLDSGTRRAGAAVVDGHNTIWAQSLPPGTSAQKAELIALTKALELSKGKKANIYTDSRYAFATAHTHGSIYERRGWLTSEGKEIKNKAEIIALLKALFLPQEVAIIHCPGHQKGQDPVAVGNRQADRVARQAAMAEVLTLATEPDNTSHITAGKRTADGSEFEKRTADGSEFESPKKKAKVE

SEQ ID NO: 2043 - protein, 2106 aa, synthetic construct
MPAAKRVKLDGGDKKYSIGLDIGTNSVGWAVITDEYKVPSKKFKVLGNTDRHSIKKNLIGALLFDSGETAEATRLKRTARRRYTRRKNRICYLQEIFSNEMAKVDDSFFHRLEESFLVEEDKKHERHPIFGNIVDEVAYHEKYPTIYHLRKKLVDSTDKADLRLIYLALAHMIKFRGHFLIEGDLNPDNSDVDKLFIQLVQTYNQLFEENPINASGVDAKAILSARLSKSRRLENLIAQLPGEKKNGLFGNLIALSLGLTPNFKSNFDLAEDAKLQLSKDTYDDDLDNLLAQIGDQYADLFLAAKNLSDAILLSDILRVNTEITKAPLSASMIKRYDEHHQDLTLLKALVRQQLPEKYKEIFFDQSKNGYAGYIDGGASQEEFYKFIKPILEKMDGTEELLVKLNREDLLRKQRTFDNGSIPHQIHLGELHAILRRQEDFYPFLKDNREKIEKILTFRIPYYVGPLARGNSRFAWMTRKSEETITPWNFEEVVDKGASAQSFIERMTNFDKNLPNEKVLPKHSLLYEYFTVYNELTKVKYVTEGMRKPAFLSGEQKKAIVDLLFKTNRKVTVKQLKEDYFKKIECFDSVEISGVEDRFNASLGTYHDLLKIIKDKDFLDNEENEDILEDIVLTLTLFEDREMIEERLKTYAHLFDDKVMKQLKRRRYTGWGRLSRKLINGIRDKQSGKTILDFLKSDGFANRNFMQLIHDDSLTFKEDIQKAQVSGQGDSLHEHIANLAGSPAIKKGILQTVKVVDELVKVMGRHKPENIVIEMARENQTTQKGQKNSRERMKRIEEGIKELGSQILKEHPVENTQLQNEKLYLYYLQNGRDMYVDQELDINRLSDYDVDHIVPQSFLKDDSIDNKVLTRSDKARGKSDNVPSEEVVKKMKNYWRQLLNAKLITQRKFDNLTKAERGGLSELDKAGFIKRQLVETRQITKHVAQILDSRMNTKYDENDKLIREVKVITLKSKLVSDFRKDFQFYKVREINNYHHAHDAYLNAVVGTALIKKYPKLESEFVYGDYKVYDVRKMIAKSEQEIGKATAKYFFYSNIMNFFKTEITLANGEIRKRPLIETNGETGEIVWDKGRDFATVRKVLSMPQVNIVKKTEVQTGGFSKESILPKRNSDKLIARKKDWDPKKYGGFDSPTVAYSVLVVAKVEKGKSKKLKSVKELLGITIMERSSFEKNPIDFLEAKGYKEVKKDLIIKLPKYSLFELENGRKRMLASAGELQKGNELALPSKYVNFLYLASHYEKLKGSPEDNEQKQLFVEQHKHYLDEIIEQISEFSKRVILADANLDKVLSAYNKHRDKPIREQAENIIHLFTLTNLGAPAAFKYFDTTIDRKRYTSTKEVLDATLIHQSITGLYETRIDLSQLGGDGGEAAAKEAAAKEAAAKGGTVSLQDEHRLFDIPVTTSLPDVWLQDFPQAWAETGGLGRAKCQAPIIIDLKPTAVPVSIKQYPMSLEAHMGIRQHIIKFLELGVLRPCRSPWNTPLLPVKKPGTQDYRPVQDLREINKRTVDIHPTVPNPYNLLSTLKPDYSWYTVLDLKDAFFCLPLAPQSQELFAFEWKDPERGISGQLTWTRLPQGFKNSPTLFNEALHRDLTDFRTQHPEVTLLQYVDDLLLAAPTKKACTQGTRHLLQELGEKGYRASAKKAQICQTKVTYLGYILSEGKRWLTPGRIETVARIPPPRNPREVREFLGKAGFCRLFIPGFAELAAPLYALTKPSTPFTWQTEHQLAFEALKKALLSAPALGLPDTSKPFTLFLDERQGIAKGVLTQKLGPWKRPVAYLSKKLDPVAAGWPPCLRIMAATAMLVKDSAKLTLGQPLTVITPHTLEAIVRQPPDRWITNARLTHYQALLLDTDRVQFGPPVTLNPATLLPVPENQPSPHDCRQVLAETHGTREDLKDQELPDADHTWYTDGSSYLDSGTRRAGAAVVDGHNTIWAQSLPPGTSAQKAELIALTKALELSKGKKANIYTDSRYAFATAHTHGSIYERRGWLTSEGKEIKNKAEIIALLKALFLPQEVAIIHCPGHQKGQDPVAVGNRQADRVARQAAMAEVLTLATEPDNTSHITAGKRTADGSEFEKRTADGSEFESPKKKAKVE

SEQ ID NO: 2044 - protein, 2102 aa, synthetic construct
MPAAKRVKLDGGDKKYSIGLDIGTNSVGWAVITDEYKVPSKKFKVLGNTDRHSIKKNLIGALLFDSGETAEATRLKRTARRRYTRRKNRICYLQEIFSNEMAKVDDSFFHRLEESFLVEEDKKHERHPIFGNIVDEVAYHEKYPTIYHLRKKLVDSTDKADLRLIYLALAHMIKFRGHFLIEGDLNPDNSDVDKLFIQLVQTYNQLFEENPINASGVDAKAILSARLSKSRRLENLIAQLPGEKKNGLFGNLIALSLGLTPNFKSNFDLAEDAKLQLSKDTYDDDLDNLLAQIGDQYADLFLAAKNLSDAILLSDILRVNTEITKAPLSASMIKRYDEHHQDLTLLKALVRQQLPEKYKEIFFDQSKNGYAGYIDGGASQEEFYKFIKPILEKMDGTEELLVKLNREDLLRKQRTFDNGSIPHQIHLGELHAILRRQEDFYPFLKDNREKIEKILTFRIPYYVGPLARGNSRFAWMTRKSEETITPWNFEEVVDKGASAQSFIERMTNFDKNLPNEKVLPKHSLLYEYFTVYNELTKVKYVTEGMRKPAFLSGEQKKAIVDLLFKTNRKVTVKQLKEDYFKKIECFDSVEISGVEDRFNASLGTYHDLLKIIKDKDFLDNEENEDILEDIVLTLTLFEDREMIEERLKTYAHLFDDKVMKQLKRRRYTGWGRLSRKLINGIRDKQSGKTILDFLKSDGFANRNFMQLIHDDSLTFKEDIQKAQVSGQGDSLHEHIANLAGSPAIKKGILQTVKVVDELVKVMGRHKPENIVIEMARENQTTQKGQKNSRERMKRIEEGIKELGSQILKEHPVENTQLQNEKLYLYYLQNGRDMYVDQELDINRLSDYDVDHIVPQSFLKDDSIDNKVLTRSDKARGKSDNVPSEEVVKKMKNYWRQLLNAKLITQRKFDNLTKAERGGLSELDKAGFIKRQLVETRQITKHVAQILDSRMNTKYDENDKLIREVKVITLKSKLVSDFRKDFQFYKVREINNYHHAHDAYLNAVVGTALIKKYPKLESEFVYGDYKVYDVRKMIAKSEQEIGKATAKYFFYSNIMNFFKTEITLANGEIRKRPLIETNGETGEIVWDKGRDFATVRKVLSMPQVNIVKKTEVQTGGFSKESILPKRNSDKLIARKKDWDPKKYGGFDSPTVAYSVLVVAKVEKGKSKKLKSVKELLGITIMERSSFEKNPIDFLEAKGYKEVKKDLIIKLPKYSLFELENGRKRMLASAGELQKGNELALPSKYVNFLYLASHYEKLKGSPEDNEQKQLFVEQHKHYLDEIIEQISEFSKRVILADANLDKVLSAYNKHRDKPIREQAENIIHLFTLTNLGAPAAFKYFDTTIDRKRYTSTKEVLDATLIHQSITGLYETRIDLSQLGGDGGPAPEAAAKGGSGGTVSLQDEHRLFDIPVTTSLPDVWLQDFPQAWAETGGLGRAKCQAPIIIDLKPTAVPVSIKQYPMSLEAHMGIRQHIIKFLELGVLRPCRSPWNTPLLPVKKPGTQDYRPVQDLREINKRTVDIHPTVPNPYNLLSTLKPDYSWYTVLDLKDAFFCLPLAPQSQELFAFEWKDPERGISGQLTWTRLPQGFKNSPTLFNEALHRDLTDFRTQHPEVTLLQYVDDLLLAAPTKKACTQGTRHLLQELGEKGYRASAKKAQICQTKVTYLGYILSEGKRWLTPGRIETVARIPPPRNPREVREFLGKAGFCRLFIPGFAELAAPLYALTKPSTPFTWQTEHQLAFEALKKALLSAPALGLPDTSKPFTLFLDERQGIAKGVLTQKLGPWKRPVAYLSKKLDPVAAGWPPCLRIMAATAMLVKDSAKLTLGQPLTVITPHTLEAIVRQPPDRWITNARLTHYQALLLDTDRVQFGPPVTLNPATLLPVPENQPSPHDCRQVLAETHGTREDLKDQELPDADHTWYTDGSSYLDSGTRRAGAAVVDGHNTIWAQSLPPGTSAQKAELIALTKALELSKGKKANIYTDSRYAFATAHTHGSIYERRGWLTSEGKEIKNKAEIIALLKALFLPQEVAIIHCPGHQKGQDPVAVGNRQADRVARQAAMAEVLTLATEPDNTSHITAGKRTADGSEFEKRTADGSEFESPKKKAKVE

SEQ ID NO: 2045 - protein, 2124 aa, synthetic construct
MPAAKRVKLDGGDKKYSIGLDIGTNSVGWAVITDEYKVPSKKFKVLGNTDRHSIKKNLIGALLFDSGETAEATRLKRTARRRYTRRKNRICYLQEIFSNEMAKVDDSFFHRLEESFLVEEDKKHERHPIFGNIVDEVAYHEKYPTIYHLRKKLVDSTDKADLRLIYLALAHMIKFRGHFLIEGDLNPDNSDVDKLFIQLVQTYNQLFEENPINASGVDAKAILSARLSKSRRLENLIAQLPGEKKNGLFGNLIALSLGLTPNFKSNFDLAEDAKLQLSKDTYDDDLDNLLAQIGDQYADLFLAAKNLSDAILLSDILRVNTEITKAPLSASMIKRYDEHHQDLTLLKALVRQQLPEKYKEIFFDQSKNGYAGYIDGGASQEEFYKFIKPILEKMDGTEELLVKLNREDLLRKQRTFDNGSIPHQIHLGELHAILRRQEDFYPFLKDNREKIEKILTFRIPYYVGPLARGNSRFAWMTRKSEETITPWNFEEVVDKGASAQSFIERMTNFDKNLPNEKVLPKHSLLYEYFTVYNELTKVKYVTEGMRKPAFLSGEQKKAIVDLLFKTNRKVTVKQLKEDYFKKIECFDSVEISGVEDRFNASLGTYHDLLKIIKDKDFLDNEENEDILEDIVLTLTLFEDREMIEERLKTYAHLFDDKVMKQLKRRRYTGWGRLSRKLINGIRDKQSGKTILDFLKSDGFANRNFMQLIHDDSLTFKEDIQKAQVSGQGDSLHEHIANLAGSPAIKKGILQTVKVVDELVKVMGRHKPENIVIEMARENQTTQKGQKNSRERMKRIEEGIKELGSQILKEHPVENTQLQNEKLYLYYLQNGRDMYVDQELDINRLSDYDVDHIVPQSFLKDDSIDNKVLTRSDKARGKSDNVPSEEVVKKMKNYWRQLLNAKLITQRKFDNLTKAERGGLSELDKAGFIKRQLVETRQITKHVAQILDSRMNTKYDENDKLIREVKVITLKSKLVSDFRKDFQFYKVREINNYHHAHDAYLNAVVGTALIKKYPKLESEFVYGDYKVYDVRKMIAKSEQEIGKATAKYFFYSNIMNFFKTEITLANGEIRKRPLIETNGETGEIVWDKGRDFATVRKVLSMPQVNIVKKTEVQTGGFSKESILPKRNSDKLIARKKDWDPKKYGGFDSPTVAYSVLVVAKVEKGKSKKLKSVKELLGITIMERSSFEKNPIDFLEAKGYKEVKKDLIIKLPKYSLFELENGRKRMLASAGELQKGNELALPSKYVNFLYLASHYEKLKGSPEDNEQKQLFVEQHKHYLDEIIEQISEFSKRVILADANLDKVLSAYNKHRDKPIREQAENIIHLFTLTNLGAPAAFKYFDTTIDRKRYTSTKEVLDATLIHQSITGLYETRIDLSQLGGDGGSGGSSGGSSGSETPGTSESATPESSGGSSGGSSGGTVSLQDEHRLFDIPVTTSLPDVWLQDFPQAWAETGGLGRAKCQAPIIIDLKPTAVPVSIKQYPMSLEAHMGIRQHIIKFLELGVLRPCRSPWNTPLLPVKKPGTQDYRPVQDLREINKRTVDIHPTVPNPYNLLSTLKPDYSWYTVLDLKDAFFCLPLAPQSQELFAFEWKDPERGISGQLTWTRLPQGFKNSPTLFNEALHRDLTDFRTQHPEVTLLQYVDDLLLAAPTKKACTQGTRHLLQELGEKGYRASAKKAQICQTKVTYLGYILSEGKRWLTPGRIETVARIPPPRNPREVREFLGKAGFCRLFIPGFAELAAPLYALTKPSTPFTWQTEHQLAFEALKKALLSAPALGLPDTSKPFTLFLDERQGIAKGVLTQKLGPWKRPVAYLSKKLDPVAAGWPPCLRIMAATAMLVKDSAKLTLGQPLTVITPHTLEAIVRQPPDRWITNARLTHYQALLLDTDRVQFGPPVTLNPATLLPVPENQPSPHDCRQVLAETHGTREDLKDQELPDADHTWYTDGSSYLDSGTRRAGAAVVDGHNTIWAQSLPPGTSAQKAELIALTKALELSKGKKANIYTDSRYAFATAHTHGSIYERRGWLTSEGKEIKNKAEIIALLKALFLPQEVAIIHCPGHQKGQDPVAVGNRQADRVARQAAMAEVLTLATEPDNTSHITAGKRTADGSEFEKRTADGSEFESPKKKAKVE

SEQ ID NO: 2046 - protein, 2102 aa, synthetic construct
MPAAKRVKLDGGDKKYSIGLDIGTNSVGWAVITDEYKVPSKKFKVLGNTDRHSIKKNLIGALLFDSGETAEATRLKRTARRRYTRRKNRICYLQEIFSNEMAKVDDSFFHRLEESFLVEEDKKHERHPIFGNIVDEVAYHEKYPTIYHLRKKLVDSTDKADLRLIYLALAHMIKFRGHFLIEGDLNPDNSDVDKLFIQLVQTYNQLFEENPINASGVDAKAILSARLSKSRRLENLIAQLPGEKKNGLFGNLIALSLGLTPNFKSNFDLAEDAKLQLSKDTYDDDLDNLLAQIGDQYADLFLAAKNLSDAILLSDILRVNTEITKAPLSASMIKRYDEHHQDLTLLKALVRQQLPEKYKEIFFDQSKNGYAGYIDGGASQEEFYKFIKPILEKMDGTEELLVKLNREDLLRKQRTFDNGSIPHQIHLGELHAILRRQEDFYPFLKDNREKIEKILTFRIPYYVGPLARGNSRFAWMTRKSEETITPWNFEEVVDKGASAQSFIERMTNFDKNLPNEKVLPKHSLLYEYFTVYNELTKVKYVTEGMRKPAFLSGEQKKAIVDLLFKTNRKVTVKQLKEDYFKKIECFDSVEISGVEDRFNASLGTYHDLLKIIKDKDFLDNEENEDILEDIVLTLTLFEDREMIEERLKTYAHLFDDKVMKQLKRRRYTGWGRLSRKLINGIRDKQSGKTILDFLKSDGFANRNFMQLIHDDSLTFKEDIQKAQVSGQGDSLHEHIANLAGSPAIKKGILQTVKVVDELVKVMGRHKPENIVIEMARENQTTQKGQKNSRERMKRIEEGIKELGSQILKEHPVENTQLQNEKLYLYYLQNGRDMYVDQELDINRLSDYDVDHIVPQSFLKDDSIDNKVLTRSDKARGKSDNVPSEEVVKKMKNYWRQLLNAKLITQRKFDNLTKAERGGLSELDKAGFIKRQLVETRQITKHVAQILDSRMNTKYDENDKLIREVKVITLKSKLVSDFRKDFQFYKVREINNYHHAHDAYLNAVVGTALIKKYPKLESEFVYGDYKVYDVRKMIAKSEQEIGKATAKYFFYSNIMNFFKTEITLANGEIRKRPLIETNGETGEIVWDKGRDFATVRKVLSMPQVNIVKKTEVQTGGFSKESILPKRNSDKLIARKKDWDPKKYGGFDSPTVAYSVLVVAKVEKGKSKKLKSVKELLGITIMERSSFEKNPIDFLEAKGYKEVKKDLIIKLPKYSLFELENGRKRMLASAGELQKGNELALPSKYVNFLYLASHYEKLKGSPEDNEQKQLFVEQHKHYLDEIIEQISEFSKRVILADANLDKVLSAYNKHRDKPIREQAENIIHLFTLTNLGAPAAFKYFDTTIDRKRYTSTKEVLDATLIHQSITGLYETRIDLSQLGGDGGGGSEAAAKGSSGGTVSLQDEHRLFDIPVTTSLPDVWLQDFPQAWAETGGLGRAKCQAPIIIDLKPTAVPVSIKQYPMSLEAHMGIRQHIIKFLELGVLRPCRSPWNTPLLPVKKPGTQDYRPVQDLREINKRTVDIHPTVPNPYNLLSTLKPDYSWYTVLDLKDAFFCLPLAPQSQELFAFEWKDPERGISGQLTWTRLPQGFKNSPTLFNEALHRDLTDFRTQHPEVTLLQYVDDLLLAAPTKKACTQGTRHLLQELGEKGYRASAKKAQICQTKVTYLGYILSEGKRWLTPGRIETVARIPPPRNPREVREFLGKAGFCRLFIPGFAELAAPLYALTKPSTPFTWQTEHQLAFEALKKALLSAPALGLPDTSKPFTLFLDERQGIAKGVLTQKLGPWKRPVAYLSKKLDPVAAGWPPCLRIMAATAMLVKDSAKLTLGQPLTVITPHTLEAIVRQPPDRWITNARLTHYQALLLDTDRVQFGPPVTLNPATLLPVPENQPSPHDCRQVLAETHGTREDLKDQELPDADHTWYTDGSSYLDSGTRRAGAAVVDGHNTIWAQSLPPGTSAQKAELIALTKALELSKGKKANIYTDSRYAFATAHTHGSIYERRGWLTSEGKEIKNKAEIIALLKALFLPQEVAIIHCPGHQKGQDPVAVGNRQADRVARQAAMAEVLTLATEPDNTSHITAGKRTADGSEFEKRTADGSEFESPKKKAKVE

SEQ ID NO: 2047 - protein, 2097 aa, synthetic construct
MPAAKRVKLDGGDKKYSIGLDIGTNSVGWAVITDEYKVPSKKFKVLGNTDRHSIKKNLIGALLFDSGETAEATRLKRTARRRYTRRKNRICYLQEIFSNEMAKVDDSFFHRLEESFLVEEDKKHERHPIFGNIVDEVAYHEKYPTIYHLRKKLVDSTDKADLRLIYLALAHMIKFRGHFLIEGDLNPDNSDVDKLFIQLVQTYNQLFEENPINASGVDAKAILSARLSKSRRLENLIAQLPGEKKNGLFGNLIALSLGLTPNFKSNFDLAEDAKLQLSKDTYDDDLDNLLAQIGDQYADLFLAAKNLSDAILLSDILRVNTEITKAPLSASMIKRYDEHHQDLTLLKALVRQQLPEKYKEIFFDQSKNGYAGYIDGGASQEEFYKFIKPILEKMDGTEELLVKLNREDLLRKQRTFDNGSIPHQIHLGELHAILRRQEDFYPFLKDNREKIEKILTFRIPYYVGPLARGNSRFAWMTRKSEETITPWNFEEVVDKGASAQSFIERMTNFDKNLPNEKVLPKHSLLYEYFTVYNELTKVKYVTEGMRKPAFLSGEQKKAIVDLLFKTNRKVTVKQLKEDYFKKIECFDSVEISGVEDRFNASLGTYHDLLKIIKDKDFLDNEENEDILEDIVLTLTLFEDREMIEERLKTYAHLFDDKVMKQLKRRRYTGWGRLSRKLINGIRDKQSGKTILDFLKSDGFANRNFMQLIHDDSLTFKEDIQKAQVSGQGDSLHEHIANLAGSPAIKKGILQTVKVVDELVKVMGRHKPENIVIEMARENQTTQKGQKNSRERMKRIEEGIKELGSQILKEHPVENTQLQNEKLYLYYLQNGRDMYVDQELDINRLSDYDVDHIVPQSFLKDDSIDNKVLTRSDKARGKSDNVPSEEVVKKMKNYWRQLLNAKLITQRKFDNLTKAERGGLSELDKAGFIKRQLVETRQITKHVAQILDSRMNTKYDENDKLIREVKVITLKSKLVSDFRKDFQFYKVREINNYHHAHDAYLNAVVGTALIKKYPKLESEFVYGDYKVYDVRKMIAKSEQEIGKATAKYFFYSNIMNFFKTEITLANGEIRKRPLIETNGETGEIVWDKGRDFATVRKVLSMPQVNIVKKTEVQTGGFSKESILPKRNSDKLIARKKDWDPKKYGGFDSPTVAYSVLVVAKVEKGKSKKLKSVKELLGITIMERSSFEKNPIDFLEAKGYKEVKKDLIIKLPKYSLFELENGRKRMLASAGELQKGNELALPSKYVNFLYLASHYEKLKGSPEDNEQKQLFVEQHKHYLDEIIEQISEFSKRVILADANLDKVLSAYNKHRDKPIREQAENIIHLFTLTNLGAPAAFKYFDTTIDRKRYTSTKEVLDATLIHQSITGLYETRIDLSQLGGDGGGSSGGSGGTVSLQDEHRLFDIPVTTSLPDVWLQDFPQAWAETGGLGRAKCQAPIIIDLKPTAVPVSIKQYPMSLEAHMGIRQHIIKFLELGVLRPCRSPWNTPLLPVKKPGTQDYRPVQDLREINKRTVDIHPTVPNPYNLLSTLKPDYSWYTVLDLKDAFFCLPLAPQSQELFAFEWKDPERGISGQLTWTRLPQGFKNSPTLFNEALHRDLTDFRTQHPEVTLLQYVDDLLLAAPTKKACTQGTRHLLQELGEKGYRASAKKAQICQTKVTYLGYILSEGKRWLTPGRIETVARIPPPRNPREVREFLGKAGFCRLFIPGFAELAAPLYALTKPSTPFTWQTEHQLAFEALKKALLSAPALGLPDTSKPFTLFLDERQGIAKGVLTQKLGPWKRPVAYLSKKLDPVAAGWPPCLRIMAATAMLVKDSAKLTLGQPLTVITPHTLEAIVRQPPDRWITNARLTHYQALLLDTDRVQFGPPVTLNPATLLPVPENQPSPHDCRQVLAETHGTREDLKDQELPDADHTWYTDGSSYLDSGTRRAGAAVVDGHNTIWAQSLPPGTSAQKAELIALTKALELSKGKKANIYTDSRYAFATAHTHGSIYERRGWLTSEGKEIKNKAEIIALLKALFLPQEVAIIHCPGHQKGQDPVAVGNRQADRVARQAAMAEVLTLATEPDNTSHITAGKRTADGSEFEKRTADGSEFESPKKKAKVE
